United States Patent Application Publication US 2011/0183924 A1 - sequence listing, part 282

SEQ ID NO: 871836 - protein, 419 aa, Homo sapiens
MLSDELESKPELLVQFVQNTSIPLGQGLVESEAKDITCLSLLPVTEASECSRLMLPDDTTNHSNSSKEVPSSAVLRSLRVNVGPDGEETRAQTVQKSPEFLSTSESSSLLQDLQPSDSTSFILLNLTRAGLGSSAEHLVFVQDEAEDSGNDFLSSESTDSSIPWFLRVQELAHDSLIAATRAQLAKNAKTSSNGENVHLGSGDGQSKDSGPLPQVEKKLKCTVEGCDRTFVWPAHFKYHLKTHRNDRSFICPAEGCGKSFYVLQRLKVHMRTHNGEKPFMCHESGCGKQFTTAGNLKNHRRIHTGEKPFLCEAQGCGRSFAEYSSLRKHLVVHSGEKPHQCQVCGKTFSQSGSRNVHMRKHHLQLGAAGSQEQEQTAEPLMGSSLLEEASVPSKNLVSMNSQPSLGGESLNLPNTKFLG

SEQ ID NO: 871837 - protein, 425 aa, Homo sapiens
MLPDDTTNHSNSSKEVPSSAVLRSLRVNVGPDGEETRAQTVQKSPEFLSTSESSSLLQDLQPSDSTSFILLNLTRAGLGSSAEHLVFVQDEAEDSGNDFLSSESTDSSIPWFLRVQELAHDSLIAATRAQLAKNAKTSSNGENVHLGSGDGQSKDSGPLPQVEKKLKCTVEGCDRTFVWPAHFKYHLKTHRNDRSFICPAEGCGKSFYVLQRLKVHMRTHNGEKPFMCHESGCGKQFTTAGNLKNHRRIHTGEKPFLCEAQGCGRSFAEYSSLRKHLVVHSGEKPHQCQVCGKTFSQSGSRNVHMRKHHLQLGAAGSQEQEQTAEPLMGSSLLEEASVPSKNLVSMNSQPSLGGESLNLPNTNSILGVDDEVLAEGSPRSLSSVPDVTHHLVTMQSGRQSYEVSVLTAVNPQELLNQGDLTERRT

SEQ ID NO: 871838 - protein, 495 aa, Homo sapiens
MLSDELESKPELLVQFVQNTSIPLGQGLVESEAKDITCLSLLPVTEASECSRLMLPEPVPWREEDGKSGCSDLNDTTNHSNSSKEVPSSAVLRSLRVNVGPDGEETRAQTVQKSPEFLSTSESSSLLQDLQPSDSTSFILLNLTRAGLGSSAEHLVFVQDEAEDSGNDFLSSESTDSSIPWFLRVQELAHDSLIAATRAQLAKNAKTSSNGENVHLGSGDGQSKDSGPLPQVEKKLKCTVEGCDRTFVWPAHFKYHLKTHRNDRSFICPAEGCGKSFYVLQRLKVHMRTHNGEKPFMCHESGCGKQFTTAGNLKNHRRIHTGEKPFLCEAQGCGRSFAEYSSLRKHLVVHSGEKPHQCQVCGKTFSQSGSRNVHMRKHHLQLGAAGSQEQEQTAEPLMGSSLLEEASVPSKNLVSMNSQPSLGGESLNLPNTNSILGVDDEVLAEGSPRSLSSVPDVTHHLVTMQSGRQSYEVSVLTAVNPQELLNQGDLTERRT

SEQ ID NO: 871839 - protein, 495 aa, Homo sapiens; identical to SEQ ID NO: 871838

SEQ ID NO: 871840 - protein, 439 aa, Homo sapiens
RVWIGRGRSECSRLMLPDDTTNHSNSSKEVPSSAVLRSLRVNVGPDGEETRAQTVQKSPEFLSTSESSSLLQDLQPSDSTSFILLNLTRAGLGSSAEHLVFVQDEAEDSGNDFLSSESTDSSIPWFLRVQELAHDSLIAATRAQLAKNAKTSSNGENVHLGSGDGQSKDSGPLPQVEKKLKCTVEGCDRTFVWPAHFKYHLKTHRNDRSFICPAEGCGKSFYVLQRLKVHMRTHNGEKPFMCHESGCGKQFTTAGNLKNHRRIHTGEKPFLCEAQGCGRSFAEYSSLRKHLVVHSGEKPHQCQVCGKTFSQSGSRNVHMRKHHLQLGAAGSQEQEQTAEPLMGSSLLEEASVPSKNLVSMNSQPSLGGESLNLPNTNSILGVDDEVLAEGSPRSLSSVPDVTHHLVTMQSGRQSYEVSVLTAVNPQELLNQGDLTERRT

SEQ ID NO: 871841 - protein, 478 aa, Homo sapiens; identical to SEQ ID NO: 871835

SEQ ID NO: 871842 - protein, 405 aa, Homo sapiens
MLSDELESKPELLVQFVQNTSIPLGQGLVESEAKDITCLSLLPVTEASECSRLMLPGLGSSAEHLVFVQDEAEDSGNDFLSSESTDSSIPWFLRVQELAHDSLIAATRAQLAKNAKTSSNGENVHLGSGDGQSKDSGPLPQVEKKLKCTVEGCDRTFVWPAHFKYHLKTHRNDRSFICPAEGCGKSFYVLQRLKVHMRTHNGEKPFMCHESGCGKQFTTAGNLKNHRRIHTGEKPFLCEAQGCGRSFAEYSSLRKHLVVHSGEKPHQCQVCGKTFSQSGSRNVHMRKHHLQLGAAGSQEQEQTAEPLMGSSLLEEASVPSKNLVSMNSQPSLGGESLNLPNTNSILGVDDEVLAEGSPRSLSSVPDVTHHLVTMQSGRQSYEVSVLTAVNPQELLNQGDLTERRT

SEQ ID NO: 871843 - protein, 472 aa, Homo sapiens
MLSDELESKPELLVQFVQNTSIPLGQGLVESEAKDITCLSLLPVTEASECSRLMLPDDTTNHSNSSKEVPSSAVLRSLRVNVGPDGEETRAQTVQKSPEFLSTSESSSLLQDLQPSDSTSFILLNLTRAGLGSSAEHLVFVQDEAEDSGNDFLSSESTDSSIPWFLRVQELAHDSLIAATRAQLAKNAKTSSNGENVHLGSGDGQSKDSGPLPQVEKKLKCTVEGCDRTFVWPAHFKYHLKTHRNDRSFICPAEGCGKSFYVLQRLKVHMRTHNGEKPFMCHESGCGKQFTTAGNLKNHRRIHTGEKPFLCEAQGCGRSFAEYSSLRKHLVVHSGEKPHQCQVCGKTFSQSGSRNVHMRKHHLQLGAAGSQEQEQTAEPLMGSSLLEEASVPSKNLVSMNSQPSLGGESLNLPNTNSILGVDDEVLAEGSPRSLSSVPDVTHHLVTMQSGRQSYEVSVLTAVNPQETVLQPG

SEQ ID NO: 871844 - protein, 430 aa, Homo sapiens
MLSDELESKPELLVQFVQNTSIPLGQGLVESEAKDITCLSLLPVTEASECSRLMLPDDTTNHSNSSKEVPSSAVLRSLRVNVGPDGEETRAQTVQKSPEFLSTSESSSLLQDLQPSDSTSFILLNLTRAGLGSSAEHLVFVQDEAEDSGNDFLSSESTDSSIPWFLRVQELAHDSLIAATRAQLAKNAKTSSNGENVHLGSGDGQSKDSGPLPQVEKKLKCTVEGCDRTFVWPAHFKYHLKTHRNDRSFICPAEGCGKSFYVLQRLKVHMRTHNGEKPFMCHESGCGKQFTTAGNLKNHRRIHTGEKPFLCEAQGCGRSFAEYSSLRKHLVVHSGEKPHQCQVCGKTFSQSGSRNVHMRKHHLQLGAAGSQEQEQTAEPLMGSSLLEEASVPSKNLVSMNSQPSLGGESLNLPNTNSILGVDDVMEELNF

SEQ ID NO: 871845 - protein, 388 aa, Homo sapiens
MLSDELESKPELLVQFVQNTSIPLGQGLVESEAKDITCLSLLPVTEASECSRLMLPDDTTNHSNSSKEVPSSAVLRSLRVNVGPDGEETRAQTVQKSPEFLSTSESSSLLQDLQPSDSTSFILLNLTRAGLGSSAEHLVFVQDEAEDSGNDFLSSESTDSSIPWFLRVQELAHDSLIAATRAQLAKNAKTSSNGENVHLGSGDGQSKDSGPLPQVEKKLKCTVEGCDRTFVWPAHFKYHLKTHRNDRSFICPAEGCGKSFYVLQRLKVHMRTHNGEKPFMCHESGCGKQFTTAGNLKNHRRIHTGEKPFLCEAQGCGRSFAEYSSLRKHLVVHSAEPLMGSSLLEEASVPSKNLVSMNSQPSLGGESLNLPNTNSILGVDDVMEELNF

SEQ ID NO: 871846 - protein, 346 aa, Homo sapiens
MLSDELESKPELLVQFVQNTSIPLGQGLVESEAKDITCLSLLPVTEASECSRLMLPDDTTNHSNSSKEVPSSAVLRSLRVNVGPDGEETRAQTVQKSPEFLSTSESSSLLQDLQPSDSTSFILLNLTRAGLGSSAEHLVFVQDEAEDSGNDFLSSESTDSSIPWFLRVQELAHDSLIAATRAQLAKNAKTSSNGENVHLGSGDGQSKDSGPLPQVEKKLKCTVEGCDRTFVWPAHFKYHLKTHRNDRSFICPAEGCGKSFYVLQRLKVHMRTHNGEKPFMCHESGCGKQFTTAGNLKNHRRIHTGEKPFLCEAQGCGRSFAEVLSCPIHFYLVTLLSSLMEHTVAC

SEQ ID NO: 871847 - protein, 156 aa, Homo sapiens
NERSLKALRLKDDNQSIDSVICGKTFSQSGSRNVHMRKHHLQLGAAGSQEQEQTAEPLMGSSLLEEASVPSKNLVSMNSQPSLGGESLNLPNTNSILGVDDEVLAEGSPRSLSSVPDVTHHLVTMQSGRQSYEVSVLTAVNPQELLNQGDLTERRT

SEQ ID NO: 871848 - protein, 478 aa, Homo sapiens; identical to SEQ ID NO: 871835

SEQ ID NO: 871849 - protein, 431 aa, Homo sapiens
MLSDELESKPELLVQFVQNTSIPLGQGLVESEAKDITCLSLLPVTEASECSRLMLPDDTTNHSNSSKEVPSSAVLRSLRVNVGPDGEETRAQTVQKSPEFLSTSESSSLLQDLQPSDSTSFILLNLTRAGLGSSAEHLVFVQDEAEDSGNDFLSSESTDSSIPWFLRVQELAHDSLIAATRAQLAKNAKTSSNGENVHLGSGDGQSKDSGPLPQVEKKLKCTVEGCDRTFVWPAHFKYHLKTHRNDRSFICPAEGCGKSFYVLQRLKVHMRTHNGEKPFMCHESGCGKQFTTAGNLKNHRRIHTGEKPFLCEAQGCGRSFAEYSSLRKHLVVHSGEKPHQCQVCGKTFSQSGSRNVHMRKHHLQLGAAGSQEQEQTEVLAEGSPRSLSSVPDVTHHLVTMQSGRQSYEVSVLTAVNPQELLNQGDLTERRT

SEQ ID NO: 871850 - protein, 478 aa, Homo sapiens; identical to SEQ ID NO: 871835

SEQ ID NO: 871851 - protein, 478 aa, Homo sapiens; identical to SEQ ID NO: 871835

SEQ ID NO: 871852 - protein, 417 aa, Homo sapiens
MQSANVTSPSSAVLRSLRVNVGPDGEETRAQTVQKSPEFLSTSESSSLLQDLQPSDSTSFILLNLTRAGLGSSAEHLVFVQDEAEDSGNDFLSSESTDSSIPWFLRVQELAHDSLIAATRAQLAKNAKTSSNGENVHLGSGDGQSKDSGPLPQVEKKLKCTVEGCDRTFVWPAHFKYHLKTHRNDRSFICPAEGCGKSFYVLQRLKVHMRTHNGEKPFMCHESGCGKQFTTAGNLKNHRRIHTGEKPFLCEAQGCGRSFAEYSSLRKHLVVHSGEKPHQCQVCGKTFSQSGSRNVHMRKHHLQLGAAGSQEQEQTAEPLMGSSLLEEASVPSKNLVSMNSQPSLGGESLNLPNTNSILGVDDEVLAEGSPRSLSSVPDVTHHLVTMQSGRQSYEVSVLTAVNPQELLNQGDLTERRT

SEQ ID NO: 871853 - protein, 417 aa, Homo sapiens; identical to SEQ ID NO: 871852

SEQ ID NO: 871854 - protein, 453 aa, Homo sapiens
MLSDELESKPELLVQFVQNTSIPLGQGLVESEAKDITCLSLLPVTEASECSRLMLPDDTTNHSNSSKEVPSSAVLRSLRVNVGPDGEETRAQTVQKSPEFLSTSESSSLLQDLQPSDSTSFILLNLTRAGLGSSAEHLVFVQDEAEDSGNDFLSSESTDSSIPWFLRVQELAHDSLIAATRAQLAKNAKTSSNGENVHLGSGDGQSKDSGPLPQVEKKLKCTVEGCDRTFVWPAHFKYHLKTHRNDRSFICPAEGCGKSFYVLQRLKVHMRTHNGEKPFMCHESGCGKQFTTAGNLKNHRRIHTGEKPFLCEAQGCGRSFAEYSSLRKHLVVHSGEKPHQCQVCGKTFSQSGSRNVHMRKHHLQLGAAGSQEQEQTAEPLMGSSLLEEASVPSKNLVSMNSHQEVEFSRCLVALKKGVMSILLLHSPFSNLSKRLSATGLQKNKLLESPLGPG

SEQ ID NO: 871855 - protein, 445 aa, Homo sapiens
MLSDELESKPELLVQFVQNTSIPLGQGLVESEAKDITCLSLLPVTEASECSRLMLPDDTTNHSNSSKEVPSSAVLRSLRVNVGPDGEETRAQTVQKSPEFLSTSESSSLLQDLQPSDSTSFILLNLTRAGLGSSAEHLVFVQDEAEDSGNDFLSSESTDSSIPWFLRVQELAHDSLIAATRAQLAKNAKTSSNGENVHLGSGDGQSKDSGPLPQVEKKLKCTVEGCDRTFVWPAHFKYHLKTHRNDRSFICPAEGCGKSFYVLQRLKVHMRTHNGEKPFMCHESGCGKQFTTAGNLKNHRRIHTGEKPFLCEAQGCGRSFAEYSSLRKHLVVHSGEKPHQCQVCGKTFSQSGSRNVHMRKHHLQLGAAGSQEQEQTAEPLMGSSLLEEASVPSKNLVSMNSSLPLGCKKINYLNLPLAQAEVLSCPIHFYLVTLLSSLMEHTVAC

SEQ ID NO: 871856 - protein, 407 aa, Homo sapiens
MLSDELESKPELLVQFVQNTSIPLGQGLVESEAKDITCLSLLPVTEASECSRLMLPDDTTNHSNSSKEVPSSAVLRSLRVNVGPDGEETRAQTVQKSPEFLSTSESSSLLQDLQPSDSTSFILLNLTRAGLGSSAEHLVFVQDEAEDSGNDFLSSESTDSSIPWFLRVQELAHDSLIAATRAQLAKNAKTSSNGENVHLGSGDGQSKDSGPLPQVEKKLKCTVEGCDRTFVWPAHFKYHLKTHRNDRSFICPAEGCGKSFYVLQRLKVHMRTHNGEKPFMCHESGCGKQFTTAGNLKNHRRIHTGEKPFLCEAQGCGRSFAEYSSLRKHLVVHSGEKPHQCQVCGKTFSQSGSRNVLGSSCVGAWVQSGGLWPMVDLCQSPLTGVDPPWWVLPPHFGVRGEPPVGGS

SEQ ID NO: 871857 - protein, 344 aa, Homo sapiens
MLSDELESKPELLVQFVQNTSIPLGQGLVESEAKDITCLSLLPVTEASECSRLMLPDDTTNHSNSSKEVPSSAVLRSLRVNVGPDGEETRAQTVQKSPEFLSTSESSSLLQDLQPSDSTSFILLNLTRAGLGSSAEHLVFVQDEAEDSGNDFLSSESTDSSIPWFLRVQELAHDSLIAATRAQLAKNAKTSSNGENVHLGSGDGQSKDSGPLPQVEKKLKCTVEGCDRTFVWPAHFKYHLKTHRNDRSFICPAEGCGKSFYVLQRLKVHMRTHNGEKPFMCHESGCGKQFTTAGNLKNHRRIHTGEKPFLCEAQGCGRSFAEYSSLRKHLVVHSGIRTSAIHRF

SEQ ID NO: 871858 - protein, 334 aa, Homo sapiens
MLSDELESKPELLVQFVQNTSIPLGQGLVESEAKDITCLSLLPVTEASECSRLMLPDDTTNHSNSSKEVPSSAVLRSLRVNVGPDGEETRAQTVQKSPEFLSTSESSSLLQDLQPSDSTSFILLNLTRAGLGSSAEHLVFVQDEAEDSGNDFLSSESTDSSIPWFLRVQELAHDSLIAATRAQLAKNAKTSSNGENVHLGSGDGQSKDSGPLPQVEKKLKCTVEGCDRTFVWPAHFKYHLKTHRNDRSFICPAEGCGKSFYVLQRLKVHMRTHNGEKPFMCHESGCGKQFTTAGNLKNHRRIHTGEVPFLCEAHRRARSMAKAVTRRKPLASES

SEQ ID NO: 871859 - protein, 128 aa, Homo sapiens
MAPTWGPGMVSVVGPMGLLVVLLVGGCAAEEPPRFIKEPKDQIGVSGGVASFVCQATGDPKPRVTWNKKGKKVNSQRFETIEFDESAGAVLRIQPLRTPRDENVYECVAQNSVGEITVHAKLTVLRGP

SEQ ID NO: 871860 - protein, 1910 aa, Homo sapiens
MAPTWGPGMVSVVGPMGLLVVLLVGGCAAEEPPRFIKEPKDQIGVSGGVASFVCQATGDPKPRVTWNKKGKKVNSQRFETIEFDESAGAVLRIQPLRTPRDENVYECVAQNSVGEITVHAKLTVLREDQLPSGFPNIDMGPQLKVVERTRTATMLCAASGNPDPEITWFKDFLPVDPSASNGRIKQLRSGALQIESSEETDQGKYECVATNSAGVRYSSPANLYVRVRRVAPRFSILPMSHEIMPGGNVNITCVAVGSPMPYVKWMQGAEDLTPEDDMPVGRNVLELTDVKDSANYTCVAMSSLGVIEAVAQITVKSLPKAPGTPMVTENTATSITITWDSGNPDPVSYYVIEYKSKSQDGPYQIKEDITTTRYSIGGLSPNSEYEIWVSAVNSIGQGPPSESVVTRTGEQAPASAPRNVQARMLSATTMIVQWEEPVEPNGLIRGYRVYYTMEPEHPVGNWQKHNVDDSLLTTVGSLLEDETYTVRVLAFTSVGDGPLSDPIQVKTQQGVPGQPMNLRAEARSETSITLSWSPPRQESIIKYELLFREGDHGREVGRTFDPTTSYVVEDLKPNTEYAFRLAARSPQGLGAFTPVVRQRTLQSKPSAPPQDVKCVSVRSTAILVSWRPPPPETHNGALVGYSVRYRPLGSEDPEPKEVNGIPPTTTQILLEALEKWTQYRITTVAHTEVGPGPESSPVVVRTDEDVPSAPPRKVEAEALNATAIRVLWRSPAPGRQHGQIRGYQVHYVRMEGAEARGPPRIKDVMLADAQEMVITNLQPETAYSITVAAYTMKGDGARSKPKVVVTKGAVLGRPTLSVQQTPEGSLLARWEPPAGTAEDQVLGYRLQFGREDSTPLATLEFPPSEDRYTASGVHKGATYVFRLAARSRGGLGEEAAEVLSIPEDTPRGHPQILEAAGNASAGTVLLRWLPPVPAERNGAIVKYTVAVREAGALGPARETELPAAAEPGAENALTLQGLKPDTAYDLQVRAHTRRGPGPFSPPVRYRTFLRDQVSPKNFKVKMIMKTSVLLSWEFPDNYNSPTPYKIQYNGLTLDVDGRTTKKLITHLKPHTFYNFVLTNRGSSLGGLQQTVTAWTAFNLLNGKPSVAPKPDADGFIMVYLPDGQSPVPVQSYFIVMVPLRKSRGGQFLTPLGSPEDMDLEELIQDISRLQRRSLRHSRQLEVPRPYIAARFSVLPPTFHPGDQKQYGGFDNRGLEPGHRYVLFVLAVLQKSEPTFAASPFSDPFQLDNPDPQPIVDGEEGLIWVIGPVLAVVFIICIVIAILLYKNKPDSKRKDSEPRTKCLLNNADLAPHHPKDPVEMRRINFQTPGMLSHPPIPIADMAEHTERLKANDSLKLSQEYESIDPGQQFTWEHSNLEVNKPKNRYANVIAYDHSRVILQPIEGIMGSDYINANYVDGYRRQNAYIATQGPLPETFGDFWRMVWEQRSATIVMMTRLEEKSRIKCDQYWPNRGTETYGFIQVTLLDTIELATFCVRTFSLHKNGSSEKREVRQFQFTAWPDHGVPEYPTPFLAFLRRVKTCNPPDAGPIVVHCSAGVGRTGCFIVIDAMLERIKPEKTVDVYGHVTLMRSQRNYMVQTEDQYSFIHEALLEAVGCGNTEVPARSLYAYIQKLAQVEPGEHVTGMELEFKRLANSKAHTSRFISANLPCNKFKNRLVNIMPYESTRVCLQPIRGVEGSDYINASFIDGYRQQKAYIATQGPLAETTEDFWRMLWENNSTIVVMLTKLREMGREKCHQYWPAERSARYQYFVVDPMAEYNMPQYILREFKVTDARDGQSRTVRQFQFTDWPEQGVPKSGEGFIDFIGQVHKTKEQFGQDGPISVHCSAGVGRTGVFITLSIVLERMRYEGVVDIFQTVKMLRTQRPAMVQTEDEYQFCYQAALEYLGSFDHYAT

SEQ ID NO: 871861 - protein, 1879 aa, Homo sapiens
MAPTWGPGMVSVVGPMGLLVVLLVGGCAAEEPPRFIKEPKDQIGVSGGVASFVCQATGDPKPRVTWNKKGKKVNSQRFETIEFDESAGAVLRIQPLRTPRDENVYECVAQNSVGEITVHAKLTVLREDQLPSGFPNIDMGPQLKVVERTRTATMLCAASGNPDPEITWFKDFLPVDPSASNGRIKQLRSGALQIESSEETDQGKYECVATNSAGVRYSSPANLYVRVRRVAPRFSILPMSHEIMPGGNVNITCVAVGSPMPYVKWMQGAEDLTPEDDMPVGRNVLELTDVKDSANYTCVAMSSLGVIEAVAQITVKSLPKAPGTPMVTENTATSITITWDSGNPDPVSYYVIEYKSKSQDGPYQIKEDITTTRYSIGGLSPNSEYEIWVSAVNSIGQGPPSESVVTRTGEQAPASAPRNVQARMLSATTMIVQWEEPVEPNGLIRGYRVYYTMEPEHPVGNWQKHNVDDSLLTTVGSLLEDETYTVRVLAFTSVGDGPLSDPIQVKTQQGVPGQPMNLRAEARSETSITLSWSPPRQESIIKYELLFREGDHGREVGRTFDPTTSYVVEDLKPNTEYAFRLAARSPQGLGAFTPVVRQRTLQSKPSAPPQDVKCVSVRSTAILVSWRPPPPETHNGALVGYSVRYRPLGSEDPEPKEVNGIPPTTTQILLEALEKWTQYRITTVAHTEVGPGPESSPVVVRTDEDVPSAPPRKVEAEALNATAIRVLWRSPAPGRQHGQIRGYQVHYVRMEGAEARGPPRIKDVMLADAQWETDDTAEYEMVITNLQPETAYSITVAAYTMKGDGARSKPKVVVTKGAVLGRPTLSVQQTPEGSLLARWEPPAGTAEDQVLGYRLQFGREDSTPLATLEFPPSEDRYTASGVHKGATYVFRLAARSRGGLGEEAAEVLSIPEDTPRGHPQILEAAGNASAGTVLLRWLPPVPAERNGAIVKYTVAVREAGALGPARETELPAAAEPGAENALTLQGLKPDTAYDLQVRAHTRRGPGPFSPPVRYRTFLRDQVSPKNFKVKMIMKTSVLLSWEFPDNYNSPTPYKIQYNGLTLDVDGRTTKKLITHLKPHTFYNFVLTNRGSSLGGLQQTVTAWTAFNLLNGKPSVAPKPDADGFIMVYLPDGQSPVPVQSYFIVMVPLRKSRGGQFLTPLGSPEDMDLEELIQDISRLQRRSLRHSRQLEVPRPYIAARFSVLPPTFHPGDQKQYGGFDNRGLEPGHRYVLFVLAVLQKSEPTFAASPFSDPFQLDNPDPQPIVDGEEGLIWVIGPVLAVVFIICIVIAILLYKNKPDSKRKDSEPRTKCLLNNADLAPHHPKDPVEMRRINFQTPGMLSHPPIPIADMAEHTERLKANDSLKLSQEYESIDPGQQFTWEHSNLEVNKPKNRYANVIAYDHSRVILQPIEGIMGSDYINANYVDGYRRQNAYIATQGPLPETFGDFWRMVWEQRSATIVMMTRLEEKSRIKCDQYWPNRGTETYGFIQVTLLDTIELATFCVRTFSLHKNGSSEKREVRQFQFTAWPDHGVPEYPTPFLAFLRRVKTCNPPDAGPIVVHCSAGVGRTGCFIVIDAMLERIKPEKTVDVYGHVTLMRSQRNYMVQTEDQYSFIHEALLEAVGCGNTEVPARSLYAYIQKLAQVEPGEHVTGMELEFKRLANSKAHTSRFISANLPCNKFKNRLVNIMPYESTRVCLQPIRGVEGSDYINASFIDGYRQQKAYIATQGPLAETTEDFWRMLWENNSTIVVMLTKLREMGREKCHQYWPAERSARYQYFVVDPMAEYNMPQYILREFKVTDARDGQSRTVRQFQFTDWPEQGVPKSGEGFIDFIGQVHKTKEQFGQDGPISVHCSAGVGRTGVFITLSIVLEYLGSFDHYAT

SEQ ID NO: 871862 - protein, 429 aa, Homo sapiens
GCLEDTIRRVLRRTFSLHKNGSSEKREVRQFQFTAWPDHGVPEYPTPFLAFLRRVKTCNPPDAGPIVVHCSAGVGRTGCFIVIDAMLERIKPEKTVDVYGHVTLMRSQRNYMVQTEDQYSFIHEALLEAVGCGNTEVPARSLYAYIQKLAQVEPGEHVTGMELEFKRLANSKAHTSRFISANLPCNKFKNRLVNIMPYESTRVCLQPIRGVEGSDYINASFIDGYRQQKAYIATQGPLAETTEDFWRMLWENNSTIVVMLTKLREMGREKCHQYWPAERSARYQYFVVDPMAEYNMPQYILREFKVTDARDGQSRTVRQFQFTDWPEQGVPKSGEGFIDFIGQVHKTKEQFGQDGPISVHCSAGVGRTGVFITLSIVLERMRYEGVVDIFQTVKMLRTQRPAMVQTEDEYQFCYQAALEYLGSFDHYAT

SEQ ID NO: 871863 - protein, 1009 aa, Homo sapiens
MAPTWGPGMVSVVGPMGLLVVLLVGGCAAEEPPRFIKEPKDQIGVSGGVASFVCQATGDPKPRVTWNKKGKKVNSQRFETIEFDESAGAVLRIQPLRTPRDENVYECVAQNSVGEITVHAKLTVLREDQLPSGFPNIDMGPQLKVVERTRTATMLCAASGNPDPEITWFKDFLPVDPSASNGRIKQLRSGALQIESSEETDQGKYECVATNSAGVRYSSPANLYVRVRRVAPRFSILPMSHEIMPGGNVNITCVAVGSPMPYVKWMQGAEDLTPEDDMPVGRNVLELTDVKDSANYTCVAMSSLGVIEAVAQITVKSLPKAPGTPMVTENTATSITITWDSGNPDPVSYYVIEYKSKSQDGPYQIKEDITTTRYSIGGLSPNSEYEIWVSAVNSIGQGPPSESVVTRTGEQAPASAPRNVQARMLSATTMIVQWEEPVEPNGLIRGYRVYYTMEPEHPVGNWQKHNVDDSLLTTVGSLLEDETYTVRVLAFTSVGDGPLSDPIQVKTQQGVPGQPMNLRAEARSETSITLSWSPPRQESIIKYELLFREGDHGREVGRTFDPTTSYVVEDLKPNTEYAFRLAARSPQGLGAFTPVVRQRTLQSKPSAPPQDVKCVSVRSTAILVSWRPPPPETHNGALVGYSVRYRPLGSEDPEPKEVNGIPPTTTQILLEALEKWTQYRITTVAHTEVGPGPESSPVVVRTDEDVPSAPPRKVEAEALNATAIRVLWRSPAPGRQHGQIRGYQVHYVRMEGAEARGPPRIKDVMLADAQWETDDTAEYEMVITNLQPETAYSITVAAYTMKGDGARSKPKVVVTKGAVLGRPTLSVQQTPEGSLLARWEPPAGTAEDQVLGYRLQFGREDSTPLATLEFPPSEDRYTASGVHKGATYVFRLAARSRGGLGEEAAEVLSIPEDTPRGHPQILEAAGNASAGTVLLRWLPPVPAERNGAIVKYTVAVREAGALGPARETELPAAAEPGAENALTLQGLKPDTAYDLQVRFIVENKYNFVF

SEQ ID NO: 871864 - protein, 1944 aa, Homo sapiens
MAPTWGPGMVSVVGPMGLLVVLLVGGCAAEEPPRFIKEPKDQIGVSGGVASFVCQATGDPKPRVTWNKKGKKVNSQRFETIEFDESAGAVLRIQPLRTPRDENVYECVAQNSVGEITVHAKLTVLREDQLPSGFPNIDMGPQLKVVERTRTATMLCAASGNPDPEITWFKDFLPVDPSASNGRIKQLRSETFESTPIRGALQIESSEETDQGKYECVATNSAGVRYSSPANLYVRVRRVAPRFSILPMSHEIMPGGNVNITCVAVGSPMPYVKWMQGAEDLTPEDDMPVGRNVLELTDVKDSANYTCVAMSSLGVIEAVAQITVKSLPKAPGTPMVTENTATSITITWDSGNPDPVSYYVIEYKSKSQDGPYQIKEDITTTRYSIGGLSPNSEYEIWVSAVNSIGQGPPSESVVTRTGEQAPASAPRNVQARMLSATTMIVQWEEPVEPNGLIRGYRVYYTMEPEHPVGNWQKHNVDDSLLTTVGSLLEDETYTVRVLAFTSVGDGPLSDPIQVKTQQGVPGQPMNLRAEARSETSITLSWSPPRQESIIKYELLFREGDHGREVGRTFDPTTSYVVEDLKPNTEYAFRLAARSPQGLGAFTPVVRQRTLQSKPSAPPQDVKCVSVRSTAILVSWRPPPPETHNGALVGYSVRYRPLGSEDPEPKEVNGIPPTTTQILLEALEKWTQYRITTVAHTEVGPGPESSPVVVRTDEDVPSAPPRKVEAEALNATAIRVLWRSPAPGRQHGQIRGYQVHYVRMEGAEARGPPRIKDVMLADAQWETDDTAEYEMVITNLQPETAYSITVAAYTMKGDGARSKPKVVVTKGAVLGRPTLSVQQTPEGSLLARWEPPAGTAEDQVLGYRLQFGREDSTPLATLEFPPSEDRYTASGVHKGATYVFRLAARSRGGLGEEAAEVLSIPEDTPRGHPQILEAAGNASAGTVLLRWLPPVPAERNGAIVKYTVAVREAGALGPARETELPAAAEPGAENALTLQGLKPDTAYDLQVRAHTRRGPGPFSPPVRYRTFLRDQVSPKNFKVKMIMKTSVLLSWEFPDNYNSPTPYKIQYNGLTLDVDGRTTKKLITHLKPHTFYNFVLTNRGSSLGGLQQTVTAWTAFNLLNGKPSVAPKPDADGFIMVYLPDGQSPVPVQSYFIVMVPLRKSRGGQFLTPLGSPEDMDLEELIQDISRLQRRSLRHSRQLEVPRPYIAARFSVLPPTFHPGDQKQYGGFDNRGLEPGHRYVLFVLAVLQKSEPTFAASPFSDPFQLDNPDPQPIVDGEEGLIWVIGPVLAVVFIICIVIAILLYKNKPDSKRKDSEPRTKCLLNNADLAPHHPKDPVEMRRINFQTPDSGLRSPLREPGFHFESMLSHPPIPIADMAEHTERLKANDSLKLSQEYESIDPGQQFTWEHSNLEVNKPKNRYANVIAYDHSRVILQPIEGIMGSDYINANYVDGYRRQNAYIATQGPLPETFGDFWRMVWEQRSATIVMMTRLEEKSRIKCDQYWPNRGTETYGFIQVTLLDTIELATFCVRTFSLHKNGSSEKREVRQFQFTAWPDHGVPEYPTPFLAFLRRVKTCNPPDAGPIVVHCSAGVGRTGCFIVIDAMLERIKPEKTVDVYGHVTLMRSQRNYMVQTEDQYSFIHEALLEAVGCGNTEVPARSLYAYIQKLAQVEPGEHVTGMELEFKRLANSKAHTSRFISANLPCNKFKNRLVNIMPYESTRVCLQPIRGVEGSDYINASFIDGYRQQKAYIATQGPLAETTEDFWRMLWENNSTIVVMLTKLREMGREKCHQYWPAERSARYQYFVVDPMAEYNMPQYILREFKVTDARDGQSRTVRQFQFTDWPEQGVPKSGEGFIDFIGQVHKTKEQFGQDGPISVHCSAGVGRTGVFITLSIVLERMRYEGVVDIFQTVKMLRTQRPAMVQTEDEYQFCYQAALEYLGSFDHYAT

SEQ ID NO: 871865 - protein, 1501 aa, Homo sapiens
MAPTWGPGMVSVVGPMGLLVVLLVGGCAAEEPPRFIKEPKDQIGVSGGVASFVCQATGDPKPRVTWNKKGKKVNSQRFETIEFDESAGAVLRIQPLRTPRDENVYECVAQNSVGEITVHAKLTVLREDQLPSGFPNIDMGPQLKVVERTRTATMLCAASGNPDPEITWFKDFLPVDPSASNGRIKQLRSGALQIESSEETDQGKYECVATNSAGVRYSSPANLYVRVRRVAPRFSILPMSHEIMPGGNVNITCVAVGSPMPYVKWMQGAEDLTPEDDMPVGRNVLELTDVKDSANYTCVAMSSLGVIEAVAQITVKSLPKAPGTPMVTENTATSITITWDSGNPDPVSYYVIEYKSKSQDGPYQIKEDITTTRYSIGGLSPNSEYEIWVSAVNSIGQGPPSESVVTRTGEQAPASAPRNVQARMLSATTMIVQWEEPVEPNGLIRGYRVYYTMEPEHPVGNWQKHNVDDSLLTTVGSLLEDETYTVRVLAFTSVGDGPLSDPIQVKTQQGVPGQPMNLRAEARSETSITLSWSPPRQESIIKYELLFREGDHGREVGRTFDPTTSYVVEDLKPNTEYAFRLAARSPQGLGAFTPVVRQRTLQSISPKNFKVKMIMKTSVLLSWEFPDNYNSPTPYKIQYNGLTLDVDGRTTKKLITHLKPHTFYNFVLTNRGSSLGGLQQTVTAWTAFNLLNGKPSVAPKPDADGFIMVYLPDGQSPVPVQSYFIVMVPLRKSRGGQFLTPLGSPEDMDLEELIQDISRLQRRSLRHSRQLEVPRPYIAARFSVLPPTFHPGDQKQYGGFDNRGLEPGHRYVLFVLAVLQKSEPTFAASPFSDPFQLDNPDPQPIVDGEEGLIWVIGPVLAVVFIICIVIAILLYKNKPDSKRKDSEPRTKCLLNNADLAPHHPKDPVEMRRINFQTPGMLSHPPIPIADMAEHTERLKANDSLKLSQEYESIDPGQQFTWEHSNLEVNKPKNRYANVIAYDHSRVILQPIEGIMGSDYINANYVDGYRRQNAYIATQGPLPETFGDFWRMVWEQRSATIVMMTRLEEKSRIKCDQYWPNRGTETYGFIQVTLLDTIELATFCVRTFSLHKNGSSEKREVRQFQFTAWPDHGVPEYPTPFLAFLRRVKTCNPPDAGPIVVHCSAGVGRTGCFIVIDAMLERIKPEKTVDVYGHVTLMRSQRNYMVQTEDQYSFIHEALLEAVGCGNTEVPARSLYAYIQKLAQVEPGEHVTGMELEFKRLANSKAHTSRFISANLPCNKFKNRLVNIMPYESTRVCLQPIRGVEGSDYINASFIDGYRQQKAYIATQGPLAETTEDFWRMLWENNSTIVVMLTKLREMGREKCHQYWPAERSARYQYFVVDPMAEYNMPQYILREFKVTDARDGQSRTVRQFQFTDWPEQGVPKSGEGFIDFIGQVHKTKEQFGQDGPISVHCSAGVGRTGVFITLSIVLERMRYEGVVDIFQTVKMLRTQRPAMVQTEDEYQFCYQAALEYLGSFDHYAT

SEQ ID NO: 871866 - protein, 592 aa, Homo sapiens
MRRINFQTPGMLSHPPIPIADMAEHTERLKANDSLKLSQEYESIDPGQQFTWEHSNLEVNKPKNRYANVIAYDHSRVILQPIEGIMGSDYINANYVDGYRRQNAYIATQGPLPETFGDFWRMVWEQRSATIVMMTRLEEKSRIKCDQYWPNRGTETYGFIQVTLLDTIELATFCVRTFSLHKNGSSEKREVRQFQFTAWPDHGVPEYPTPFLAFLRRVKTCNPPDAGPIVVHCSAGVGRTGCFIVIDAMLERIKPEKTVDVYGHVTLMRSQRNYMVQTEDQYSFIHEALLEAVGCGNTEVPARSLYAYIQKLAQVEPGEHVTGMELEFKRLANSKAHTSRFISANLPCNKFKNRLVNIMPYESTRVCLQPIRGVEGSDYINASFIDGYRQQKAYIATQGPLAETTEDFWRMLWENNSTIVVMLTKLREMGREKCHQYWPAERSARYQYFVVDPMAEYNMPQYILREFKVTDARDGQSRTVRQFQFTDWPEQGVPKSGEGFIDFIGQVHKTKEQFGQDGPISVHCSAGVGRTGVFITLSIVLERMRYEGVVDIFQTVKMLRTQRPAMVQTEDEYQFCYQAALEYLGSFDHYAT

SEQ ID NO: 871867 - protein, 1182 aa, Homo sapiens
MAPTWGPGMVSVVGPMGLLVVLLVGGCAAEEPPRFIKEPKDQIGVSGGVASFVCQATGDPKPRVTWNKKGKKVNSQRFETIEFDESAGAVLRIQPLRTPRDENVYECVAQNSVGEITVHAKLTVLREDQLPSGFPNIDMGPQLKVVERTRTATMLCAASGNPDPEITWFKDFLPVDPSASNGRIKQLRSGALQIESSEETDQGKYECVATNSAGVRYSSPANLYVRVRRVAPRFSILPMSHEIMPGGNVNITCVAVGSPMPYVKWMQGAEDLTPEDDMPVGRNVLELTDVKDSANYTCVAMSSLGVIEAVAQITVKSLPKAPGTPMVTENTATSITITWDSGNPDPVSYYVIEYKSKSQDGPYQIKEDITTTRYSIGGLSPNSEYEIWVSAVNSIGQGPPSESVVTRTGEQAPASAPRNVQARMLSATTMIVQWEEPVEPNGLIRGYRVYYTMEPEHPVGNWQKHNVDDSLLTTVGSLLEDETYTVRVLAFTSVGDGPLSDPIQVKTQQGVPGQPMNLRAEARSETSITLSWSPPRQESIIKYELLFREGDHGREVGRTFDPTTSYVVEDLKPNTEYAFRLAARSPQGLGAFTPVVRQRTLQSKPSAPPQDVKCVSVRSTAILVSWRPPPPETHNGALVGYSVRYRPLGSEDPEPKEVNGIPPTTTQILLEALEKWTQYRITTVAHTEVGPGPESSPVVVRTDEDVPSAPPRKVEAEALNATAIRVLWRSPAPGRQHGQIRGYQVHYVRMEGAEARGPPRIKDVMLADAQWETDDTAEYEMVITNLQPETAYSITVAAYTMKGDGARSKPKVVVTKGAVLGRPTLSVQQTPEGSLLARWEPPAGTAEDQVLGYRLQFGREDSTPLATLEFPPSEDRYTASGVHKGATYVFRLAARSRGGLGEEAAEVLSIPEDTPRGHPQILEAAGNASAGTVLLRWLPPVPAERNGAIVKYTVAVREAGALGPARETELPAAAEPGAENALTLQGLKPDTAYDLQVRAHTRRGPGPFSPPVRYRTFLRDQVSPKNFKVKMIMKTSVLLSWEFPDNYNSPTPYKIQYNGLTLDVDGRTTKKLITHLKPHTFYNFVLTNRGSSLGGLQQTVTAWTAFNLLNGKPSVAPKPDADGFIMVYLPDGQSPVPVQSYFIVMVPLRKSRGGQFLTPLGSPEDMDLEELIQDISSTRPRI

SEQ ID NO: 871868 - protein, 228 aa, Homo sapiens
MERVKMINVQRLLEAAEFLERRERECEHGYASSFPSMPSPRLQHSKPPRRLSRAQKHSSGSSNTSTANRSTHNELEKNRRAHLRLCLERLKVLIPLGPDCTRHTTLGLLNKAKAHIKKLEEAERKSQHQLENLEREQRFLKWRLEQLQGPQEMERIRMDSIGSTISSDRSDSEREEIEVDVESTEFSHGEVDNISTTSISDIDDHSSLPSIGSDEGYSSASVKLSFTS

SEQ ID NO: 871869 - protein, 182 aa, Homo sapiens
MPSPRLQHSKPPRRLSRAQKHSSGSSNTSTANRRAHLRLCLERLKVLIPLGPDCTRHTTLGLLNKAKAHIKKLEEAERKSQHQLENLEREQRFLKWRLEQLQGPQEMERIRMDSIGSTISSDRSDSEREEIEVDVESTEFSHGEVDNISTTSISDIDDHSSLPSIGSDEGYSSASVKLSFTS

SEQ ID NO: 871870 - protein, 390 aa, Homo sapiens
RSDGDRLALGPRRQSASVCPVGSFNLPYTQTHSETDTHSHTLTHTTAGSEAREVRPAFRPGAFSAPAGRVSLGARSSAGPRSPVRGRARRTPASSMGKRGRPRKEARCEGAGLAPAAPPAVPPAVAAPQPPALPEDPAGAKPRCPFSDIFNTSENSMEKHINTFLQNVQILLEAASYLEQIEKENKKCEHGYASSFPSMPSPRLQHSKPPRRLSRAQKHSSGSSNTSTANRSTHNELEKNRRAHLRLCLERLKVLIPLGPDCTRHTTLGLLNKAKAHIKKLEEAERKSQHQLENLEREQRFLKWRLEQLQGPQEMERIRMDSIGSTISSDRSDSEREEIEVDVESTEFSHGEVDNISTTSISDIDDHSSLPSIGSDEGYSSASVKLSFTS

SEQ ID NO: 871871 - protein, 222 aa, Homo sapiens [sequence omitted]

SEQ ID NO: 871872 - protein, 228 aa, Homo sapiens
MAQKDQELGDCGVERENVFLRLVRKCEHGYASSFPSMPSPRLQHSKPPRRLSRAQKHSSGSSNTSTANRSTHNELEKNRRAHLRLCLERLKVLIPLGPDCTRHTTLGLLNKAKAHIKKLEEAERKSQHQLENLEREQRFLKWRLEQLQGPQEMERIRMDSIGSTISSDRSDSEREEIEVDVESTEFSHGEVDNISTTSISDIDDHSSLPSIGSDEGYSSASVKLSFTS

SEQ ID NO: 871873 - protein, 218 aa, Homo sapiens
MERVKMINVQRLLEAAEFLERRERECEHGYASSFPSMPSPRLQHSKPPRRLSRAQKHSSGSSNTSTANRRAHLRLCLERLKVLIPLGPDCTRHTTLGLLNKAKAHIKKLEEAERKSQHQLENLEREQRFLKWRLEQLQGPQEMERIRMDSIGSTISSDRSDSEREEIEVDVESTEFSHGEVDNISTTSISDIDDHSSLPSIGSDEGYSSASVKLSFTS

SEQ ID NO: 871874 - protein, 228 aa, Homo sapiens; identical to SEQ ID NO: 871868

SEQ ID NO: 871875 - protein, 228 aa, Homo sapiens; identical to SEQ ID NO: 871868

SEQ ID NO: 871876 - protein, 228 aa, Homo sapiens; identical to SEQ ID NO: 871868

SEQ ID NO: 871877 - protein, 231 aa, Homo sapiens
RSDGDRLALGPRRQSASVCPVGSFNLPYTQTHSETDTHSHTLTHTTAGSEAREVRPAFRPGAFSAPAGRVSLGARSSAGPRSPVRGRARRTPASSMGKRGRPRKEARCEGAGLAPAAPPAVPPAVAAPQPPALPEDPAGAKPRCPFSDIFNTSENSMEKHINTFLQNVQILLEAASYLEQIEKENKKCEHGYASSFPSMPSPRLQHSKPPRRLSRAQKHSSGSSNTSTANR

SEQ ID NO: 871878 - protein, 228 aa, Homo sapiens; identical to SEQ ID NO: 871868

SEQ ID NO: 871879 - protein, 228 aa, Homo sapiens; identical to SEQ ID NO: 871868

SEQ ID NO: 871880 - protein, 228 aa, Homo sapiens; identical to SEQ ID NO: 871868

SEQ ID NO: 871881 - protein, 112 aa, Homo sapiens
GCWEIRGRRNTDAGGGQGKGRGRENTERGKTGGEGPLNTCGVMRWGPFSGGSPRGCRDGAERPGTRRLWCRERKCLSKTCSKYTKILGLKRLFRTERVESKGEFLRQAKSMR

SEQ ID NO: 871882 - protein, 370 aa, Homo sapiens
RSDGDRLALGPRRQSASVCPVGSFNLPYTQTHSETDTHSHTLTHTTAGSEAREVRPAFRPGAFSAPAGRVSLGARSSAGPRSPVRGRARRTPASSMGKRGRPRKEARCEGAGLAPAAPPAVPPAVAAPQPPALPEDPAGAKPRCPFSDIFNTSENSMEKHINTFLQNVQILLEAASYLEQIEKENKKCEHGYASSFPSMPSPRLQHSKPPRRLSRAQKHSSGSSNTSTANRSTHNELEKNRRAHLRLCLERLKVLIPLGPDCTRHTTLGLLNKAKAHIKRFLKWRLEQLQGPQEMERIRMDSIGSTISSDRSDSEREEIEVDVESTEFSHGEVDNISTTSISDIDDHSSLPSIGSDEGYSSASVKLSFTS

SEQ ID NO: 871883 - protein, 135 aa, Homo sapiens
QLTPEEKQHGNRLWIVQQSQFHIKKLEEAERKSQHQLENLEREQRFLKWRLEQLQGPQEMERIRMDSIGSTISSDRSDSEREEIEVDVESTEFSHGEVDNISTTSISDIDDHSSLPSIGSDEGYSSASVKLSFTS

SEQ ID NO: 871884 - protein, 228 aa, Homo sapiens; identical to SEQ ID NO: 871868

SEQ ID NO: 871885 - protein, 425 aa, Homo sapiens
MSSILPFTPPIVKRLLGWKKGEQNGQEEKWCEKAVKSLVKKLKKTGQLDELEKAITTQNVNTKCITIPRSLDGRLQVSHRKGLPHVIYCRLWRWPDLHSHHELRAMELCEFAFNMKKDEVCVNPYHYQRVETPVLPPVLVPRHTEIPAEFPPLDDYSHSIPENTNFPAGIEPQSNIPETPPPGYLSEDGETSDHQMNHSMDAGSPNLSPNPMSPAHNNLDLQPVTYCEPAFWCSISYYELNQRVGETFHASQPSMTVDGFTDPSNSERFCLGLLSNVNRNAAVELTRRHIGRGVRLYYIGGEVFAECLSDSAIFVQSPNCNQRYGWHPATVCKIPPGCNLKIFNNQEFAALLAQSVNQGFEAVYQLTRMCTIRMSFVKGWGAEYRRQTVTSTPCWIELHLNGPLQWLDKVLTQMGSPSIRCSSVS

SEQ ID NO: 871886 - protein, 320 aa, Homo sapiens
MELCEFAFNMKKDEVCVNPYHYQRVETPVLPPVLVPRHTEIPAEFPPLDDYSHSIPENTNFPAGIEPQSNIPETPPPGYLSEDGETSDHQMNHSMDAGSPNLSPNPMSPAHNNLDLQPVTYCEPAFWCSISYYELNQRVGETFHASQPSMTVDGFTDPSNSERFCLGLLSNVNRNAAVELTRRHIGRGVRLYYIGGEVFAECLSDSAIFVQSPNCNQRYGWHPATVCKIPPGCNLKIFNNQEFAALLAQSVNQGFEAVYQLTRMCTIRMSFVKGWGAEYRRQTVTSTPCWIELHLNGPLQWLDKVLTQMGSPSIRCSSVS

SEQ ID NO: 871887 - protein, 320 aa, Homo sapiens; identical to SEQ ID NO: 871886

SEQ ID NO: 871888 - protein, 274 aa, Homo sapiens
MELCEFAFNMKKDEVCVNPYHYQRVETPVLPPVLVPRHTEIPAEFPPLDDYSHSIPENTNFPAGIEPQSNIPETPPPGYLSEDGETSDHQMNHSMDAGSPNLSPNPMSPAHNNLDLQPVTYCEPAFWCSISYYELNQRVGETFHASQPSMTVDGFTDPSNSERFCLGLLSNVNRNAAVELTRRHIGCNLKIFNNQEFAALLAQSVNQGFEAVYQLTRMCTIRMSFVKGWGAEYRRQTVTSTPCWIELHLNGPLQWLDKVLTQMGSPSIRCSSVS

SEQ ID NO: 871889 - protein, 425 aa, Homo sapiens; identical to SEQ ID NO: 871885

SEQ ID NO: 871890 - protein, 425 aa, Homo sapiens; identical to SEQ ID NO: 871885

SEQ ID NO: 871891 - protein, 230 aa, Homo sapiens
MNHSMDAGSPNLSPNPMSPAHNNLDLQPVTYCEPAFWCSISYYELNQRVGETFHASQPSMTVDGFTDPSNSERFCLGLLSNVNRNAAVELTRRHIGRGVRLYYIGGEVFAECLSDSAIFVQSPNCNQRYGWHPATVCKIPPGCNLKIFNNQEFAALLAQSVNQGFEAVYQLTRMCTIRMSFVKGWGAEYRRQTVTSTPCWIELHLNGPLQWLDKVLTQMGSPSIRCSSVS

SEQ ID NO: 871892 - protein, 344 aa, Homo sapiens
MAQKENSYPWPYGRQTAPSGLSTLPQRVLRKEPVTPSALVLMSRSNVQPTAAPGQKVMENSSGTPDILTRHFTIDDFEIGRPLGKGKFGNVYLAREKKSHFIVALKVLFKSQIEKEGVEHQLRREIEIQAHLHHPNILRLYNYFYDRRRIYLILEYAPRGELYKELQKSCTFDEQRTATIMEELADALMYCHGKKVIHRDIKPENLLLGLKGELKIADFGWSVHAPSLRRKTMCGTLDYLPPEMIEGRMHNEKVDLWCIGVLCYELLVGNPPFESASHNETYRRIVKVDLKFPASVPTGAQDLISKLLRHNPSERLPLAQVSAHPWVRANSRRVLPPSALQSVA

SEQ ID NO: 871893 - protein, 344 aa, Homo sapiens; identical to SEQ ID NO: 871892

SEQ ID NO: 871894 - protein, 344 aa, Homo sapiens; identical to SEQ ID NO: 871892

SEQ ID NO: 871895 - protein, 344 aa, Homo sapiens; identical to SEQ ID NO: 871892

SEQ ID NO: 871896 - protein, 341 aa, Homo sapiens
MAQKENSYPWPYGRQTAPSGLSTLPQRVLRKEPVTPSALVLMSRSNVQPTAAPGQKVMENSSGTPDILTRHFTIDDFEIGRPLGKGKFGNVYLAREKKSHFIVALKVLFKSQIEKEGVEHQLRREIEIQAHLHHPNILRLYNYFYDRRRIYLILEYAPRGELYKELQKSCTFDEQRTATIMEELADALMYCHGKKVIHRDIKPENLLLGLKGELKIADFGWSVHAPSLRRKTMCGTLDYLPPEMIEGRMHNEKVDLWCIGVLCYELLVGNPPFESASHNETYRRIVKVDLKFPASVPTGAQDLISKLCLPLPFNLSPDGPCHSLGCVCLYVCVCIGERRDP

SEQ ID NO: 871897 - protein, 303 aa, Homo sapiens
MSRSNVQPTAAPGQKVMENSSGTPDILTRHFTIDDFEIGRPLGKGKFGNVYLAREKKSHFIVALKVLFKSQIEKEGVEHQLRREIEIQAHLHHPNILRLYNYFYDRRRIYLILEYAPRGELYKELQKSCTFDEQRTATIMEELADALMYCHGKKVIHRDIKPENLLLGLKGELKIADFGWSVHAPSLRRKTMCGTLDYLPPEMIEGRMHNEKVDLWCIGVLCYELLVGNPPFESASHNETYRRIVKVDLKFPASVPTGAQDLISKLLRHNPSERLPLAQVSAHPWVRANSRRVLPPSALQSVA

SEQ ID NO: 871898 - protein, 366 aa, Homo sapiens
KGERGRRPRTADHCVPSLGGPEGEPYPWPRPTDGPTGEAPSGLSTLPQRVLRKEPVTPSALVLMSRSNVQPTAAPGQKVMENSSGTPDILTRHFTIDDFEIGRPLGKGKFGNVYLAREKKSHFIVALKVLFKSQIEKEGVEHQLRREIEIQAHLHHPNILRLYNYFYDRRRIYLILEYAPRGELYKELQKSCTFDEQRTATIMEELADALMYCHGKKVIHRDIKPENLLLGLKGELKIADFGWSVHAPSLRRKTMCGTLDYLPPEMIEGRMHNEKVDLWCIGVLCYELLVGNPPFESASHNETYRRIVKVDLKFPASVPTGAQDLISKLLRHNPSERLPLAQVSAHPWVRANSRRVLPPSALQSVA

SEQ ID NO: 871899 - protein, 164 aa, Homo sapiens [sequence omitted]

SEQ ID NO: 871900 - protein, 176 aa, Homo sapiens
MTLRLGVLWAKIMEELADALMYCHGKKVIHRDIKPENLLLGLKGELKIADFGWSVHAPSLRRKTMCGTLDYLPPEMIEGRMHNEKVDLWCIGVLCYELLVGNPPFESASHNETYRRIVKVDLKFPASVPTGAQDLISKLLRHNPSERLPLAQVSAHPWVRANSRRVLPPSALQSVA

SEQ ID NO: 871901 - protein, 344 aa, Homo sapiens; identical to SEQ ID NO: 871892

SEQ ID NO: 871902 - protein, 344 aa, Homo sapiens; identical to SEQ ID NO: 871892

SEQ ID NO: 871903 - protein, 344 aa, Homo sapiens; identical to SEQ ID NO: 871892

SEQ ID NO: 871904 - protein, 303 aa, Homo sapiens; identical to SEQ ID NO: 871897

SEQ ID NO: 871905 - protein, 312 aa, Homo sapiens [sequence omitted]

SEQ ID NO: 871906 - protein, 440 aa, Homo sapiens
MAQKENSYPWPYGRQTAPSGLSTLPQRVLRKEPVTPSALVLMSRSNVQPTAAPGQKVMENSSGTPDILTRHFTIDDFEIGRPLGKGKFGNVYLAREKKSHFIVALKVLFKSQIEKEGVEHQLRREIEIQAHLQYGLMPPEPKPLCSLTPSSSFSPNFIQIAFSVAMASEPHLALSPGKPWIQKSASSFPLPLPALVSPAWATSDPSLLLSSFPALLCLWPEASSVSSPSHPNILRLYNYFYDRRRIYLILEYAPRGELYKELQKSCTFDEQRTATIMEELADALMYCHGKKVIHRDIKPENLLLGLKGELKIADFGWSVHAPSLRRKTMCGTLDYLPPEMIEGRMHNEKVDLWCIGVLCYELLVGNPPFESASHNETYRRIVKVDLKFPASVPTGAQDLISKLLRHNPSERLPLAQVSAHPWVRANSRRVLPPSALQSVA

SEQ ID NO: 871907 - protein, 163 aa, Homo sapiens
YEEKQQQTEVRFPSFQRTTVGKGEPSCEVGGEHWQGETFLTPLFPGVFDPGNEKKFDPGLVLSLDLRNLTFSFHKVLPGKDQLPILSPGQPLQPLLVNLACQETKPTLPHWAWLLYSVPSTGEKASSSIHPYSFPGQPGSKPISYISLCRCQCMLWLLAKSWF

SEQ ID NO: 871908 - protein, 761 aa, Homo sapiens
HARGQRPRLESPQSPGGSSWWTPLSCRTSGTPPRPLPSFPSAPPQRLSRWVDSAQTARPRGRCACGRGSTPLVVAWRCAGGGGDITRDSRSAVGMIHELLLALSGYPGSIFTWNKRSGLQVSQDFPFLHPSETSVLNRLCRLGTDYIRFTEFIEQYTGHVQQQDHHPSQQGQGGLHGIYLRAFCTGLDSVLQPYRQALLDLEQEFLGDPHLSISHVNYFLDQFQLLFPSVMVVVEQIKSQKIHGCQILETVYKHSCGGLPPVRSALEKILAVCHGVMYKQLSAWMLHGLLLDQHEEFFIKQGPSSGNVSAQPEEDEEDLGIGGLTGKQLRELQDLRLIEEENMLAPSLKQFSLRVEILPSYIPVRVAEKILFVGESVQMFENQNVNLTRKGSILKNQEDTFAAELHRLKQQPLFSLVDFEQVVDRIRSTVAEHLWKLMVEESDLLGQLKIIKDFYLLGRGELFQAFIDTAQHMLKTPPTAVTEHDVNVAFQQSAHKVLLDDDNLLPLLHLTIEYHGKEHKADATQAREGPSRETSPREAPASGWAALGLSYKVQWPLHILFTPAVLEKYNVVFKYLLSVRRVQAELQHCWALQMQRKHLKSNQTDAIKWRLRNHMAFLVDNLQYYLQVDVLESQFSQLLHQINSTRDFESIRLAHDHFLSNLLAQSFILLKPVFHCLNEILDLCHSFCSLVSQNLGPLDERGAAQLSILVKGFSRQSSLLFKILSSVRNHQINSDLAQLLLRLDYNKYYTQAGGTLGSFGM

SEQ ID NO: 871909 - protein, 782 aa, Homo sapiens
HARGQRPRLESPQSPGGSSWWTPLSCRTSGTPPRPLPSFPSAPPQRLSRWVDSAQTARPRGRCACGRGSTPLVVAWRCAGGGGDITRDSRSAVGMIHELLLALSGYPGSIFTWNKRSGLQVSQDFPFLHPSETSVLNRLCRLGTDYIRFTEFIEQYTGHVQQQDHHPSQQGQGGLHGIYLRAFCTGLDSVLQPYRQALLDLEQEFLGDPHLSISHVNYFLDQFQLLFPSVMVVVEQIKSQKIHGCQILETVYKHSCGGLPPVRSALEKILAVCHGVMYKQLSAWMLHGLLLDQHEEFFIKQGPSSGNVSAQPEEDEEDLGIGGLTGKQLRELQDLRLIEEENMLAPSLKQFSLRVEILPSYIPVRVAEKILFVGESVQMFENQNVNLTRKGSILKNQEDTFAAELHRLKQQPLFSLVDFEQVVDRIRSTVAEHLWKLMVEESDLLGQLKIIKDFYLLGRGELFQAFIDTAQHMLKTPPTAVTEHDVNVAFQQSAHKVLLDDDNLLPLLHLTIEYHGKEHKADATQAREGPSRETSPREAPASGWAALGLSYKVQWPLHILFTPAVLEKNRQFYKPNRMGLSSASLPTNRYNVVFKYLLSVRRVQAELQHCWALQMQRKHLKSNQTDAIKWRLRNHMAFLVDNLQYYLQVDVLESQFSQLLHQINSTRDFESIRLAHDHFLSNLLAQSFILLKPVFHCLNEILDLCHSFCSLVSQNLGPLDERGAAQLSILVKGFSRQSSLLFKILSSVRNHQINSDLAQLLLRLDYNKYYTQAGGTLGSFGM

SEQ ID NO: 871910 - protein, 727 aa, Homo sapiens
HARGQRPRLESPQSPGGSSWWTPLSCRTSGTPPRPLPSFPSAPPQRLSRWVDSAQTARPRGRCACGRGSTPLVVAWRCAGGGGDITRDSRSAVGMIHELLLALSGYPGSIFTWNKRSGLQVSQDFPFLHPSETSVLNRLCRLGTDYIRFTEFIEQYTGHVQQQDHHPSQQGQGGLHGIYLRAFCTGLDSVLQPYRQALLDLEQEFLGDPHLSISHVNYFLDQFQLLFPSVMVVVEQIKSQKIHGCQILETVYKHSCGGLPPVRSALEKILAVCHGVMYKQLSAWMLHGLLLDQHEEFFIKQGPSSGNVSAQPEEDEEDLGIGGLTGKQLRELQDLRLIEEENMLAPSLKQFSLRVEILPSYIPVRVAEKILFVGESVQMFENQNVNLTRKGSILKNQEDTFAAELHRLKQQPLFSLVDFEQVVDRIRSTVAEHLWKLMVEESDLLGQLKIIKDFYLLGRGELFQAFIDTAQHMLKTPPTAVTEHDVNVAFQQSAHKVLLDDDNLLPLLHLTIEYHGKEHKADATQAREGPSRETSPREAPASGWAALGLSYKVQWPLHILFTPAVLEKYNVVFKYLLSVRRVQAELQHCWALQMQRKHLKSNQTDAIKWRLRNHMAFLVDNLQYYLQVDVLESQFSQLLHQINSTRDFESIRLAHDHFLSNLLAQSFILLKPVFHCLNEILDLCHSFCSLVSQNLGPLDERGAAQLSILVKVRLPGSMQPCRKDRGL

SEQ ID NO: 871911 - protein, 243 aa, Homo sapiens
AKPIRAGSEAWVVVTIEYHGKEHTDATQAREGPSRETSPREAPASGWAALGLSYKVQWPLHILFTPAVLEKYNVVFKYLLSVRRVQAELQHCWALQMQRKHLKSNQTDAIKWRLRNHMAFLVDNLQYYLQVDVLESQFSQLLHQINSTRDFESIRLAHDHFLSNLLAQSFILLKPVFHCLNEILDLCHSFCSLVSQNLGPLDERGAAQLSILVKVRLPGSMQPCRKDRGGFANGEFMIFPLSQ

SEQ ID NO: 871912 - protein, 761 aa, Homo sapiens; identical to SEQ ID NO: 871908

SEQ ID NO: 871913 - protein, 203 aa, Homo sapiens
HARGQRPRLESPQSPGGSSWWTPLSCRTSGTPPRPLPSFPSAPPQRLSRWVDSAQTARPRGRCACGRGSTPLVVAWRCAGGGGDITRDSRSAVGMIHELLLALSGYPGSIFTWNKRSGLQVSQDFPFLHPSETSVLNRLCRLGTDYIRFTEFIEQYTGHVQQQVGPVLCGCTPLEGRSYVKLSPLEGRSYVKLSVNLSVIHVK

SEQ ID NO: 871914 - protein, 568 aa, Homo sapiens
HARGQRPRLESPQSPGGSSWWTPLSCRTSGTPPRPLPSFPSAPPQRLSRWVDSAQTARPRGRCACGRGSTPLVVAWRCAGGGGDITRDSRSAVGMIHELLLALSGYPGSIFTWNKRSGLQVSQDFPFLHPSETSVLNRLCRLGTDYIRFTEFIEQYTGHVQQQDHHPSQQGQGGLHGIYLRAFCTGLDSVLQPYRQALLDLEQEFLGDPHLSISHVNYFLDQFQLLFPSVMVVVEQIKSQKIHGCQILETVYKHSCGGLPPVRSALEKILAVCHGVMYKQLSAWMLHGLLLDQHEEFFIKQGPSSGNVSAQPEEDEEDLGIGGLTGKQLRELQDLRLIEEENMLAPSLKQFSLRVEILPSYIPVRVAEKILFVGESVQMFENQNVNLTRKGSILKNQEDTFAAELHRLKQQPLFSLVDFEQVVDRIRSTVAEHLWKLMVEESDLLGQLKIIKDFYLLGRGELFQAFIDTAQHMLKTPPTAVTEHDVNVAFQQSAHKVLLDDDNLLPLLHLTIEYHGKEHKADATQAREGPSRETSPREAPASGWAALGLSYKVQWPLHILFTPAVLEK

SEQ ID NO: 871915 - protein, 70 aa, Homo sapiens
LEVDGRRIRFTGSAEGNGLAVVILTVMLVGSDLHSLMFPESTGCLYPDFQSQLICSYPSEQTIPNATNLR

SEQ ID NO: 871916 - protein, 523 aa, Homo sapiens [sequence omitted]

SEQ ID NO: 871917 - protein, 330 aa, Homo sapiens
MPVVTTDAESETGIPKSLSNEPPSETMEEIEHTCPQPRLTLTAPAPFADETNCQCQAPHEKLTIAQARLGTPADRPVRVYADGIFDLFHSGHARALMQAKTLFPNSYLLVGVCSDDLTHKFKGFTVMNEAERYEALRHCRYVDEVIRDAPWTLTPEFLEKHKIDFVAHDDIPYSSAGSDDVYKHIKEAGMFVPTQRTEGISTSDIITRIVRDYDVYARRNLQRGYTAKELNVSFINEKRYRFQNQVDKMKEKVKNVEERSKEFVNRVEEKSHDLIQKWEEKSREFIGNFLELFGPDGAWKQMFQERSSRMLQALSPKQSPLKSWARCRDF

SEQ ID NO: 871918 - protein, 108 aa, Homo sapiens
MVGHQECIMEEDNRAPQLWRKTLTAPAPFADETNCQCQAPHEKLTIAQARLGTPADRPVRVYADGIFDLFAHIVRASNSVVGRHEEDKMRVDVEEERREWITTLDAGR

SEQ ID NO: 871919 - protein, 203 aa, Homo sapiens [sequence omitted]

SEQ ID NO: 871920 - protein, 311 aa, Homo sapiens
MPVVTTDAESETGIPKSLSNEPPSETMEEIEHTCPQPRLTLTAPAPFADETNCQCQAPHEKLTIAQARLGTPADRPVRVYADGIFDLFHSGHARALMQAKTLFPNSYLLVGVCSDDLTHKFKGFTVMNEAERYEALRHCRYVDEVIRDAPWTLTPEFLEKHKIDFVAHDDIPYSSAGSDDVYKHIKEAGMFVPTQRTEGISTSDIITRIVRDYDVYARRNLQRGYTAKELNVSFINEKRYRFQNQVDKMKEKVKNVEERSKEFVNRVEEKSHDLIQKWEEKSREFIGNFLELFGPDGAWSGCSLNLLLLRP

SEQ ID NO: 871921 - protein, 369 aa, Homo sapiens
MPVVTTDAESETGIPKSLSNEPPSETMEEIEHTCPQPRLTLTAPAPFADETNCQCQAPHEKLTIAQARLGTPADRPVRVYADGIFDLFHSGHARALMQAKTLFPNSYLLVGVCSDDLTHKFKGFTVMNEAERYEALRHCRYVDEVIRDAPWTLTPEFLEKHKIDFVAHDDIPYSSAGSDDVYKHIKEAGMFVPTQRTEGISTSDIITRIVRDYDVYARRNLQRGYTAKELNVSFINEKRYRFQNQVDKMKEKVKNVEERSKEFVNRVEEKSHDLIQKWEEKSREFIGNFLELFGPDGAWKQMFQERSSRMLQALSPKQSPVSSPTRSRSPSRSPSPTFSWLPLKTSPPSSPKAASASISSMSEGDEDEK

SEQ ID NO: 871922 - protein, 203 aa, Homo sapiens [sequence omitted]

SEQ ID NO: 871923 - protein, 203 aa, Homo sapiens [sequence omitted]

SEQ ID NO: 871924 - protein, 174 aa, Homo sapiens
SAPQSVSCASAWVARGCPEMTQIHTPASCSPVACWVSVHGSICWKHLLFLSILAFVPSLAGLPWEAGAVSSWVRSPRAVLGQVSSGWMCAGGVWRTLQSMHRSPSATLTHPQGESAACRHRAAENWVHTAPLGPHCISAPEWRCREARCVPGAVGQWFPRWGVGTSKGSDKRKT

SEQ ID NO: 871925 - protein, 182 aa, Homo sapiens
NFLNLAKRKRERKKPYRFKKLSEAGCGGSHLWGPRWVDRLSPGVQDQPGQHSETPVERERGEKLNGTLNMINSKKSTLKHLFFWRQIIAVSPRLECSGTISAHSNLCLLGSRDSSASTSPSSWDYKHMLPCPAHFFCISVETGFHRIAQADLELLSSGDLASSASQSARITGGSHRSRPKTS

SEQ ID NO: 871926 - protein, 85 aa, Homo sapiens
AVNSRRRLSGSPAGSPESHAMACRSQAPVWMKSLFLCALIPWGCLWSSLLSFPVSEIVITPLDSPFNGCQNHCTQISCRQQQGFQ

SEQ ID NO: 871927 - protein, 414 aa, Homo sapiens [sequence omitted]

SEQ ID NO: 871928 - protein, 255 aa, Homo sapiens
MASGDTLYIATDGSEMPAEIVELHEIEVETIPVETIETTVVGEEEEEDDDDEDGGGGDHGGGGGHGHAGHHHHHHHHHHHPPMIALQPLVTDDPTQVHHHQEVILVQTREEVVGGDDSDGLRAEDGFEDQILIPVPAPAGGDDDYIEQTLVTVAAAGKSGGGGSSSSGGGRVKKGGGKKSGKKSYLSGGAGAAGGGGADPRATRSGSRSRCRSRPWRASSRSPCGPQMKKKILTMRQWLKNRSLERTHLLIIQNI

SEQ ID NO: 871929 - protein, 255 aa, Homo sapiens; identical to SEQ ID NO: 871928

SEQ ID NO: 871930 - protein, 184 aa, Homo sapiens
MWARHKNPRGRWVLFSPHHRGCFTRVVTTLSFSPHVRDMRESSNSPHPLRGGRIPLPLRPTRVFRERVGRDTLWRGTRPPPRSPLCHTSLPLCPKTSFSLERTCPPRRSVLTRPRSFCGHTRETSCPPLQRKCLEIWRALDNIFAEGLDGHGRNAALEPRRAGGLCTLKPSGSHPLAHSHTLWV

SEQ ID NO: 871931 - protein, 64 aa, Homo sapiens
RQSRLYWGDRAAPHAPAAPRAAPESNKKWEQKQVQIKTLEGEFSVTMWSSGERRPRAPAPGCFC

SEQ ID NO: 871932 - protein, 255 aa, Homo sapiens; identical to SEQ ID NO: 871928

SEQ ID NO: 871933 - protein, 255 aa, Homo sapiens; identical to SEQ ID NO: 871928

SEQ ID NO: 871934 - protein, 255 aa, Homo sapiens; identical to SEQ ID NO: 871928

SEQ ID NO: 871935 - protein, 255 aa, Homo sapiens; identical to SEQ ID NO: 871928

SEQ ID NO: 871936 - protein, 255 aa, Homo sapiens; identical to SEQ ID NO: 871928

SEQ ID NO: 871937 - protein, 121 aa, Homo sapiens
MTLIFHHQVFHGNHFQKVQAIFLFHEMMQQTFNLFSTKDSSDTWDETLLDKFYTELYQQLNDLEACVMEKVGVEETPLRNVDSILAVRKYFQRITLYLTKKKYSPCSWEAVRAEIMRSFSL

SEQ ID NO: 871938 - protein, 160 aa, Homo sapiens
MADEEKLPPGWEKRMSRPSGRGYYFNHITNPSQWERPSGNSSSGGKIWQGEPARVRRSHLLVKPVKAALDLAEEITRTKEEALELISGYIQKIKAGEKDFESPASQFSDCSSAKARGDLGAFSKGQMQKPFEDPWFARRTGEMSGTVFTDSGIHVIVRTE

SEQ ID NO: 871939 - protein, 112 aa, Homo sapiens
MALNKNHSEGGGVIANGMYPCPPGYPYPPPPPEFYPGPPMMDGAMGYVQPPPPPYPGPMEPPVSGPDVPSTPAAEAKAAEAAASAYYNPGNPHNVYMPTRPAAATSLLPTGR

SEQ ID NO: 871940 - protein, 271 aa, Homo sapiens
AKKGRKLSCVLSRGTPVGETMALNKNHSEGGGVIVNNTESILMSYDHVELTFNDMKNVPEAFKGTKKGTVYLTPYRVIFLSKGKDAMQSFMMPFYLMKDCEIKQPVFGANYIKGTVKAEAGGGWEGSASYKLTFTAGGAIEFGQRMLQVASQASRGEVPSGAYGTLTCPAGLMSIPRQSPMECTPALLATPIPPPPPEFYPGPPMMDGAMGYVQPPPPPYPGPMEPPVSGPDVPSTPAAEAKAAEAAASAYYNPGNPHNVYMPTSQTASPV

SEQ ID NO: 871941 - protein, 116 aa, Homo sapiens
VKLNEGEGGRGGGWEGSASYKLTFTAGGAIEFGQRMLQVASQEFYPGPPMMDGAMGYVQPPPPPYPGPMEPPVSGPDVPSTPAAEAKAAEAAASAYYNPGNPHNVYMPTSQTASPV

SEQ ID NO: 871942 - protein, 277 aa, Homo sapiens
AKKGRKLSCVLSRGTPVGETMALNKNHSEGGGVIVNNTESILMSYDHVELTFNDMKNVPEAFKGTKKGTVYLTPYRVIFLSKGKDAMQSFMMPFYLMKDCEIKQPVFGANYIKGTVKAEAGGGWEGSASYKLTFTAGGAIEFGQRMLQVASQASRGEVPSGAYGTLTCPAGLMSIPRQSPMECTPALLATPIPPPPPEFYPGPPMMDGAMGYVQPPPPPYPGPMEPPVSGPDVPSTPAAEAKAAEAAASAYYNPGNPHNVYMPTRPAAATSLLPTGR

SEQ ID NO: 871943 - protein, 161 aa, Homo sapiens
AKKGRKLSCVLSRGTPVGETMALNKNHSEGGGVIVNNTESILMSYDHVELTFNDMKNVPEAFKGTKKGTVYLTPYRVIFLSKGKDAMQSFMMPFYLMKDCEIKQPVFGANYIKGTVKAEAGGGWEGSASYKLTFTAGGAIEFGQRMLQVASQGIQAPKIRG

SEQ ID NO: 871944 - protein, 98 aa, Homo sapiens
TLDLATLLWRKQVPCGPYSSIQAPVLSAPEFLFGIQEELGHPHGLKGYGQRPVFPLFNESGSWIPPRSLPKDPQRKGAIVRGSGCLPVWSFDGLEAPR

SEQ ID NO: 871945 - protein, 399 aa, Homo sapiens
PGVPGAAGCGLPLRRVRSGHEKRTVDLPPASSSAMWLRSHRQLCLAFLLVCVLSVIFFLHIHQDSFPHGLGLSILCPDRRLVTPPVAIFCLPGTAMGPNASSSCPQHPASLSGTWTVYPNGRFGNQMGQYATLLALAQLNGRRAFILPAMHAALAPVFRITLPVLAPEVDSRTPWRELQLHDWMSEEYADLRDPFLKLSGFPCSWTFFHHLREQIRREFTLHDHLREEAQSVLGQLRLGRTGDRPRTFVGVHVRRGDYLQVMPQRWKGVVGDSAYLRQAMDWFRARHEAPVFVVTSNGMEWCKENIDTSQGDVTFAGDGQEATPWKDFALLTQCNHTIMTIGTFGFWAAYLAGGDTVYLANFTLPDSEFLKIFKPEAAFLPEWVGINADLSPLWTLAKP

SEQ ID NO: 871946 - protein, 374 aa, Homo sapiens
PGVPGAAGCGLPLRRVRSGHEKRTVDLPPASSSAMWLRSHRQLCLAFLLVCVLSVIFFLHIHQDSFPHGLGLSILCPDRRLVTPPVAIFCLPGTAMGPNASSSCPQHPASLSGTWTVYPNGRFGNQMGQYATLLALAQLNGRRAFILPAMHAALAPVFRITLPVLAPEVDSRTPWRELQLHDWMSEEYADLRDPFLKLSGFPCSWTFFHHLREQIRREFTLHDHLREEAQSVLGQLRLGRTGDRPRTFVGVHVRRGDYLQVMPQRWKGVVGDSAYLRQAMDWFRARHEAPVFVVTSNGMEWCKENIDTSQGDVTFAGDGQEATPWKDFALLTQCNHTIMTIGTFGFWAAYLAGGDTVYLTNWQVPCSLLTTVCP

SEQ ID NO: 871947 - protein, 399 aa, Homo sapiens; identical to SEQ ID NO: 871945

SEQ ID NO: 871948 - protein, 158 aa, Homo sapiens
PGPARRSAGLLRPECAAAGPGGRSRARGAAAGRSGRAAAAPWTPVSSLSSSLTEWPPPKCCQPRKPPALTMSIMDHSPTTGVVTVIVILIAIAALGALILGCWCYLRLQRISQSEDEESIVGDGETKEPFLLVQYSAKGPCVERKAKLMTPNGPEVHG

SEQ ID NO: 871949 - protein, 139 aa, Homo sapiens
ARVPTPVLFRKVVLLRLLNYESQTPVSSLSSSLTEWPPPKCCQPRKPPALTMSIMDHSPTTGVVTVIVILIAIAALGALILGCWCYLRLQRISQSEDEESIVGDGETKEPFLLVQYSAKGPCVERKAKLMTPNGPEVHG

SEQ ID NO: 871950 - protein, 158 aa, Homo sapiens; identical to SEQ ID NO: 871948

SEQ ID NO: 871951 - protein, 76 aa, Homo sapiens
EILSVAVSSGVEEGENSEDLHFQAQSSGLLLRLKAPPLASPKPLLKTMLNESTFWNPEAGEVGSCSFKQHTPKLGV

SEQ ID NO: 871952 - protein, 158 aa, Homo sapiens; identical to SEQ ID NO: 871948

SEQ ID NO: 871953 - protein, 128 aa, Homo sapiens
GNGQRPRSKTGVWRLAGLGTAELADFRSGPPLTAEGRRVRSLAEERAQYVTCSSPNDVDLSSLSSEVGTVLPEKGCSGACLRRDAWKCPAEYEWGDGLAGRSSPGKLTVGWVVERSPRASADLAASRT

SEQ ID NO: 871954 - protein, 128 aa, Homo sapiens; identical to SEQ ID NO: 871953

SEQ ID NO: 871955 - protein, 169 aa, Homo sapiens
GDHWEQLIPGPCFARGRALLHSQLLTPVARTPNESGCDEPHSPGVAHSFCHVPGPTGPHGVGHPSAPRAGKAHLKRAILGQEEALRLHALCRVLREVDLLRAVISQTLQRSLAKYAELDREDDFCEAAEAPDIQREQPGPVWVAASLARVGAFVLEKGRLIALKMQSPR

SEQ ID NO: 871956 - protein, 753 aa, Homo sapiens
MGEHSPDNNIIYFEAEEDELTPDDKMLRFVDKNGLVPSSSGTVYDRTTVLIEQDPGTLEDEDDDGQCGEHLPFLVGGEEGFHLIDHEAMSQGYVQHIISPDQIHLTINPGSTPMPRNIEGATLTLQSECPETKRKEVKRYQCTFEGCPRTYSTAGNLRTHQKTHRGEYTFVCNQEGCGKAFLTSYSLRIHVRVHTKEKPFECDVQGCEKAFNTLYRLKAHQRLHTGKTFNCESEGCSKYFTTLSDLRKHIRTHTGEKPFRCDHDGCGKAFAASHHLKTHVRTHTGERPFFCPSNGCEKTFSTQYSLKSHMKGHDNKGHSYNALPQHNGSEDTNHSLCLSDLSLLSTDSELRENSSTTQGQDLSTISPAIIFESMFQNSDDTAIQEDPQQTASLTESFNGDAESVSDVPPSTGNSASLSLPLVLQPGLSEPPQPLLPASAPSAPPPAPSLGPGSQQAAFGNPPALLQPPEVPVPHSTQFAANHQEFLPHPQAPQPIVPGLSVVAGASASAAAVASAVAAPAPPQSTTEPLPAMVQTLPLGANSVLTNNPTITITPTPNTAILQSSLVMGEQNLQWILNGATSSPQNQEQIQQASKVEKVFFTTAVPVASSPGSSVQQIGLSVPVIIIKQEEACQCQCACRDSAKERASSRRKGCSSPPPPEPSPQAPDGPSLQLPAQTFSSAPVPGSSSSTLPSSCEQSRQAETPSDPQTETLSAMDVSEFLSLQSLDTPSNLIPIEALLQGEEEMGLTSSFSK

SEQ ID NO: 871957 - protein, 753 aa, Homo sapiens; identical to SEQ ID NO: 871956

SEQ ID NO: 871958 - protein, 88 aa, Homo sapiens
ALTRYQMLFRHMFYCKHVERQLCSVWISNKTAKQHSLHSAQWFAGAFTLRQRMLNFVQNIQYYMMFEVMEPTWHILEKNLKSVSFSST

SEQ ID NO: 871959 - protein, 124 aa, Homo sapiens
SVSRRARAPGRLGPESGTESAFRRAAMNLRERRWEAQGCPAQLDAHRESRGRPSGERGLSVSTRCLFVFFTLRFVPSPHFLSVSTILLGDVANREPLRLSFGKPCGNALAPVVLRVLPCVTSGL

SEQ ID NO: 871960 - protein, 185 aa, Homo sapiens
MPRLFLFHLLEFCLLLNQFSRAVAAKWKDDVIKLCGRELVRAQIAICGMSTWSKRSLSQEDAPQTPRPVAEIVPSFINKDTETIIIMLEFIANLPPELKAALSERQPSLPELQQYVPALKDSNLSFEEFKKLIRNRQSEAADSNPSELKYLGLDTHSQKKRRPYVALFEKCCLIGCTKRSLAKYC

SEQ ID NO: 871961 - protein, 117 aa, Homo sapiens
MPRLFLFHLLEFCLLLNQFSRAVAAKWKDDVIKLCGRELVRAQIAICGMSTWSKRSLSQEDAPQTPRPVAGDFIQTVSLGISPDGGKALRTGSCFTREFLGALSKLCHPSSTKIQKP

SEQ ID NO: 871962 - protein, 185 aa, Homo sapiens; identical to SEQ ID NO: 871960

SEQ ID NO: 871963 - protein, 142 aa, Homo sapiens [sequence omitted]

SEQ ID NO: 871964 - protein, 72 aa, Homo sapiens
GTPAFPRKRSDFHNHRAQAHRPQLLSPPTRSDPLTAKCLTTAQKLYSDNEAAWLKLLHGEVQDPQQGLRGCL

SEQ ID NO: 871965 - protein, 101 aa, Homo sapiens
FWEFLLNIKKLPPGSTGGSGSSLVIAVSKAWALANRKKQAEKTYQAGLLVRDLADIQPAVWWPIRYIRHALNPSFGSGQVTGHTGFRPPGLRELGVAIRPV

SEQ ID NO: 871966 - protein, 107 aa, Homo sapiens
QVVHFTLLSRQLQFEATSMTVIPLFHLAYILIILFAVTSCYCCCKFWIKSIICEPQEQGGLAHPTLKKMRVFRVVSMSSSILTLLHSEPSWPPRSPLLNPSAALIIS

SEQ ID NO: 871967 - protein, 162 aa, Homo sapiens
MTTPNKGNKALKVKREPGENGTSLTDEELVTMSVRELNQHLRGLSKEEIVQLKQRRRTLKNRGYAASCRVKRVTQKEELEKQKAELQQEVEKLASENASMKLELDALRSKYEALQTFARTVARSPVAPARGPLAAGLGPLVPGKVAATSVITIVKSKTDARS

SEQ ID NO: 871968 - protein, 162 aa, Homo sapiens; identical to SEQ ID NO: 871967

SEQ ID NO: 871969 - protein, 327 aa, Homo sapiens
CACALSGRACNPRVRAHDRQTRAVSGTRCGAPGPEPGLFSTQVFRAPRSAMSSGIHVALVTGGNKGIGLAIVRDLCRLFSGDVVLTARDVTRGQAAVQQLQAEGLSPRFHQLDIDDLQSIRALRDFLRKEYGGLDVLVNNAGIAFKVADPTPFHIQAEVTMKTNFFGTRDVCTELLPLIKPQGRVVNVSSIMSVRALKSCSPELQQKFRSETITEEELVGLMNKFVEDTKKGVHQKEGWPSSAYGVTKIGVTVLSRIHARKLSEQRKGDKILLNACCPGWVRTDMAGPKATKSPEEGAETPVYLALLPPDAEGPHGQFVSEKRVEQW

SEQ ID NO: 871970 - protein, 327 aa, Homo sapiens; identical to SEQ ID NO: 871969

SEQ ID NO: 871971 - protein, 170 aa, Homo sapiens
CACALSGRACNPRVRAHDRQTRAVSGTRCGAPGPEPGLFSTQVFRAPRSAMSSGIHVALVTGGNKGIGLAIVRDLCRLFSGDVVLTARDVTRGQAAVQQLQAEGLSPRFHQLDIDDLQSIRALRDFLRKEYGGLDVLVNNAGIAFKGMGRGRGLPEEEPMHWGSWRLRGP

SEQ ID NO: 871972 - protein, 327 aa, Homo sapiens; identical to SEQ ID NO: 871969

SEQ ID NO: 871973 - protein, 439 aa, Homo sapiens
  misc_feature (360)..(360): Xaa can be any naturally occurring amino acid
CACALSGRACNPRVRAHDRQTRAVSGTRCGAPGPEPGLFSTQVFRAPRSAMSSGIHVALVTGGNKGIGLAIVRDLCRLFSGDVVLTARDVTRGQAAVQQLQAEGLSPRFHQLDIDDLQSIRALRDFLRKEYGGLDVLVNNAGIAFKVADPTPFHIQAEVTMKTNFFGTRDVCTELLPLIKPQGRVVNVSSIMSVRALKSCSPELQQKFRSETITEEELVGLMNKFVEDTKKGVHQKEGWPSSAYGVTKIGVTVLSRIHARKLSEQRKGDKILLNACCPGWVRTDMAGPKATKSPEEGAETPVYLALLPPDAEGPHGQLGVQENEEVETRWVEAGGSNKVPIPIGAPNFVVNTCVPLEVVXPPKGGAIFYPKMVPFKFIFPKKRQAYSSHIYTKKNTYVCGGRSMWGPLREKKVFSDETHIAVCGGRQGGPPQVCGTWGH

SEQ ID NO: 871974 - protein, 313 aa, Homo sapiens
CACALSGRACNPRVRAHDRQTRAVSGTRCGAPGPEPGLFSTQVFRAPRSAMSSGIHVALVTGGNKGIGLAIVRDLCRLFSGDVVLTARDGLSPRFHQLDIDDLQSIRALRDFLRKEYGGLDVLVNNAGIAFKVADPTPFHIQAEVTMKTNFFGTRDVCTELLPLIKPQGRVVNVSSIMSVRALKSCSPELQQKFRSETITEEELVGLMNKFVEDTKKGVHQKEGWPSSAYGVTKIGVTVLSRIHARKLSEQRKGDKILLNACCPGWVRTDMAGPKATKSPEEGAETPVYLALLPPDAEGPHGQFVSEKRVEQW

SEQ ID NO: 871975 - protein, 418 aa, Homo sapiens
CACALSGRACNPRVRAHDRQTRAVSGTRCGAPGPEPGLFSTQVFRAPRSAMSSGIHVALVTGGNKGIGLAIVRDLCRLFSGDVVLTARDVTRGQAAVQQLQAEGLSPRFHQLDIDDLQSIRALRDFLRKEYGGLDVLVNNAGIAFKVADPTPFHIQAEVTMKTNFFGTRDVCTELLPLIKPQVVLLLRLWFTRTSKGSSSKSHLTLLSQNSKAGMNFFMQLPPHFLCVFLLELITSNCLSYENFLLQNPCKFGIHLSTGLLHTFLHNALWCILGRVVNVSSIMSVRALKSCSPELQQKFRSETITEEELVGLMNKFVEDTKKGVHQKEGWPSSAYGVTKIGVTVLSRIHARKLSEQRKGDKILLNACCPGWVRTDMAGPKATKSPEEGAETPVYLALLPPDAEGPHGQFVSEKRVEQW

SEQ ID NO: 871976 - protein, 329 aa, Homo sapiens
CACALSGRACNPRVRAHDRQTRAVSGTRCGAPGPEPGLFSTQVFRAPRSAMSSGIHVALVTGGNKGIGLAIVRDLCRLFSGDVVLTARDVTRGQAAVQQLQAEGLSPRFHQLDIDDLQSIRALRDFLRKEYGGLDVLVNNAGIAFKVADPTPFHIQAEVTMKTNFFGTRDVCTELLPLIKPQGRVVNVSSIMSVRALKSCSPELQQKFRSETITEEELVGLMNKFVEDTKKGVHQKEGWPSSAYGVTKIGVTVLSRIHARKLSEQRKGDKILLNACCPGWVRTDMAGPKANAKVDPFLALPLWSRTVSHSPGGAPRALSGPGLFKDLVA

SEQ ID NO: 871977 - protein, 327 aa, Homo sapiens; identical to SEQ ID NO: 871969

SEQ ID NO: 871978 - protein, 244 aa, Homo sapiens
FPCPVVLLSCATSKALVHQDLKGQLFQISPDSTQPKFEGRNELLHATTTTLSMRIPLRTHTSNCLSYENFLLQNPCKFGIHLSTGLLHTFLHNALWCILGRVVNVSSIMSVRALKSCSPELQQKFRSETITEEELVGLMNKFVEDTKKGVHQKEGWPSSAYGVTKIGVTVLSRIHARKLSEQRKGDKILLNACCPGWVRTDMAGPKATKSPEEGAETPVYLALLPPDAEGPHGQFVSEKRVEQW

SEQ ID NO: 871979 - protein, 220 aa, Homo sapiens
MERYAAALEEVADGARQQERHYQLLSALQSLVKELPSSFQQRLSYTTLSDLALALLDGTVFEIVQGLLEIQHLTEKSLYNQRLRLQNEHRVLRQALRQKHQEAQQACRPHNLPVVQAAQQRELEAVEHRIREEQRAMDQKIILELDRKVADQQSTLEKAGVAGFYVTTNPQELMLQMNLLELIRKLQQRGCRAGNAALGLGGPWQSPAAQCDQKGSPVPP

SEQ ID NO: 871980 - protein, 220 aa, Homo sapiens; identical to SEQ ID NO: 871979

SEQ ID NO: 871981 - protein, 220 aa, Homo sapiens; identical to SEQ ID NO: 871979

SEQ ID NO: 871982 - protein, 211 aa, Homo sapiens
DPRTQAHFQERHYQLLSALQSLVKELPSSFQQRLSYTTLSDLALALLDGTVFEIVQGLLEIQHLTEKSLYNQRLRLQNEHRVLRQALRQKHQEAQQACRPHNLPVVQAAQQRELEAVEHRIREEQRAMDQKIILELDRKVADQQSTLEKAGVAGFYVTTNPQELMLQMNLLELIRKLQQRGCRAGNAALGLGGPWQSPAAQCDQKGSPVPP

SEQ ID NO: 871983 - protein, 220 aa, Homo sapiens; identical to SEQ ID NO: 871979

SEQ ID NO: 871984 - protein, 129 aa, Homo sapiens
DNRKKGRDAPRSGCREAGGARRRRRRLAGVRAMERYAAALEEVADGARQQERHYQLLSALQSLVKELPSSFQQRLSYTTLSDLALALLDGTVFEIVQGLLEIQHLTEKSLYNQRLRLQNEHRGRGTPDP

SEQ ID NO: 871985 - protein, 109 aa, Homo sapiens
PGYLQGSLRGPGVPWGLATREELQHQGSSQEQSVGFHLFFWPGTPPSWGAVAIWHLLVTGASCGVLHVLFHGGLCPMIASSVHSLQTRQFAHICVCAQFSKDRGALLDG

SEQ ID NO: 871986 - protein, 221 aa, Homo sapiens
DPRVAHASDPRVADGARQQERHYQLLSALQSLVKELPSSFQQRLSYTTLSDLALALLDGTVFEIVQGLLEIQHLTEKSLYNQRLRLQNEHRVLRQALRQKHQEAQQACRPHNLPVVQAAQQRELEAVEHRIREEQRAMDQKIILELDRKVADQQSTLEKAGVAGFYVTTNPQELMLQMNLLELIRKLQQRGCRAGNAALGLGGPWQSPAAQCDQKGSPVPP

SEQ ID NO: 871987 - protein, 2155 aa, Homo sapiens
MNYSSFLRIWVSFIFALVQHQAQPRELMYPFWQNDTKTPKVDDGSSSEIKLAIPVFFFGVPYRTVYVNNNGVVSFNVLVSQFTPESFPLTDGRAFVAPFWADVHNGIRGEIYYRETMEPAILKRATKDIRKYFKDMATFSATWVFIVTWEEVTFYGGSSTTPVNTFQAVLVSDGSYTFTLFNYYEINWTTGTASGGDPLTGLGGVMAQAGFNGGNLTNFFSLPGSRTPEIVNIQETTNVNVPGRWAFKVDGKEIDPANGCTSRGQFLRRGEVFWDDLNCTVKCRCLDFNNEIYCQEASCSPYEVCEPKGKFFYCSAVETSTCVVFGEPHYHTFDGFLFHFQGSCAYLLARQCLQTSSLPFFSVEAKNEHRGGSAVSWVKELSVEVNGYKILIPKGSYGRVKVNDLVTSLPVTLDLGTVKIYQSGISTAVETDFGLLVTFDGQHYASISVPGSYINSTCGLCGNYNKNPLDDFLRPDGRPAMSVLDLGESWRVYHADWKCDSGCVDNCTQCDAATEALYFGSDYCGFLNKTDGPLWECGTVVDPTAFVHSCVYDLCSVRDNGTLLCQAIQAYALVCQALGIPIGDWRTQTGCVSTVQCPSFSHYSVCTSSCPDTCSDLTASRNCATPCTEGCECNQGFVLSTSQCVPLHKCGCDFDGHYYTMGEFFWATANCTVQCLCEEGGDVYCFNKTCGSGEVCAVEDGYQGCFPKRETVCLLSQNQVLHTFDGASYAFPSEFSYTLLKTCPERPEYLEIDINKKKPDAGPAWLRGLRILVADQEVKIGGIGASEVKLNGQEVELPFFHPSGKLEIYRNKNSTTVESKGVVTVQYSDIGLLYIRLSTTYFNCTGGLCGFYNANASDEFCLPNGKCTDNLAVFLESWTTFEEICNGECGDLLKACNNDSELLKFYRSRSRCGIINDPSNSSFLECHGVVNVTAYYRTCLFRLCQSGGNESELCDSVARYASACKNADVEVGPWRTYDFCPLECPENSHFEECITCTETCETLTLGPICVDSCSEGCQCDEGYALLGSQCVTRSECGCNFEGHQLATNETFWVDLDCQIFCYCSGTDNRVHCETIPCKDDEYCMEEGGLYYCQARTDASCIVSGYGHYLTFDGFPFDFQTSCPLILCTTGSRPSSDSFPKFVVTAKNEDRDPSLALWVKQVDVTVFGYSIVIHRAYKHTVLVNSERLYLPLKLGQGKINIFSFGFHVVVETDFGLKVVYDWKTFLSITVPRSMQNSTYGLCGRYNGNPDDDLEMPMGLLASSVNEFGQSWVKRDTFCQVGCGDRCPSCAKVEGFSKVQQLCSLIPNQNAAFSKCHSKVNPTFFYKNCLFDSCIDGGAVQTACSWLQNYASTCQTQGITVTGWRNYTSCTVTCPPNSHYESCVSVCQPRCAAIRLKSDCSHYCVEGCHCDAGYVLNGKSCILPHSCGCYSDGKYYEPKQLFWNSDCTRRCRCFRRNVIQCDPRQCKSDEECALRNGVRGCFSTKTSYCLAAGGGVFRTFDGAFLRFPANCAFVLSTICQKLPDISFQLIINFDKWSAPNLTIISPVYFYINEEQILINDRNTVKVNGTQVNVPFITGLATKIYSSEGFLVIDTSPDIQIYYNGFNVIKISISERLQNKVCGLCGNFNGDLTDDYVTLRGKPVVSSVVLAQSWKTNGMQKRPLAPSCNELQFSQYAAMCDNVHIQKMQGDGYCLKLTDMKGFFQPCYGLLDPLPFYESCYLDGCYSHKKFQLCGSLAAYGEACRSFGILSTEWIEKENCSGVVEDPCVGADCPNRTCELGNGRELCGCIEPPPYGNNSHDIIDAEVTCKAAQMEVSISKCKLFQLGFEREGVRINDRQCTGIEGEDFISFQINNTKGNCGNIVQSNGTHIMYKNTLWIESANNTGNIITRDRTINVEFSCAYELDIKISLDSVVKPMLSVINLTVPTQEGSFITKMALYKNASYKHPYRQGEVVLTTRDVLYVGVFVVGADATHLILTLNKCYATPTRDSNDKLRYFIIEGGCQNLKDNTIGIEENAVSLTCRFHVTVFKFIGDYDEVHLHCAVSLCDSEKYSCKITCPHNSRIATDYTKEPKEQIISVGPIRRKRLDWCEDNGGCEQICTSRVDGPLCSCVTGTLQEDGKSCRASNSSMELQVWTLLLIMIQISLWHFVYKSGTTS

SEQ ID NO: 871988 - protein, 110 aa, Homo sapiens
SCSKTDSTDLPFVITVPTDSHDIIDAEVTCKAAQMEVSISKCKLFQLGFEREGVRINDRQCTGIEGEDFISFQINNTKGNCGNIVQVRKAAGKSTWQRQRQLRVFAHLLS

SEQ ID NO: 871989 - protein, 238 aa, Homo sapiens
QVLGVKASTFLLGGHSVTHNRGSLETMSIKEKWIKEVNSERLYLPLKLGQGKINIFSFGFHVVVETDFGLKVVYDWKTFLSITVPRSMQNSTYGLCGRYNGNPDDDLEMPMGLLASSVNEFGQSWVKRDTFCQVGCGDRCPSCAKVEGFSKVQQLCSLIPNQNAAFSKCHSKVNPTFFYKNCLFDSCIDGGAVQTACSWLQNYASTCQTQGITVTGWRNYTSCSESFSLSLLVASPLS

SEQ ID NO: 871990 - protein, 1001 aa, Homo sapiens
MSGPGNKRAAGDGGSGPPEKKLSREEKTTTTLIEPIRLGGISSTEEMDLKVLQFKNKKLAERLEQRQACEDELRERIEKLEKRQATDDATLLIVNRYWAQLDETVEALLRCHESQGELSSAPEAPGTQEGPTCDGTPLPEPGTSELRDPLLMQLRPPLSEPALAFVVALGASSSEEVELELQGRMEFSKAAVSRVVEASDRLQRRVEELCQRVYSRGDSEPLSEAAQAHTRELGRENRRLQDLATQLQEKHHRISLEYSELQDKVTSAETKVLEMETTVEDLQWDIEKLRKREQKLNKHLAEALEQLNSGYYVSGSSSGFQGGQITLSMQKFEMLNAELEENQELANSRMAELEKLQAELQGAVRTNERLKVALRSLPEEVVRETGEYRMLQAQFSLLYNESLQVKTQLDEARGLLLATKNSHLRHIEHMESDELGLQKKLRTEVIQLEDTLAQVRKEYEMLRIEFEQNLAANEQAGPINREMRHLISSLQNHNHQLKGDAQRYKRKLREVQAEIGKLRAQASGSAHSTPNLGHPEDSGVSAPAPGKEEGGPGPVSTPDNRKEMAPVPGTTTTTTSVKKEELVPSEEDFQGITPGAQGPSSRGREPEARPKRELREREGPSLGPPPVASALSRADREKAKVEETKRKESELLKGLRAELKKAQESQKEMKLLLDMYKSAPKEQRDKVQLMAAERKAKAEVDELRSRIRELEERDRRESKKIADEDALRRIRQAEEQIEHLQRKLGATKQEEEALLSEMDVTGQAFEDMQEQNGRLLQQLREKDDANFKLMSERIKANQIHKLLREEKDELGEQVLGLKSQVDAQLLTVQKLEEKERALQGSLGGVEKELTLRSQALELNKRKAVEAAQLAEDLKVQLEHVQTRLREIQPCLAESRAAREKESFNLKRAQEDISRLRRKLEKQRKVEVYADADEILQEEIKEYKARLTCPCCNTRKKDAVLTKCFHVFCFECVRGRYEARQRKCPKCNAAFGAHDFHRIYIS

SEQ ID NO: 871991 - protein, 1001 aa, Homo sapiens; identical to SEQ ID NO: 871990

SEQ ID NO: 871992 - protein, 321 aa, Homo sapiens
SRPAEADPCSCLRSGCGPGRLSFTHHPPNLGRASVLWSSLDTLVWLLCQGLKEVPSWQMGASLASFGKLKVAAVTFLILQLGATKQEEEALLSEMDVTGQAFEDMQEQNGRLLQQLREKDDANFKLMSERIKANQIHKLLREEKDELGEQVLGLKSQVDAQLLTVQKLEEKERALQGSLGGVEKELTLRSQALELNKRKAVEAAQLAEDLKVQLEHVQTRLREIQPCLAESRAAREKESFNLKRAQEDISRLRRKLEKQRKVEVYADADEILQEEIKEYKLRLTALLYTAEGAALQCSRFCSRGGADRPESARAGLGPSRY

SEQ ID NO: 871993 - protein, 168 aa, Homo sapiens
MSGPGNKRAAGDGGSGPPEKKLSREEKTTTTLIEPIRLGGISSTEEMDLKVLQFKNKKLAERLEQRQACEDELRERIEKLEKRQATDDATLLIVNRYWAQLDETVEALLRCHESQGELSSAPEAPGTQEGPTCDGTPLPEPGTSELRDPIADCRIADTTLPVKPGPLG

SEQ ID NO: 871994 - protein, 1001 aa, Homo sapiens; identical to SEQ ID NO: 871990

SEQ ID NO: 871995 - protein, 1036 aa, Homo sapiens
GLWRRGGRDPAGDGSTASSRLTPLRGPCIAPAAAAMSGPGNKRAAGDGGSGPPEKKLSREEKTTTTLIEPIRLGGISSTEEMDLKVLQFKNKKLAERLEQRQACEDELRERIEKLEKRQATDDATLLIVNRYWAQLDETVEALLRCHESQGELSSAPEAPGTQEGPTCDGTPLPEPGTSELRDPLLMQLRPPLSEPALAFVVALGASSSEEVELELQGRMEFSKAAVSRVVEASDRLQRRVEELCQRVYSRGDSEPLSEAAQAHTRELGRENRRLQDLATQLQEKHHRISLEYSELQDKVTSAETKVLEMETTVEDLQWDIEKLRKREQKLNKHLAEALEQLNSGYYVSGSSSGFQGGQITLSMQKFEMLNAELEENQELANSRMAELEKLQAELQGAVRTNERLKVALRSLPEEVVRETGEYRMLQAQFSLLYNESLQVKTQLDEARGLLLATKNSHLRHIEHMESDELGLQKKLRTEVIQLEDTLAQVRKEYEMLRIEFEQNLAANEQAGPINREMRHLISSLQNHNHQLKGDAQRYKRKLREVQAEIGKLRAQASGSAHSTPNLGHPEDSGVSAPAPGKEEGGPGPVSTPDNRKEMAPVPGTTTTTTSVKKEELVPSEEDFQGITPGAQGPSSRGREPEARPKRELREREGPSLGPPPVASALSRADREKAKVEETKRKESELLKGLRAELKKAQESQKEMKLLLDMYKSAPKEQRDKVQLMAAERKAKAEVDELRSRIRELEERDRRESKKIADEDALRRIRQAEEQIEHLQRKLGATKQEEEALLSEMDVTGQAFEDMQEQNGRLLQQLREKDDANFKLMSERIKANQIHKLLREEKDELGEQVLGLKSQVDAQLLTVQKLEEKERALQGSLGGVEKELTLRSQALELNKRKAVEAAQLAEDLKVQLEHVQTRLREIQPCLAESRAAREKESFNLKRAQEDISRLRRKLEKQRKVEVYADADEILQEEIKEYKARLTCPCCNTRKKDAVLTKCFHVFCFECVRGRYEARQRKCPKCNAAFGAHDFHRIYIS

SEQ ID NO: 871996 - protein, 645 aa, Homo sapiens
ALNPVADPIWASLPQVALRSLPEEVVRETGEYRMLQAQFSLLYNESLQVKTQLDEARGLLLATKNSHLRHIEHMESDELGLQKKLRTEVIQLEDTLAQVRKEYEMLRIEFEQNLAANEQAGPINREMRHLISSLQNHNHQLKGDAQRYKRKLREVQAEIGKLRAQASGSAHSTPNLGHPEDSGVSAPAPGKEEGGPGPVSTPDNRKEMAPVPGTTTTTTSVKKEELVPSEEDFQGITPGAQGPSSRGREPEARPKRELREREGPSLGPPPVASALSRADREKAKVEETKRKESELLKGLRAELKKAQESQKEMKLLLDMYKSAPKEQRDKVQLMAAERKAKAEVDELRSRIRELEERDRRESKKIADEDALRRIRQAEEQIEHLQRKLGATKQEEEALLSEMDVTGQAFEDMQEQNGRLLQQLREKDDANFKLMSERIKANQIHKLLREEKDELGEQVLGLKSQVDAQLLTVQKLEEKERALQGSLGGVEKELTLRSQALELNKRKAVEAAQLAEDLKVQLEHVQTRLREIQPCLAESRAAREKESFNLKRAQEDISRLRRKLEKQRKVEVYADADEILQEEIKEYKARLTCPCCNTRKKDAVLTKCFHVFCFECVRGRYEARQRKCPKCNAAFGAHDFHRIYIS

SEQ ID NO: 871997 - protein, 1008 aa, Homo sapiens
MSGPGNKRAAGDGGSGPPEKKLSREEKTTTTLIEPIRLGGISSTEEMDLKVLQFKNKKLAERLEQRQACEDELRERIEKLEKRQATDDATLLIVNRYWAQLDETVEALLRCHESQGELSSAPEAPGTQEGPTCDGTPLPEPGTSELRDPLLMQLRPPLSEPALAFVVALGASSSEEVELELQGRMEFSKAAVSRVVEASDRLQRRVEELCQRVYSRGDSEPLSEAAQAHTRELGRENRRLQDLATQLQEKHHRISLEYSELQDKVTSAETKVLEMETTVEDLQWDIEKLRKREQKLNKHLAEALEQLNSGYYVSGSSSGFQGGQITLSMQKFEMLNAELEENQELANSRMAELEKLQAELQGAVRTNERLKVALRSLPEEVVRETGEYRMLQAQFSLLYNESLQVKTQLDEARGLLLATKNSHLRHIEHMESDELGLQKKLRTEVIQLEDTLAQVRKEYEMLRIEFEQNLAANEQAGPINREMRHLISSLQNHNHQLKGDAQRYKRKLREVQAEIGKLRAQASGSAHSTPNLGHPEDSGVSAPAPGKEEGGPGPVSTPDNRKEMAPVPGTTTTTTSVKKEELVPSEEDFQGITPGAQGPSSRGREPEARPKRELREREGPSLGPPPVASALSRADREKAKVEETKRKESELLKGLRAELKKAQESQKEMKLLLDMYKSAPKEQRDKVQLMAAERKAKAEVDELRSRIRELEERDRRESKKIADEDALRRIRQAEEQIEHLQRKLGATKQEEEALLSEMDVTGQAFEDMQEQNGRLLQQLREKDDANFKLMSERIKANQIHKLLREEKDELGEQVLGLKSQVDAQLLTVQKLEEKERALQGSLGGVEKELTLRSQALELNKRKAVEAAQLAEDLKVQLEHVQTRLREIQPCLAESRAAREKESFNLKRAQPGLLLPQEDISRLRRKLEKQRKVEVYADADEILQEEIKEYKARLTCPCCNTRKKDAVLTKCFHVFCFECVRGRYEARQRKCPKCNAAFGAHDFHRIYIS

SEQ ID NO: 871998 - protein, 373 aa, Homo sapiens
LKDLLMLSREGRVEETKRKESELLKGLRAELKKAQESQKEMKLLLDMYKSAPKEQRDKVQLMAAERKAKAEVDELRSRIRELEERDRRESKKIADEDALRRIRQAEEQIEHLQRKLGATKQEEEALLSEMDVTGQAFEDMQEQNGRLLQQLREKDDANFKLMSERIKANQIHKLLREEKDELGEQVLGLKSQVDAQLLTVQKLEEKERALQGSLGGVEKELTLRSQALELNKRKAVEAAQLAEDLKVQLEHVQTRLREIQPCLAESRAAREKESFNLKRAQEDISRLRRKLEKQRKVEVYADADEILQEEIKEYKARLTCPCCNTRKKDAVLTKCFHVFCFECVRGRYEARQRKCPKCNAAFGAHDFHRIYIS

SEQ ID NO: 871999 - protein, 338 aa, Homo sapiens
SRPAEADPCSCLRSGCGPGRLSFTHHPPNLGRASVLWSSLDTLVWLLCQGLKEVPSWQMGASLASFGKLKVAAVTFLILQLGATKQEEEALLSEMDVTGQAFEDMQEQNGRLLQQLREKDDANFKLMSERIKANQIHKLLREEKDELGEQVLGLKSQVDAQLLTVQKLEEKERALQGSLGGVEKELTLRSQALELNKRKAVEAAQLAEDLKVQLEHVQTRLREIQPCLAESRAAREKESFNLKRAQEDISRLRRKLEKQRKVEVYADADEILQEEIKEYKARLTCPCCNTRKKDAVLTKCFHVFCFECVRGRYEARQRKCPKCNAAFGAHDFHRIYIS

SEQ ID NO: 872000 - protein, 117 aa, Homo sapiens
MQSLPSASTFSASSACGAAMRPARGSAPSATRPLVPTTSIVSTSAEPETQGTLEHHGPWGLCPHLLPTPGLVAPPSIPDPMGPAPAHLVGLGTLVHASGHGISQASFHLFLKVRAAA

SEQ ID NO: 872001 - protein, 866 aa, Homo sapiens
  misc_feature (864)..(864): Xaa can be any naturally occurring amino acid
MSGPGNKRAAGDGGSGPPEKKLSREEKTTTTLIEPIRLGGISSTEEMDLKVLQFKNKKLAERLEQRQACEDELRERIEKLEKRQATDDATLLIVNRYWAQLDETVEALLRCHESQGELSSAPEAPGTQEGPTCDGTPLPEPGTSELRDPLLMQLRPPLSEPALAFVVALGASSSEEVELELQGRMEFSKAAVSRVVEASDRLQRRVEELCQRVYSRGDSEPLSEAAQAHTRELGRENRRLQDLATQLQEKHHRISLEYSELQDKVTSAETKVLEMETTVEDLQWDIEKLRKREQKLNKHLAEALEQLNSGYYVSGSSSGFQGGQITLSMQKFEMLNAELEENQELANSRMAELEKLQAELQGAVRTNERLKVALRSLPEEVVRETGEYRMLQAQFSLLYNESLQVKTQLDEARGLLLATKNSHLRHIEHMESDELGLQKKLRTEVIQLEDTLAQVRKEYEMLRIEFEQNLAANEQAGPINREMRHLISSLQNHNHQLKGDAQRYKRKLREVQAEIGKLRAQASGSAHSTPNLGHPEDSGVSAPAPGKEEGGPGPVSTPDNRKEMAPVPGTTTTTTSVKKEELVPSEEDFQGITPGAQGPSSRGREPEARPKRELREREGPSLGPPPVASALSRADREKAKVEETKRKESELLKGLRAELKKAQESQKEMKLLLDMYKSAPKEQRDKVQLMAAERKAKAEVDELRSRIRELEERDRRESKKIADEDALRRIRQAEEQIEHLQRKLGATKQEEEALLSEMDVTGQAFEDMQEQNGRLLQQLREKDDANFKLMSERIKANQIHKLLREEKDELGEQVLGLKSQVDAQLLTVQKLEEKERALQGSLGGVEKELTLLEMLTGSSRVDRXTQ

SEQ ID NO: 872002 - protein, 901 aa, Homo sapiens
MSGPGNKRAAGDGGSGPPEKKLSREEKTTTTLIEPIRLGGISSTEEMDLKVLQFKNKKLAERLEQRQACEDELRERIEKLEKRQATDDATLLIVNRYWAQLDETVEALLRCHESQGELSSAPEAPGTQEGPTCDGTPLPEPGTSELRDPLLMQLRPPLSEPALAFVVALGASSSEEVELELQGRMEFSKAAVSRVVEASDRLQRRVEELCQRVYSRGDSEPLSEAAQAHTRELGRENRRLQDLATQLQEKHHRISLEYSELQDKVTSAETKVLEMETTVEDLQWDIEKLRKREQKLNKHLAEALEQLNSGYYVSGSSSGFQGGQITLSMQKSDELGLQKKLRTEVIQLEDTLAQVRKEYEMLRIEFEQNLAANEQAGPINREMRHLISSLQNHNHQLKGDAQRYKRKLREVQAEIGKLRAQASGSAHSTPNLGHPEDSGVSAPAPGKEEGGPGPVSTPDNRKEMAPVPGTTTTTTSVKKEELVPSEEDFQGITPGAQGPSSRGREPEARPKRELREREGPSLGPPPVASALSRADREKAKVEETKRKESELLKGLRAELKKAQESQKEMKLLLDMYKSAPKEQRDKVQLMAAERKAKAEVDELRSRIRELEERDRRESKKIADEDALRRIRQAEEQIEHLQRKLGATKQEEEALLSEMDVTGQAFEDMQEQNGRLLQQLREKDDANFKLMSERIKANQIHKLLREEKDELGEQVLGLKSQVDAQLLTVQKLEEKERALQGSLGGVEKELTLRSQALELNKRKAVEAAQLAEDLKVQLEHVQTRLREIQPCLAESRAAREKESFNLKRAQEDISRLRRKLEKQRKVEVYADADEILQEEIKEYKARLTCPCCNTRKKDAVLTKCFHVFCFECVRGRYEARQRKCPKCNAAFGAHDFHRIYIS

SEQ ID NO: 872003 - protein, 1026 aa, Homo sapiens
MSGPGNKRAAGDGGSGPPEKKLSREEKTTTTLIEPIRLGGISSTEEMDLKVLQFKNKKLAERLEQRQACEDELRERIEKLEKRQATDDATLLIVNRYWAQLDETVEALLRCHESQGELSSAPEAPGTQEGPTCDGTPLPEPGTSELRDPLLMQLRPPLSEPALAFVVALGASSSEEVELELQGRMEFSKAAVSRVVEASDRLQRRVEELCQRVYSRGDSEPLSEAAQAHTRELGRENRRLQDLATQLQEKHHRISLEYSELQDKVTSAETKVLEMETTVEDLQWDIEKLRKREQKLNKHLAEALEQLNSGYYVSGSSSGFQGGQITLSMQKFEMLNAELEENQELANSRMAELEKLQAELQGAVRTNERLKVALRSLPEEVVRETGEYRMLQAQFSLLYNESLQVKTQLDEARGLLLATKNSHLRHIEHMESDELGLQKKLRTEVIQLEDTLAQVRKEYEMLRIEFEQNLAANEQAGPINREMRHLISSLQNHNHQLKGDAQRYKRKLREVQAEIGKLRAQASGSAHSTPNLGHPEDSGVSAPAPGKEEGGPGPVSTPDNRKEMAPVPGTTTTTTSVKKEELVPSEEDFQGITPGAQGPSSRGREPEARPKRELREREGPSLGPPPVASALSRADREKAKVEETKRKESELLKGLRAELKKAQESQKEMKLLLDMYKSAPKEQRDKVQLMAAERKAKAEVDELRSRIRELEERDRRESKKIADEDALRRIRQAEEQIEHLQRKLGATKQEEEALLSEMDVTGQAFEDMQEQNGRLLQQLREKDDANFKLMSERIKANQIHKLLREEKDELGEQVLGLKSQVWPPPACRLELERWGSCPESSSGPEVDAQLLTVQKLEEKERALQGSLGGVEKELTLRSQALELNKRKAVEAAQLAEDLKVQLEHVQTRLREIQPCLAESRAAREKESFNLKRAQEDISRLRRKLEKQRKVEVYADADEILQEEIKEYKARLTCPCCNTRKKDAVLTKCFHVFCFECVRGRYEARQRKCPKCNAAFGAHDFHRIYIS

SEQ ID NO: 872004 - protein, 1052 aa, Homo sapiens
RKKKTRKKIRSERRSVIIQARGLSLLSGDGSTASSRLTPLRGPCIAPAAAAMSGPGNKRAAGDGGSGPPEKKLSREEKTTTTLIEPIRLGGISSTEEMDLKVLQFKNKKLAERLEQRQACEDELRERIEKLEKRQATDDATLLIVNRYWAQLDETVEALLRCHESQGELSSAPEAPGTQEGPTCDGTPLPEPGTSELRDPLLMQLRPPLSEPALAFVVALGASSSEEVELELQGRMEFSKAAVSRVVEASDRLQRRVEELCQRVYSRGDSEPLSEAAQAHTRELGRENRRLQDLATQLQEKHHRISLEYSELQDKVTSAETKVLEMETTVEDLQWDIEKLRKREQKLNKHLAEALEQLNSGYYVSGSSSGFQGGQITLSMQKFEMLNAELEENQELANSRMAELEKLQAELQGAVRTNERLKVALRSLPEEVVRETGEYRMLQAQFSLLYNESLQVKTQLDEARGLLLATKNSHLRHIEHMESDELGLQKKLRTEVIQLEDTLAQVRKEYEMLRIEFEQNLAANEQAGPINREMRHLISSLQNHNHQLKGDAQRYKRKLREVQAEIGKLRAQASGSAHSTPNLGHPEDSGVSAPAPGKEEGGPGPVSTPDNRKEMAPVPGTTTTTTSVKKEELVPSEEDFQGITPGAQGPSSRGREPEARPKRELREREGPSLGPPPVASALSRADREKAKVEETKRKESELLKGLRAELKKAQESQKEMKLLLDMYKSAPKEQRDKVQLMAAERKAKAEVDELRSRIRELEERDRRESKKIADEDALRRIRQAEEQIEHLQRKLGATKQEEEALLSEMDVTGQAFEDMQEQNGRLLQQLREKDDANFKLMSERIKANQIHKLLREEKDELGEQVLGLKSQVDAQLLTVQKLEEKERALQGSLGGVEKELTLRSQALELNKRKAVEAAQLAEDLKVQLEHVQTRLREIQPCLAESRAAREKESFNLKRAQEDISRLRRKLEKQRKVEVYADADEILQEEIKEYKARLTCPCCNTRKKDAVLTKCFHVFCFECVRGRYEARQRKCPKCNAAFGAHDFHRIYIS

SEQ ID NO: 872005 - protein, 922 aa, Homo sapiens
GLGTRPGWSCTLLIVTRYWAQLDETVEALLRCHESQGELSSAPEAPGTQEGPTCDGTPLPEPGTSELRDPLLMQLRPPLSEPALAFVVALGASSSEEVELELQGRMEFSKAAVSRVVEASDRLQRRVEELCQRVYSRGDSEPLSEAAQAHTRELGRENRRLQDLATQLQEKHHRISLEYSELQDKVTSAETKVLEMETTVEDLQWDIEKLRKREQKLNKHLAEALEQLNSGYYVSGSSSGFQGGQITLSMQKFEMLNAELEENQELANSRMAELEKLQAELQGAVRTNERLKVALRSLPEEVVRETGEYRMLQAQFSLLYNESLQVKTQLDEARGLLLATKNSHLRHIEHMESDELGLQKKLRTEVIQLEDTLAQVRKEYEMLRIEFEQNLAANEQAGPINREMRHLISSLQNHNHQLKGDAQRYKRKLREVQAEIGKLRAQASGSAHSTPNLGHPEDSGVSAPAPGKEEGGPGPVSTPDNRKEMAPVPGTTTTTTSVKKEELVPSEEDFQGITPGAQGPSSRGREPEARPKRELREREGPSLGPPPVASALSRADREKAKVEETKRKESELLKGLRAELKKAQESQKEMKLLLDMYKSAPKEQRDKVQLMAAERKAKAEVDELRSRIRELEERDRRESKKIADEDALRRIRQAEEQIEHLQRKLGATKQEEEALLSEMDVTGQAFEDMQEQNGRLLQQLREKDDANFKLMSERIKANQIHKLLREEKDELGEQVLGLKSQVDAQLLTVQKLEEKERALQGSLGGVEKELTLRSQALELNKRKAVEAAQLAEDLKVQLEHVQTRLREIQPCLAESRAAREKESFNLKRAQEDISRLRRKLEKQRKVEVYADADEILQEEIKEYKARLTCPCCNTRKKDAVLTKCFHVFCFECVRGRYEARQRKCPKCNAAFGAHDFHRIYIS

SEQ ID NO: 872006 - protein, 920 aa, Homo sapiens
MAWCGARHTPHRGLATVAQLDETVEALLRCHESQGELSSAPEAPGTQEGPTCDGTPLPEPGTSELRDPLLMQLRPPLSEPALAFVVALGASSSEEVELELQGRMEFSKAAVSRVVEASDRLQRRVEELCQRVYSRGDSEPLSEAAQAHTRELGRENRRLQDLATQLQEKHHRISLEYSELQDKVTSAETKVLEMETTVEDLQWDIEKLRKREQKLNKHLAEALEQLNSGYYVSGSSSGFQGGQITLSMQKFEMLNAELEENQELANSRMAELEKLQAELQGAVRTNERLKVALRSLPEEVVRETGEYRMLQAQFSLLYNESLQVKTQLDEARGLLLATKNSHLRHIEHMESDELGLQKKLRTEVIQLEDTLAQVRKEYEMLRIEFEQNLAANEQAGPINREMRHLISSLQNHNHQLKGDAQRYKRKLREVQAEIGKLRAQASGSAHSTPNLGHPEDSGVSAPAPGKEEGGPGPVSTPDNRKEMAPVPGTTTTTTSVKKEELVPSEEDFQGITPGAQGPSSRGREPEARPKRELREREGPSLGPPPVASALSRADREKAKVEETKRKESELLKGLRAELKKAQESQKEMKLLLDMYKSAPKEQRDKVQLMAAERKAKAEVDELRSRIRELEERDRRESKKIADEDALRRIRQAEEQIEHLQRKLGATKQEEEALLSEMDVTGQAFEDMQEQNGRLLQQLREKDDANFKLMSERIKANQIHKLLREEKDELGEQVLGLKSQVDAQLLTVQKLEEKERALQGSLGGVEKELTLRSQALELNKRKAVEAAQLAEDLKVQLEHVQTRLREIQPCLAESRAAREKESFNLKRAQEDISRLRRKLEKQRKVEVYADADEILQEEIKEYKARLTCPCCNTRKKDAVLTKCFHVFCFECVRGRYEARQRKCPKCNAAFGAHDFHRIYIS

SEQ ID NO: 872007 - protein, 407 aa, Homo sapiens
CPLRDSGIPGPAFSGETEQPAELGREVQLDITVASALSRADREKAKVEETKRKESELLKGLRAELKKAQESQKEMKLLLDMYKSAPKEQRDKVQLMAAERKAKAEVDELRSRIRELEERDRRESKKIADEDALRRIRQAEEQIEHLQRKLGATKQEEEALLSEMDVTGQAFEDMQEQNGRLLQQLREKDDANFKLMSERIKANQIHKLLREEKDELGEQVLGLKSQVDAQLLTVQKLEEKERALQGSLGGVEKELTLRSQALELNKRKAVEAAQLAEDLKVQLEHVQTRLREIQPCLAESRAAREKESFNLKRAQEDISRLRRKLEKQRKVEVYADADEILQEEIKEYKARLTCPCCNTRKKDAVLTKCFHVFCFECVRGRYEARQRKCPKCNAAFGAHDFHRIYIS

SEQ ID NO: 872008 - protein, 334 aa, Homo sapiens
CSATLQDPLPVLPQEQRDKVQLMAAERKAKAEVDELRSRIRELEERDRRESKKIADEDALRRIRQAEEQIEHLQRKLGATKQEEEALLSEMDVTGQAFEDMQEQNGRLLQQLREKDDANFKLMSERIKANQIHKLLREEKDELGEQVLGLKSQVDAQLLTVQKLEEKERALQGSLGGVEKELTLRSQALELNKRKAVEAAQLAEDLKVQLEHVQTRLREIQPCLAESRAAREKESFNLKRAQEDISRLRRKLEKQRKVEVYADADEILQEEIKEYKARLTCPCCNTRKKDAVLTKCFHVFCFECVRGRYEARQRKCPKCNAAFGAHDFHRIYIS

SEQ ID NO: 872009 - protein, 799 aa, Homo sapiens
MSGPGNKRAAGDGGSGPPEKKLSREEKTTTTLIEPIRLGGISSTEEMDLKVLQFKNKKLAERLEQRQACEDELRERIEKLEKRQATDDATLLIVNRYWAQLDETVEALLRCHESQGELSSAPEAPGTQEGPTCDGTPLPEPGTSELRDPLLMQLRPPLSEPALAFVVALGASSSEEVELELQGRMEFSKAAVSRVVEASDRLQRRVEELCQRVYSRGDSEPLSEAAQAHTRELGRENRRLQDLATQLQEKHHRISLEYSELQDKVTSAETKVLEMETTVEDLQWDIEKLRKREQKLNKHLAEALEQLNSGYYVSGSSSGFQGGQITLSMQKFEMLNAELEENQELANSRMAELEKLQAELQGAVRTNERLKVALRSLPEEVVRETGEYRMLQAQFSLLYNESLQVKTQLDEARGLLLATKNSHLRHIEHMESDELGLQKKLRTEVIQLEDTLAQVRKEYEMLRIEFEQNLAANEQAGPINREMRHLISSLQNHNHQLKGDAQRYKRKLREVQAEIGKLRAQASGSAHSTPNLGHPEDSGVSAPAPGKEEGGPGPVSTPDNRKEMAPVPGTTTTTTSVKKEELVPSEEDFQGITPGAQGPSSRGREPEARPKRELREREGPSLGPPPVASALSRADREKAKVEETKRKESELLKGLRAELKKAQESQKEMKLLLDMYKSAPKEQRDKVQLMAAERKAKAEVDELRSRIRELEERDRRESKKIADEDALRRIRQAEEQIEHLQRKLGATKQEEEALLSEMDVTGQAFEDMQEQNGRLLQQLREKEVPSWQMGASLASFGKL

SEQ ID NO: 872010 - protein, 377 aa, Homo sapiens
MSGPGNKRAAGDGGSGPPEKKLSREEKTTTTLIEPIRLGGISSTEEMDLKVLQFKNKKLAERLEQRQACEDELRERIEKLEKRQATDDATLLIVNRYWAQLDETVEALLRCHESQGELSSAPEAPGTQEGPTCDGTPLPEPGTSELRDPLLMQLRPPLSEPALAFVVALGASSSEEVELELQGRMEFSKAAVSRVVEASDRLQRRVEELCQRVYSRGDSEPLSEAAQAHTRELGRENRRLQDLATQLQEKHHRISLEYSELQDKVTSAETKVLEMETTVEDLQWDIEKLRKREQKLNKHLAEALEQLNSGYYVSGSSSGFQGGQITLSMQKFEMLNAELEENQELANSRMAELEKLQAELQGAVRTNERLKVGCCRG

SEQ ID NO: 872011 - protein, 68 aa, Homo sapiens
ALPRGPPPWGPAPVGPGAPIQGKRKQMNAGHQVVRMLLSASGHLDPEWSGRQIGGGEGCQDVSKNEVF

SEQ ID NO: 872012 - protein, 457 aa, Homo sapiens
MGSWALLWPPLLFTGLLVRPPGTMAQAQYCSVNKDIFEVEENTNVTEPLVDIHVPEGQEVTLGALSTPFAFRIQGNQLFLNVTPDYEEKSLLEAQLLCQSGGTLVTQLRVFVSVLDVNDNAPEFPFKTKEIRVEEDTKVNSTVIPETQLQAEDRDKDDILFYTLQEMTAGASDYFSLVSVNRPALRLDRPLDFYERPNMTFWLLVRDTPGENVEPSHTATATLVLNVVPADLRPPWFLPCTFSDGYVCIQAQYHGAVPTGHILPSPLVLRPGPIYAEDGDRGINQPIIYSIFRGNVNGTFIIHPDSGNLTVARSVPSPMTFLLLVKGQQADLARYSVTQVTVEAVAAAGSPPRFPQSLYRGTVARGAGAGVVVKDAAAPSQPLRIQAQDPEFSDLNSAITYRITNHSHFRMEGEVVLTTTTLAQAGAFYAELHRRSQAPGSTQTSRSRPYTEIAWGG

SEQ ID NO: 872013 - protein, 121 aa, Homo sapiens
ETESHSVTQAGVQWSDLGSLQLPPPGSKRFSCLSLLSSWDYKAVRGRQPGRGLNETLLQDLNSAITYRITNHSHFRMEGEVVLTTTTLAQAGAFYAECGAGQAGISKGVGLKDVSRRDKPL

SEQ ID NO: 872014 - protein, 896 aa, Homo sapiens
MGSWALLWPPLLFTGLLVRPPGTMAQAQYCSVNKDIFEVEENTNVTEPLVDIHVPEGQEVTLGALSTPFAFRIQGNQLFLNVTPDYEKAGPFRDEAAWAHTLSTDQLMMGTLGQRLPTWPQSPHLWGRTVTADLSTPQEKSLLEAQLLCQSGGTLVTQLRVFVSVLDVNDNAPEFPFKTKEIRVEEDTKVNSTVIPETQLQAEDRDKDDILFYTLQEMTAGASDYFSLVSVNRPALRLDRPLDFYERPNMTFWLLVRDTPGENVEPSHTATATLVLNVVPADLRPPWFLPCTFSDGYVCIQAQYHGAVPTGHILPSPLVLRPGPIYAEDGDRGINQPIIYSIFRGNVNGTFIIHPDSGNLTVARSVPSPMTFLLLVKGQQADLARYSVTQVTVEAVAAAGSPPRFPQSLYRGTVARGAGAGVVVKDAAAPSQPLRIQAQDPEFSDLNSAITYRITNHSHFRMEGEVVLTTTTLAQAGAFYAEVEAHNTVTSGTATTVIEIQVSEQEPPSTDVPPSPEAGGTTGPWTSTTSEVPRPPEPSQGPSTTSSGGGTGPHPPSGTTLRPPTSSTPGGSPGAENSTSHQPATPGGDTAQTPKPGTSQPMPPGVGTSTSHQPATPSGGTVQTPEPGTSQPMPPSMGTSTSHQPATPGGGTAQTPEAGTSQPMPPGMGTSTSHQPTTPGGGTAQTPEPGTSQPMPLSKSTPSSGGGPSEDKRFSVVDMAALGGVLGALLLLALLGLAVLVHKHYGPRLKCCSGKAPEPQPQGFDNQAFLPDHKANWAPVPSPTHDPKPAEAPMPAEPAPPGPASPGGAPEPPAAARAGGSPTAVRSILTKERRPEGGYKAVWFGEDIGTEADVVVLNAPTLDVDGASDSGSGDEGEGAGRGGGPYDAPGGDDSYI

SEQ ID NO: 872015 - protein, 651 aa, Homo sapiens
MGSWALLWPPLLFTGLLVRPPGTMAQAQYCSVNKDIFEVEENTNVTEPLVDIHVPEGQEVTLGALSTPFAFRIQGNQLFLNVTPDYEEKSLLEAQLLCQSGGTLVTQLRVFVSVLDVNDNAPEFPFKTKEIRVEEDTKVNSTVIPETQLQAEDRDKDDILFYTLQEMTAGASDYFSLVSVNRPALRLDRPLDFYERPNMTFWLLVRDTPGENVEPSHTATATLVLNVVPADLRPPWFLPCTFSDGYVCIQAQYHGAVPTGHILPSPLVLRPGPIYAEDGDRGINQPIIYSIFRGNVNGTFIIHPDSGNLTVARSVPSPMTFLLLVKGQQADLARYSVTQVTVEAVAAAGSPPRFPQSLYRGTVARGAGAGVVVKDAAAPSQPLRIQAQDPEFSDLNSAITYRITNHSHFRMEGEVVLTTTTLAQAGAFYAEVEAHNTVTSGTATTVIEIQVSEQEPPSTGGGPSEDKRFSVVDMAALGGVLGALLLLALLGLAVLVHKHYGPRLKCCSGKAPEPQPQGFDNQAFLPDHKANWAPVPSPTHDPKPAEAPMPAEPAPPGPASPGGAPEPPAAARAGGSPTAVRSILTKERRPEGGYKAVWFGEDIGTEADVVVLNAPTLDVDGASDSGSGDEGEGAGRGGGPYDAPGGDDSYI

SEQ ID NO: 872016 - protein, 679 aa, Homo sapiens
MTAGASDYFSLVSVNRPALRLDRPLDFYERPNMTFWLLVRDTPGENVEPSHTATATLVLNVVPADLRPPWFLPCTFSDGYVCIQAQYHGAVPTGHILPSPLVLRPGPIYAEDGDRGINQPIIYSIFRGNVNGTFIIHPDSGNLTVARSVPSPMTFLLLVKGQQADLARYSVTQVTVEAVAAAGSPPRFPQSLYRGTVARGAGAGVVVKDAAAPSQPLRIQAQDPEFSDLNSAITYRITNHSHFRMEGEVVLTTTTLAQAGAFYAEVEAHNTVTSGTATTVIEIQVSEQEPPSTDVPPSPEAGGTTGPWTSTTSEVPRPPEPSQGPSTTSSGGGTGPHPPSGTTLRPPTSSTPGGSPGAENSTSHQPATPGGDTAQTPKPGTSQPMPPGVGTSTSHQPATPSGGTVQTPEPGTSQPMPPSMGTSTSHQPATPGGGTAQTPEAGTSQPMPPGMGTSTSHQPTTPGGGTAQTPEPGTSQPMPLSKSTPSSGGGPSEDKRFSVVDMAALGGVLGALLLLALLGLAVLVHKHYGPRLKCCSGKAPEPQPQGFDNQAFLPDHKANWAPVPSPTHDPKPAEAPMPAEPAPPGPASPGGAPEPPAAARAGGSPTAVRSILTKERRPEGGYKAVWFGEDIGTEADVVVLNAPTLDVDGASDSGSGDEGEGAGRGGGPYDAPGGDDSYI

SEQ ID NO: 872017 - protein, 834 aa, Homo sapiens
MGSWALLWPPLLFTGLLVRPPGTMAQAQYCSVNKDIFEVEENTNVTEPLVDIHVPEGQEVTLGALSTPFAFRIQGNQLFLNVTPDYEEKSLLEAQLLCQSGGTLVTQLRVFVSVLDVNDNAPEFPFKTKEIRVEEDTKVNSTVIPETQLQAEDRDKDDILFYTLQEMTAGASDYFSLVSVNRPALRLDRPLDFYERPNMTFWLLVRDTPGENVEPSHTATATLVLNVVPADLRPPWFLPCTFSDGYVCIQAQYHGAVPTGHILPSPLVLRPGPIYAEDGDRGINQPIIYSIFRDSGNLTVARSVPSPMTFLLLVKGQQADLARYSVTQVTVEAVAAAGSPPRFPQSLYRGTVARGAGAGVVVKDAAAPSQPLRIQAQDPEFSDLNSAITYRITNHSHFRMEGEVVLTTTTLAQAGAFYAEVEAHNTVTSGTATTVIEIQVSEQEPPSTDVPPSPEAGGTTGPWTSTTSEVPRPPEPSQGPSTTSSGGGTGPHPPSGTTLRPPTSSTPGGSPGAENSTSHQPATPGGDTAQTPKPGTSQPMPPGVGTSTSHQPATPSGGTVQTPEPGTSQPMPPSMGTSTSHQPATPGGGTAQTPEAGTSQPMPPGMGTSTSHQPTTPGGGTAQTPEPGTSQPMPLSKSTPSSGGGPSEDKRFSVVDMAALGGVLGALLLLALLGLAVLVHKHYGPRLKCCSGKAPEPQPQGFDNQAFLPDHKANWAPVPSPTHDPKPAEAPMPAEPAPPGPASPGGAPEPPAAARAGGSPTAVRSILTKERRPEGGYKAVWFGEDIGTEADVVVLNAPTLDVDGASDSGSGDEGEGAGRGGGPYDAPGGDDSYI

SEQ ID NO: 872018 - protein, 736 aa, Homo sapiens
MGSWALLWPPLLFTGLLVRPPGTMAQAQYCSVNKDIFEVEENTNVTEPLVDIHVPEGQEVTLGALSTPFAFRIQGNQLFLNVTPDYEEKSLLEAQLLCQSGGTLVTQLRVFVSVLDVNDNAPEFPFKTKEIRVEEDTKVNSTVIPETQLQAEDRDKDDILFYTLQEMTAGASDYFSLVSVNRPALRLDRPLDFYERPNMTFWLLVRDTPGENVEPSHTATATLVLNVVPADLRPPWFLPCTFSDGYVCIQAQYHGAVPTGHILPSPLVLRPGPIYAEDGDRGINQPIIYSIFRGNVNGTFIIHPDSGNLTVARSVPSPMTFLLLVKGQQADLARYSVTQVTVEAVAAAGSPPRFPQSLYRGTVARGAGAGVVVKDAAAPSQPLRIQAQDPEFSDLNSAITYRITNHSHFRMEGEVVLTTTTLAQAGAFYAEVEAHNTVTSGTATTVIEIQVSEQEPPSTDVPPSPEAGGTTGPWTSTTSEVPRPPEPSQGPSTTSSGGGTGPHPPSGTTLRPPTSSTPGGSPGAENSTSHQPATPGGDTAQTPKPGTSQPMPPGVGTSTSHQPATPSGGTVQTPEPGTSQPMPPSMGTSTSHQPATPGGGTAQTPEAGTSQPMPPGMGTSTSHQPTTPGGGTAQTPEPGTSQPMPLSKSTPSSGGGPSEDKRFSVVDMAALGGVLGALLLLALLGLAVLVHKHYGPRLKCCSGKAPEPQPQGFDNQAFLPDHKANWAPVPSPRRCP

SEQ ID NO: 872019 - protein, 656 aa, Homo sapiens
  misc_feature (648)..(648): Xaa can be any naturally occurring amino acid
MGSWALLWPPLLFTGLLVRPPGTMAQAQYCSVNKDIFEVEENTNVTEPLVDIHVPEGQEVTLGALSTPFAFRIQGNQLFLNVTPDYEEKSLLEAQLLCQSGGTLVTQLRVFVSVLDVNDNAPEFPFKTKEIRVEEDTKVNSTVIPETQLQAEDRDKDDILFYTLQEMTAGASDYFSLVSVNRPALRLDRPLDFYERPNMTFWLLVRDTPGENVEPSHTATATLVLNVVPADLRPPWFLPCTFSDGYVCIQAQYHGAVPTGHILPSPLVLRPGPIYAEDGDRGINQPIIYSIFRGNVNGTFIIHPDSGNLTVARSVPSPMTFLLLVKGQQADLARYSVTQVTVEAVAAAGSPPRFPQSLYRGTVARGAGAGVVVKDAAAPSQPLRIQAQDPEFSDLNSAITYRITNHSHFRMEGEVVLTTTTLAQAGAFYAEVEAHNTVTSGTATTVIEIQVSEQEPPSTDVPPSPEAGGTTGPWTSTTSEVPRPPEPSQGPSTTSSGGGTGPHPPSGTTLRPPTSSTPGGSPGAENSTSHQPATPGGDTAQTPKPGTSQPMPPGVGTSTSHQPATPSGGTVQTPEPGTSQPMPPSMGTSTSHQPATPGGGTAQTPEAGTSQPMPPGMGTSTSSPPLCCHRGGKVYVVLGRRRKEESPXVLSPSSVL

SEQ ID NO: 872020 - protein, 347 aa, Homo sapiens
PCYEQLNRKAEGKATSTTELPPEYLISRLSQQLPATPGGDTAQTPKPGTSQPMPPGVGTSTSHQPATPSGGTVQTPEPGTSQPMPPSMGTSTSHQPATPGGGTAQTPEAGTSQPMPPGMGTSTSHQPTTPGGGTAQTPEPGTSQPMPLSKSTPSSGGGPSEDKRFSVVDMAALGGVLGALLLLALLGLAVLVHKHYGPRLKCCSGKAPEPQPQGFDNQAFLPDHKANWAPVPSPTHDPKPAEAPMPAEPAPPGPASPGGAPEPPAAARAGGSPTAVRSILTKERRPEGGYKAVWFGEDIGTEADVVVLNAPTLDVDGASDSGSGDEGEGAGRGGGPYDAPGGDDSYI

SEQ ID NO: 872021 - protein, 845 aa, Homo sapiens
MGSWALLWPPLLFTGLLVRPPGTMAQAQYCSVNKDIFEVEENTNVTEPLVDIHVPEGQEVTLGALSTPFAFRIQGNQLFLNVTPDYEEKSLLEAQLLCQSGGTLVTQLRVFVSVLDVNDNAPEFPFKTKEIRVEEDTKVNSTVIPETQLQAEDRDKDDILFYTLQEMTAGASDYFSLVSVNRPALRLDRPLDFYERPNMTFWLLVRDTPGENVEPSHTATATLVLNVVPADLRPPWFLPCTFSDGYVCIQAQYHGAVPTGHILPSPLVLRPGPIYAEDGDRGINQPIIYSIFRGNVNGTFIIHPDSGNLTVARSVPSPMTFLLLVKGQQADLARYSVTQVTVEAVAAAGSPPRFPQSLYRGTVARGAGAGVVVKDAAAPSQPLRIQAQDPEFSDLNSAITYRITNHSHFRMEGEVVLTTTTLAQAGAFYAEVEAHNTVTSGTATTVIEIQVSEQEPPSTDVPPSPEAGGTTGPWTSTTSEVPRPPEPSQGPSTTSSGGGTGPHPPSGTTLRPPTSSTPGGSPGAENSTSHQPATPGGDTAQTPKPGTSQPMPPGVGTSTSHQPATPSGGTVQTPEPGTSQPMPPSMGTSTSHQPATPGGGTAQTPEAGTSQPMPPGMGTSTSHQPTTPGGGTAQTPEPGTSQPMPLSKSTPSSGGGPSEDKRFSVVDMAALGGVLGALLLLALLGLAVLVHKHYGPRLKCCSGKAPEPQPQGFDNQAFLPDHKANWAPVPSPTHDPKPAEAPMPAEPAPPGPASPGGAPEPPAAARAGGSPTAVRSILTKERRPEGGYKAVWFGEDIGTEADVVVLNAPTLDVDGASDSGSGDEGEGAGRGGGPYDAPGGDDSYI

SEQ ID NO: 872022 - protein, 138 aa, Homo sapiens
SELQHDAYELDVADDVVSVRTMAPTNQPHPVGAQYRPQSQEPLSRCPPVWEPAPPTNQPHPVGAQHRPQRQEPLSRCPPVWEPAPPTNQPHPVGAQHRPQSQEPLSRCPSARAPHLQVAPTLLPSLPDSGHWLVWETL

SEQ ID NO: 872023 - protein, 651 aa, Homo sapiens; identical to SEQ ID NO: 872015

SEQ ID NO: 872024 - protein, 845 aa, Homo sapiens; identical to SEQ ID NO: 872021

SEQ ID NO: 872025 - protein, 647 aa, Homo sapiens
MTFWLLVRDTPGENVEPSHTATATLVLNVVPADLRPPWFLPCTFSDGYVCIQAQYHGAVPTGHILPSPLVLRPGPIYAEDGDRGINQPIIYSIFRGNVNGTFIIHPDSGNLTVARSVPSPMTFLLLVKGQQADLARYSVTQVTVEAVAAAGSPPRFPQSLYRGTVARGAGAGVVVKDAAAPSQPLRIQAQDPEFSDLNSAITYRITNHSHFRMEGEVVLTTTTLAQAGAFYAEVEAHNTVTSGTATTVIEIQVSEQEPPSTDVPPSPEAGGTTGPWTSTTSEVPRPPEPSQGPSTTSSGGGTGPHPPSGTTLRPPTSSTPGGSPGAENSTSHQPATPGGDTAQTPKPGTSQPMPPGVGTSTSHQPATPSGGTVQTPEPGTSQPMPPSMGTSTSHQPATPGGGTAQTPEAGTSQPMPPGMGTSTSHQPTTPGGGTAQTPEPGTSQPMPLSKSTPSSGGGPSEDKRFSVVDMAALGGVLGALLLLALLGLAVLVHKHYGPRLKCCSGKAPEPQPQGFDNQAFLPDHKANWAPVPSPTHDPKPAEAPMPAEPAPPGPASPGGAPEPPAAARAGGSPTAVRSILTKERRPEGGYKAVWFGEDIGTEADVVVLNAPTLDVDGASDSGSGDEGEGAGRGGGPYDAPGGDDSYI

SEQ ID NO: 872026 - protein, 663 aa, Homo sapiens
MGSWALLWPPLLFTGLLVRPPGTMAQAQYCSVNKDIFEVEENTNVTEPLVDIHVPEGQEVTLGALSTPFAFRIQGNQLFLNVTPDYEEKSLLEAQLLCQSGGTLVTQLRVFVSVLDVNDNAPEFPFKTKEIRVEEDTKVNSTVIPETQLQAEDRDKDDILFYTLQEMTAGASDYFSLVSVNRPALRLDRPLDFYERPNMTFWLLVRDTPGENVEPSHTATATLVLNVVPADLRPPWFLPCTFSDGYVCIQAQYHGAVPTGHILPSPLVLRPGPIYAEDGDRGINQPIIYSIFRGNVNGTFIIHPDSGNLTVARSVPSPMTFLLLVKGQQADLARYSVTQVTVEAVAAAGSPPRFPQSLYRGTVARGAGAGVVVKDAAAPSQPLRIQAQDPEFSDLNSAITYRITNHSHFRMEGEVVLTTTTLAQAGAFYAEVEAHNTVTSGTATTVIEIQVSEQEPPSTDVPPSPEAGGTTGPWTSTTSEVPRPPEPSQGPSTTSSGGGTGPHPPSGTTLRPPTSSTPGGSPGAENSTSHQPATPGGDTAQTPKPGTSQPMPPGVGTSTSHQPATPSGGTVQTPEPGTSQPMPPSMGTSTSHQPATPGGGTAQTPEAGTSQPMPPGMGTSTSHQPTTPGGGTAQTPEPGTSQPMPLSKSTPSSGSTHSVAFPP

SEQ ID NO: 872027 - protein, 83 aa, Homo sapiens
FWGSGDPGHPLSSCPGAHVVPSALCLGACDLSPLVDPALVQLGPNDCPSFWQWAGPAGQREPPWQKPVVKDHKLAASGWGEGR

SEQ ID NO: 872028 - protein, 247 aa, Homo sapiens
MGHTGPLSQGQQSLRFGRQPRPGWNPSVPSLAQVGTGNAWGTQQCGDDDVFHCDPGGGPSEDKRFSVVDMAALGGVLGALLLLALLGLAVLVHKHYGPRLKCCSGKAPEPQPQGFDNQAFLPDHKANWAPVPSPTHDPKPAEAPMPAEPAPPGPASPGGAPEPPAAARAGGSPTAVRSILTKERRPEGGYKAVWFGEDIGTEADVVVLNAPTLDVDGASDSGSGDEGEGAGRGGGPYDAPGGDDSYI

SEQ ID NO: 872029 - protein, 69 aa, Homo sapiens
QGTAEAGRAEVIPGAWAMLHELFLQEEVSLQLGPESTVDQDWTGSKALERPPGMCACASAPRMQLRPAH

SEQ ID NO: 872030 - protein, 130 aa, Homo sapiens
GREGLLSRPKGTISNFGYKFPFTSEFLFPGCFSPLDACGGGDGRASDTARGSLSGYFSHPAKLLETSKETRPVSTQASGKCRPPVWELSSPLLTHRSALTHRDGEWGSSSAAFHRQRGHIPFQQSLWPRC

SEQ ID NO: 872031 - protein, 230 aa, Homo sapiens
LQSGDWERRGSGSESAHKTQRALDDCKMLVQEFNTQVALYRELVISIGDVSVSCPSLRAEMHKTRTKGCEMARQAHQKLAAISGPEDGEIHPEICRLYIQLQCCLEMYTTEMLKSICLLGSLQFHRKGKEPGGGTKSLDCKIEESAETPALEDSSSSPVDSQQHSWQVSTDIENTERDMREMKNLLSKLRETMPLPLKNQDDSSLLNLTPYPLVRRRKRRFFGLCCLVSS

SEQ ID NO: 872032 - protein, 143 aa, Homo sapiens
MQHRGFLLLTLLALLALTSAVAKKKDKVKKGGPGSECAEWAWGPCTPSSKDCGVGFREGTCGAQTQRIRCRVPCNWKKEFGADCKYKFENWGACDGGTGTKVRQGTLKKARYNAQCQETIRVTKPCTPKTKAKAKAKKGKGKD

SEQ ID NO: 872033 - protein, 143 aa, Homo sapiens; identical to SEQ ID NO: 872032

SEQ ID NO: 872034 - protein, 143 aa, Homo sapiens; identical to SEQ ID NO: 872032

SEQ ID NO: 872035 - protein, 143 aa, Homo sapiens; identical to SEQ ID NO: 872032

SEQ ID NO: 872036 - protein, 143 aa, Homo sapiens; identical to SEQ ID NO: 872032

SEQ ID NO: 872037 - protein, 143 aa, Homo sapiens; identical to SEQ ID NO: 872032

SEQ ID NO: 872038 - protein, 143 aa, Homo sapiens; identical to SEQ ID NO: 872032

SEQ ID NO: 872039 - protein, 143 aa, Homo sapiens; identical to SEQ ID NO: 872032

SEQ ID NO: 872040 - protein, 143 aa, Homo sapiens; identical to SEQ ID NO: 872032

SEQ ID NO: 872041 - protein, 165 aa, Homo sapiens
MQHRGFLLLTLLALLALTSAVAKKKDKVKKGGPGSECAEWAWGPCTPSSKDCGVGFREGTCGAQTQRIRCRVPCNWKKEFGADCKYKFENWGACDGGTGTKVRQGTLKKARYNAQCQETIRVTKPCTPKTKAKAKGQRKEKGVGLSRGAAPPPPPPVRGQFQVKP

SEQ ID NO: 872042 - protein, 165 aa, Homo sapiens; identical to SEQ ID NO: 872041

SEQ ID NO: 872043 - protein, 165 aa, Homo sapiens; identical to SEQ ID NO: 872041

SEQ ID NO: 872044 - protein, 143 aa, Homo sapiens; identical to SEQ ID NO: 872032

SEQ ID NO: 872045 - protein, 274 aa, Homo sapiens
LRPVLETKGAAAAGAGRARRGRERSSAGSERVSARRPLVRPAAADLGAGGWRRGWGSELRPGLEASPGESPLSGASGLAARGRPKSSHRRHLSSPTWGLESGARGGGRALHAAPGGEGDGPGIQTRALPSGMQHRGFLLLTLLALLALTSAVAKKKDKVKKGGPGSECAEWAWGPCTPSSKDCGVGFREGTCGAQTQRIRCRVPCNWKKEFGADCKYKFENWGACDGGTGTKVRQGTLKKARYNAQCQETIRVTKPCTPKTKAKAKAKKGKGKD

SEQ ID NO: 872046 - protein, 143 aa, Homo sapiens; identical to SEQ ID NO: 872032

SEQ ID NO: 872047 - protein, 321 aa, Homo sapiens
MRSTTLLLVAKFVVIPGNELDKVVVEGNASPSVKGGGVGVAVEVRGDHLVLSVAQDALEGAPDACFTTFLMSSYLAGFSRRQVRSTTDTLAVGTRKAMPVSFPFSSGMTLPTALAAPVEAGMMFWRAPRPSRHSFPEGPSTVFWVAVMAWTVVMSPSTIPKLSWMPGPGIQTRALPSGMQHRGFLLLTLLALLALTSAVAKKKDKVKKGGPGSECAEWAWGPCTPSSKDCGVGFREGTCGAQTQRIRCRVPCNWKKEFGADCKYKFENWGACDGGTGTKVRQGTLKKARYNAQCQETIRVTKPCTPKTKAKAKAKKGKGKD

SEQ ID NO: 872048 - protein, 143 aa, Homo sapiens; identical to SEQ ID NO: 872032

SEQ ID NO: 872049 - protein, 165 aa, Homo sapiens; identical to SEQ ID NO: 872041

SEQ ID NO: 872050 - protein, 143 aa, Homo sapiens; identical to SEQ ID NO: 872032

SEQ ID NO: 872051 - protein, 310 aa, Homo sapiens
GHEVHHPVAVAKFVVIPGNELDKVVVEGNASPSVKGGGVGVAVEVRGDHLVLSVAQDALRGPSDACFTTFLMSSYLAGFSRRQVRSTTDTLAVGTRKAMPVSFPFSSGMTLPTALAAPVEAGMMFWRAPRPSRHSFPEGPSTVFWVAVMAWTVVMSPSTIPKLSWMTGPGIQTRALPSGMQHRGFLLLTLLALLALTSAVAKKKDKVKKGGPGSECAEWAWGPCTPSSKDCGVGFREGTCGAQTQRIRCRVPCNWKKEFGADCKYKFENWGACDGGTGTKVRQGTLKKARYNAQCQETIRVTKPPFSFAY

SEQ ID NO: 872052 - protein, 87 aa, Homo sapiens
AAAAAGARLQITDPHERRPCLPAILVPSLLHIYACLLHSLASECPLAVSKAFGQEGAWAASQQVYWALPSTRHCNKKWRLNHEETWL

SEQ ID NO: 872053 - protein, 148 aa, Homo sapiens
TDLPVRPSCAVLADTRSPRLSAHGGVVRPAALGGRSRRAGPRRPPMEKARRGGDGVPRGPVLHIVVVGFHHKKGCQVRKGPAPPPSRSGVRPSGPPCPASVCSARVVQSSPQRLRPFASQPDSFCSSSHPPHMKPSPHNLFLLPLKNG

SEQ ID NO: 872054 - protein, 682 aa, Homo sapiens
TDLPVRPSCAVLADTRSPRLSAHGGVVRPAALGGRSRRAGPRRPPMEKARRGGDGVPRGPVLHIVVVGFHHKKGCQVEFSYPPLIPGDGHDSHTLPEEWKYLPFLALPDGAHNYQEDTVFFHLPPRNGNGATVFGISCYRQIEAKALKVRQADITRETVQKSVCVLSKLPLYGLLQAKLQLITHAYFEEKDFSQISILKELYEHMNSSLGGASLEGSQVYLGLSPRDLVLHFRHKVLILFKLILLEKKVLFYISPVNKLVGALMTVLSLFPGMIEHGLSDCSQYRPRKSMSEDGGLQESNPCADDFVSASTADVSHTNLGTIRKVMAGNHGEDAAMKTEEPLFQVEDSSKGQEPNDTNQYLKPPSRPSPDSSESDWETLDPSVLEDPNLKEREQLGSDQTNLFPKDSVPSESLPITVQPQANTGQVVLIPGLISGLEEDQYGMPLAIFTKGYLCLPYMALQQHHLLSDVTVRGFVAGATNILFRQQKHLSDAIVEVEEALIQIHDPELRKLLNPTTADLRFADYLVRHVTENRDDVFLDGTGWEGGDEWIRAQFAVYIHALLAATLQLVLFRIVNVAKKLETSWSQLAGMLYKQEKLLASQLEELFPVQRQLCLHGFPLSPLPPPKVSLSHQMRSLEQGVRGCYCFLRFKCPLSVCCSQAVTSHRSTAGDHMSNCLHGCCSK

SEQ ID NO: 872055 - protein, 675 aa, Homo sapiens
TDLPVRPSCAVLADTRSPRLSAHGGVVRPAALGGRSRRAGPRRPPMEKARRGGDGVPRGPVLHIVVVGFHHKKGCQVEFSYPPLIPGDGHDSHTLPEEWKYLPFLALPDGAHNYQEDTVFFHLPPRNGNGATVFGISCYRQIEAKALKVRQADITRETVQKSVCVLSKLPLYGLLQAKLQLITHAYFEEKDFSQISILKELYEHMNSSLGGASLEGSQVYLGLSPRDLVLHFRHKVLILFKLILLEKKVLFYISPVNKLVGALMTVLSLFPGMIEHGLSDCSQYRPRKSMSEDGGLQESNPCADDFVSASTADVSHTNLGTIRKVMAGNHGEDAAMKTEEPLFQVEDSSKGQEPNDTNQYLKPPSRPSPDSSESDWETLDPSVLEDPNLKEREQLGSDQTNLFPKDSVPSESLPITVQPQANTGQVVLIPGLISGLEEDQYGMPLAIFTKGYLCLPYMALQQHHLLSDVTVRGFVAGATNILFRQQKHLSDAIVEVEEALIQIHDPELRKLLNPTTADLRFADYLVRHVTENRDDVFLDGTGWEGGDEWIRAQFAVYIHALLAATLQLDNEKILSDYGTTFVTAWKNTHNYRVWNSNKHPALAEINPNSVQNSERGKKIGNVMVTTSRNVVQTGKAVGQSVGGAFSSAKTAMSSWLSTFTTSTSQSLTEPPDEKP

SEQ ID NO: 872056 - protein, 693 aa, Homo sapiens
TDLPVRPSCAVLADTRSPRLSAHGGVVRPAALGGRSRRAGPRRPPMEKARRGGDGVPRGPVLHIVVVGFHHKKGCQVEFSYPPLIPGDGHDSHTLPEEWKYLPFLALPDGAHNYQEDTVFFHLPPRNGNGATVFGISCYRQIEAKALKVRQADITRETVQKSVCVLSKLPLYGLLQAKLQLITHAYFEEKDFSQISILKELYEHMNSSLGGASLEGSQVYLGLSPRDLVLHFRHKVLILFKLILLEKKVLFYISPVNKLVGALMTVLSLFPGMIEHGLSDCSQYRPRKSMSEDGGLQESNPCADDFVSASTADVSHTNLGTIRKVMAGNHGEDAAMKTEEPLFQVEDSSKGQEPNDTNQYLKPPSRPSPDSSESDWETLDPSVLEDPNLKEREQLGSDQTNLFPKDSVPSESLPITVQPQANTGQVVLIPGLISGLEEDQYGMPLAIFTKGYLCLPYMALQQHHLLSDVTVRGFVAGATNILFRQQKHLSDAIVEVEEALIQIHDPELRKLLNPTTADLRFADYLVRHVTENRDDVFLDGTGWEGGDEWIRAQFAVYIHALLAATLQLDNEKILSDYGTTFVTAWKNTHNYRVWNSNKHPALAEINPNHPFQGQYSVSDMKLRFSHSVQNSERGKKIGNVMVTTSRNVVQTGKAVGQSVGGAFSSAKTAMSSWLSTFTTSTSQSLTEPPDEKP

SEQ ID NO: 872057 - protein, 675 aa, Homo sapiens; identical to SEQ ID NO: 872055

SEQ ID NO: 872058 - protein, 693 aa, Homo sapiens; identical to SEQ ID NO: 872056

SEQ ID NO: 872059 - protein, 675 aa, Homo sapiens; identical to SEQ ID NO: 872055

SEQ ID NO: 872060 - protein, 675 aa, Homo sapiens; identical to SEQ ID NO: 872055

SEQ ID NO: 872061 - protein, 120 aa, Homo sapiens
PLFQVEDSSKGQEPNDTNQYLKPPSRPSPDSSESDWETLDPSVLEDPNLKEREQLGSDQTNLFPKDSVPSESLPITVQPQANTGQVVLIPGLISGLEEDQYGMPLAIFTKVKCNIFYRIP

SEQ ID NO: 872062 - protein, 245 aa, Homo sapiens
RPPGAGAASPCAAPGLPAGGATIHPGSPSAWPPRARAALRLWLGCVCFALVQADSPSAPVNVTVRHLKANSAVVSWDVLEDEVVIGFAISQQKKDVRMLRFIQEVNTTTRSCALWDLEEDTEYIVHVQAISIQGQSPASEPVLFKTPREAEKMASKNKDEVTMKEMGRNQQLRTGEVLIIVVVLFMWAGVIALFCRQYDIIKDNEPNNNKEKTKSASETSTPEHQGGGLLRSKFPNKPSVNIIEA

SEQ ID NO: 872063 - protein, 234 aa, Homo sapiens
RPPGAGAASPCAAPGLPAGGATIHPGSPSAWPPRARAALRLWLGCVCFALVQADSPSAPVNVTVRHLKANSAVVSWDVLEDEVVIGFAISQQKKDVRMLRFIQEVNTTTRSCALWDLEEDTEYIVHVQAISIQGQSPASEPVLFKTPREAEKMASKNKDEVTMKEMGRNQQLRTGEVLIIVVVLFMWAGVIALFCRQYDIIKDNEPNNNKEKTKSASETSTPEHQGGGLLRSKI

SEQ ID NO: 872064 - protein, 234 aa, Homo sapiens; identical to SEQ ID NO: 872063

SEQ ID NO: 872065 - protein, 234 aa, Homo sapiens; identical to SEQ ID NO: 872063

SEQ ID NO: 872066 - protein, 234 aa, Homo sapiens; identical to SEQ ID NO: 872063

SEQ ID NO: 872067 - protein, 234 aa, Homo sapiens; identical to SEQ ID NO: 872063

SEQ ID NO: 872068 - protein, 250 aa, Homo sapiens
RPPGAGAASPCAAPGLPAGGATIHPGSPSAWPPRARAALRLWLGCVCFALVQADSPSAPVNVTVRHLKANSAVVSWDVLEDEVVIGFAISQQKKDVRMLRFIQEVNTTTRSCALWDLEEDTEYIVHVQAISIQGQSPASEPVLFKTPREAEKMASKNKDEVTMKEMGRNQQLRTGEVLIIVVVLFMWAGVIALFCRQYDIIKDNEPNNNKEKTKSASETSTPEHQGGGLLRSKVRARPGPGWATLCLMLW

SEQ ID NO: 872069 - protein, 748 aa, Homo sapiens
MGLRTAKKRGLGGGGKWKREEGGGTRGRREVRPACFLQSGGRGDPGDVGGPAGNPGCSPHPRAATRPPPLPAHTPAHTPEWCGAASAEAAEPRRAGPHLCIPAPGLTKTPILEKVPRKMAAKTPSSEESGLPKLPVPPLQQTLATYLQCMRHLVSEEQFRKSQAIVQQFGAPGGLGETLQQKLLERQEKTANWVSEYWLNDMYLNNRLALPVNSSPAVIFARQHFPGTDDQLRFAASLISGVLSYKALLDSHSIPTDCAKGQLSGQPLCMKQYYGLFSSYRLPGHTQDTLVAQNSSIMPEPEHVIVACCNQFFVLDVVINFRRLSEGDLFTQLRKIVKMASNEDERLPPIGLLTSDGRSEWAEARTVLVKDSTNRDSLDMIERCICLVCLDAPGGVELSDTHRALQLLHGGGYSKNGANRWYDKSLQFVVGRDGTCGVVCEHSPFDGIVLVQCTEHLLKHMTQSSRKLIRADSVSELPAPRRLRWKCSPEIQGHLASSAEKLQRIVKNLDFIVYKFDNYGKTFIKKQKCSPDAFIQVALQLAFYRLHRRLVPTYESASIRRFQEGRVDNIRSATPEALAFVRAVTDHKAAVPASEKLLLLKDAIRAQTAYTVMAITGMAIDNHLLALRELARAMCKELPEMFMDETYLMSNRFVLSTSQVPTTTEMFCCYGPVVPNGYGACYNPQPETILFCISSFHSCKETSSSKFAKAVEESLIDMRDLCSLLPPTESKPLATKEKATRPSQGHQP

SEQ ID NO: 872070 - protein, 630 aa, Homo sapiens
MAAKTPSSEESGLPKLPVPPLQQTLATYLQCMRHLVSEEQFRKSQAIVQQFGAPGGLGETLQQKLLERQEKTANWVSEYWLNDMYLNNRLALPVNSSPAVIFARQHFPGTDDQLRFAASLISGVLSYKALLDSHSIPTDCAKGQLSGQPLCMKQYYGLFSSYRLPGHTQDTLVAQNSSIMPEPEHVIVACCNQFFVLDVVINFRRLSEGDLFTQLRKIVKMASNEDERLPPIGLLTSDGRSEWAEARTVLVKDSTNRDSLDMIERCICLVCLDAPGGVELSDTHRALQLLHGGGYSKNGANRWYDKSLQFVVGRDGTCGVVCEHSPFDGIVLVQCTEHLLKHMTQSSRKLIRADSVSELPAPRRLRWKCSPEIQGHLASSAEKLQRIVKNLDFIVYKFDNYGKTFIKKQKCSPDAFIQVALQLAFYRLHRRLVPTYESASIRRFQEGRVDNIRSATPEALAFVRAVTDHKAAVPASEKLLLLKDAIRAQTAYTVMAITGMAIDNHLLALRELARAMCKELPEMFMDETYLMSNRFVLSTSQVPTTTEMFCCYGPVVPNGYGACYNPQPETILFCISSFHSCKETSSSKFAKAVEESLIDMRDLCSLLPPTESKPLATKEKATRPSQGHQP

SEQ ID NO: 872071 - protein, 666 aa, Homo sapiens
MWPECRDEALSTVGPHLCIPAPGLTKTPILEKVPRKMAAKTPSSEESGLPKLPVPPLQQTLATYLQCMRHLVSEEQFRKSQAIVQQFGAPGGLGETLQQKLLERQEKTANWVSEYWLNDMYLNNRLALPVNSSPAVIFARQHFPGTDDQLRFAASLISGVLSYKALLDSHSIPTDCAKGQLSGQPLCMKQYYGLFSSYRLPGHTQDTLVAQNSSIMPEPEHVIVACCNQFFVLDVVINFRRLSEGDLFTQLRKIVKMASNEDERLPPIGLLTSDGRSEWAEARTVLVKDSTNRDSLDMIERCICLVCLDAPGGVELSDTHRALQLLHGGGYSKNGANRWYDKSLQFVVGRDGTCGVVCEHSPFDGIVLVQCTEHLLKHMTQSSRKLIRADSVSELPAPRRLRWKCSPEIQGHLASSAEKLQRIVKNLDFIVYKFDNYGKTFIKKQKCSPDAFIQVALQLAFYRLHRRLVPTYESASIRRFQEGRVDNIRSATPEALAFVRAVTDHKAAVPASEKLLLLKDAIRAQTAYTVMAITGMAIDNHLLALRELARAMCKELPEMFMDETYLMSNRFVLSTSQVPTTTEMFCCYGPVVPNGYGACYNPQPETILFCISSFHSCKETSSSKFAKAVEESLIDMRDLCSLLPPTESKPLATKEKATRPSQGHQP

SEQ ID NO: 872072 - protein, 97 aa, Homo sapiens
GGLAMPKNAVVILRYGPYSAAGLPVEHHTFRLQGLQAVLAIDGHEVILEKIEDWNVVELMVNEEVIFHCNIKDLEFGGDGKLDPLCEKARIAVLNAY

SEQ ID NO: 872073 - protein, 263 aa, Homo sapiens
MHAYCFACNKNIFFFFFLRIVKNLDFIVYKFDNYGKTFIKKQKCSPDAFIQVALQLAFYRLHRRLVPTYESASIRRFQEGRVDNIRSATPEALAFVRAVTDHKAAVPASEKLLLLKDAIRAQTAYTVMAITGMAIDNHLLALRELARAMCKELPEMFMDETYLMSNRFVLSTSQVPTTTEMFCCYGPVVPNGYGACYNPQPETILFCISSFHSCKETSSSKFAKAVEESLIDMRDLCSLLPPTESKPLATKEKATRPSQGHQP

SEQ ID NO: 872074 - protein, 545 aa, Homo sapiens [sequence omitted]

SEQ ID NO: 872075 - protein, 545 aa, Homo sapiens [sequence omitted]

SEQ ID NO: 872076 - protein, 630 aa, Homo sapiens; identical to SEQ ID NO: 872070

SEQ ID NO: 872077 - protein, 630 aa, Homo sapiens; identical to SEQ ID NO: 872070

SEQ ID NO: 872078 - protein, 161 aa, Homo sapiens
GGLAMPKNAVVILRYGPYSAAGLPVEHHTFRLQGLQAVLAIDGHEVILEKIEDWNVVELMVNEEVIFHCNIKDLEFGKLTPSSDKRTTSSSRLTFHQLSSPCRMKVSPLQQFPQKTQDLTCTVLAQIGSCIHFQTNLCDLGWPGLDHMLISGLEKRGTQPY

SEQ ID NO: 872079 - protein, 630 aa, Homo sapiens; identical to SEQ ID NO: 872070

SEQ ID NO: 872080 - protein, 510 aa, Homo sapiens
VLVLLRSRRRPEPGAPLQRGAGCGAAACLAPLARAGRSPAMPGFDYKFLEKPKRRLLCPLCGKPMREPVQVSTCGHRFCDTCLQEFLSEGVFKCPEDQLPLDYAKIYPDPELEVQVLGLPIRCIHSEEGCRWSGPLRHLQGHLNTCSFNVIPCPNRCPMKLSRRDLPAHLQHDCPKRRLKCEFCGCDFSGEAYESHEGMCPQESVYCENKCGARMMRRLLAQHATSECPKRTQPCTYCTKEFVFDTIQSHQYQCPRLPVACPNQCGVGTVAREDLPGHLKDSCNTALVLCPFKDSGCKHRCPKLAMARHVEESVKPHLAMMCALVSRQRQELQELRRELEELSVGSDGVLIWKIGSYGRRLQEAKAKPNLECFSPAFYTHKYGYKLQVSAFLNGNGSGEGTHLSLYIRVLPGAFDNLLEWPFARRVTFSLLDQSDPGLAKPQHVTETFHPDPNWKNFQKPGTWRGSLDESSLGFGYPKFISHQDIRKRNYVRDDAVFIRAAVELPRKILS

SEQ ID NO: 872081 - protein, 499 aa, Homo sapiens
GCERNPWTVGVRGAAACLAPLARAGRSPAMPGFDYKFLEKPKRRLLCPLCGKPMREPVQVSTCGHRFCDTCLQEFLSEGVFKCPEDQLPLDYAKIYPDPELEVQVLGLPIRCIHSEEGCRWSGPLRHLQGHLNTCSFNVIPCPNRCPMKLSRRDLPAHLQHDCPKRRLKCEFCGCDFSGEAYESHEGMCPQESVYCENKCGARMMRRLLAQHATSECPKRTQPCTYCTKEFVFDTIQSHQYQCPRLPVACPNQCGVGTVAREDLPGHLKDSCNTALVLCPFKDSGCKHRCPKLAMARHVEESVKPHLAMMCALVSRQRQELQELRRELEELSVGSDGVLIWKIGSYGRRLQEAKAKPNLECFSPAFYTHKYGYKLQVSAFLNGNGSGEGTHLSLYIRVLPGAFDNLLEWPFARRVTFSLLDQSDPGLAKPQHVTETFHPDPNWKNFQKPGTWRGSLDESSLGFGYPKFISHQDIRKRNYVRDDAVFIRAAVELPRKILS

SEQ ID NO: 872082 - protein, 457 aa, Homo sapiens
SQDRGWGLLGSWGSRAPQASACPFVSSRLVGNLVCEGVFKCPEDQLPLDYAKIYPDPELEVQVLGLPIRCIHSEEGCRWSGPLRHLQGHLNTCSFNVIPCPNRCPMKLSRRDLPAHLQHDCPKRRLKCEFCGCDFSGEAYESHEGMCPQESVYCENKCGARMMRRLLAQHATSECPKRTQPCTYCTKEFVFDTIQSHQYQCPRLPVACPNQCGVGTVAREDLPGHLKDSCNTALVLCPFKDSGCKHRCPKLAMARHVEESVKPHLAMMCALVSRQRQELQELRRELEELSVGSDGVLIWKIGSYGRRLQEAKAKPNLECFSPAFYTHKYGYKLQVSAFLNGNGSGEGTHLSLYIRVLPGAFDNLLEWPFARRVTFSLLDQSDPGLAKPQHVTETFHPDPNWKNFQKPGTWRGSLDESSLGFGYPKFISHQDIRKRNYVRDDAVFIRAAVELPRKILS

SEQ ID NO: 872083 - protein, 488 aa, Homo sapiens
SQDRGWGLLGSWGSRAPQASACPFVSSRLVGNRSGEEGRLPQWRGWGQASLSPNEKTFFLPLPHFSEGVFKCPEDQLPLDYAKIYPDPELEVQVLGLPIRCIHSEEGCRWSGPLRHLQGHLNTCSFNVIPCPNRCPMKLSRRDLPAHLQHDCPKRRLKCEFCGCDFSGEAYESHEGMCPQESVYCENKCGARMMRRLLAQHATSECPKRTQPCTYCTKEFVFDTIQSHQYQCPRLPVACPNQCGVGTVAREDLPGHLKDSCNTALVLCPFKDSGCKHRCPKLAMARHVEESVKPHLAMMCALVSRQRQELQELRRELEELSVGSDGVLIWKIGSYGRRLQEAKAKPNLECFSPAFYTHKYGYKLQVSAFLNGNGSGEGTHLSLYIRVLPGAFDNLLEWPFARRVTFSLLDQSDPGLAKPQHVTETFHPDPNWKNFQKPGTWRGSLDESSLGFGYPKFISHQDIRKRNYVRDDAVFIRAAVELPRKILS

SEQ ID NO: 872084 - protein, 517 aa, Homo sapiens
VLVLLRSRRRPEPGAPLQRGAGCGAAACLAPLARAGRSPAMPGFDYKFLEKPKRRLLCPLCGKPMREPVQVSTCGHRFCDTCLQEFLSEGVFKCPEDQLPLDYAKFPHPYPQIYPDPELEVQVLGLPIRCIHSEEGCRWSGPLRHLQGHLNTCSFNVIPCPNRCPMKLSRRDLPAHLQHDCPKRRLKCEFCGCDFSGEAYESHEGMCPQESVYCENKCGARMMRRLLAQHATSECPKRTQPCTYCTKEFVFDTIQSHQYQCPRLPVACPNQCGVGTVAREDLPGHLKDSCNTALVLCPFKDSGCKHRCPKLAMARHVEESVKPHLAMMCALVSRQRQELQELRRELEELSVGSDGVLIWKIGSYGRRLQEAKAKPNLECFSPAFYTHKYGYKLQVSAFLNGNGSGEGTHLSLYIRVLPGAFDNLLEWPFARRVTFSLLDQSDPGLAKPQHVTETFHPDPNWKNFQKPGTWRGSLDESSLGFGYPKFISHQDIRKRNYVRDDAVFIRAAVELPRKILS

SEQ ID NO: 872085 - protein, 603 aa, Homo sapiens
VLVLLRSRRRPEPGAPLQRGAGCGAAACLAPLARAGRSPAMPGFDYKFLEKPKRRLLCPLCGKPMREPVQVSTCGHRFCDTCLQEFLSEGVFKCPEDQLPLDYAKIYPDPELEVQVLGLPIRCIHSEEGCRWSGPLRHLQGHLNTCSFNVIPCPNRCPMKLSRRDLPAHLQHDCPKRRLKCEFCGCDFSGEAYESHEGMCPQESVYCENKCGARMMRRLLAQHATSECPKRTQPCTYCTKEFVFDTIQSHQYQCPRLPVACPNQCGVGTVAREDLPGHLKDSCNTALVLCPFKDSGCKHRVRCPFSCQPPFALEALDRGSASDVLRPWWSLLCCSETLSPSLCCQLQPLPNTLCLPHVELGACYPVPTPLLSLDLPLLITLLPSPMAWGFAKQCPKLAMARHVEESVKPHLAMMCALVSRQRQELQELRRELEELSVGSDGVLIWKIGSYGRRLQEAKAKPNLECFSPAFYTHKYGYKLQVSAFLNGNGSGEGTHLSLYIRVLPGAFDNLLEWPFARRVTFSLLDQSDPGLAKPQHVTETFHPDPNWKNFQKPGTWRGSLDESSLGFGYPKFISHQDIRKRNYVRDDAVFIRAAVELPRKILS

SEQ ID NO: 872086 - protein, 312 aa, Homo sapiens [sequence omitted]

SEQ ID NO: 872087 - protein, 510 aa, Homo sapiens; identical to SEQ ID NO: 872080

SEQ ID NO: 872088 - protein, 205 aa, Homo sapiens [sequence omitted]

SEQ ID NO: 872089 - protein, 251 aa, Homo sapiens
VLVLLRSRRRPEPGAPLQRGAGCGAAACLAPLARAGRSPAMPGFDYKFLEKPKRRLLCPLCGKPMREPVQVSTCGHRFCDTCLQEFLSEGVFKCPEDQLPLDYAKIYPDPELEVQVLGLPIRCIHSEEGCRWSGPLRHLQGHLNTCSFNVIPCPNRCPMKLSRRDLPAHLQHDCPKRRLKCEFCGCDFSGEAYEWMRVLWALVIPSSSPTRTFESETMCGMMQSSSVLLLNCPGRSSAECRWGSRGKDDGA

SEQ ID NO: 872090 - protein, 510 aa, Homo sapiens; identical to SEQ ID NO: 872080

SEQ ID NO: 872091 - protein, 510 aa, Homo sapiens; identical to SEQ ID NO: 872080

SEQ ID NO: 872092 - protein, 510 aa, Homo sapiens; identical to SEQ ID NO: 872080

SEQ ID NO: 872093 - protein, 352 aa, Homo sapiens
MKLSRRDLPAHLQHDCPKRRLKCEFCGCDFSGEAYESHEGMCPQESVYCENKCGARMMRRLLAQHATSECPKRTQPCTYCTKEFVFDTIQSHQYQCPRLPVACPNQCGVGTVAREDLPGHLKDSCNTALVLCPFKDSGCKHRCPKLAMARHVEESVKPHLAMMCALVSRQRQELQELRRELEELSVGSDGVLIWKIGSYGRRLQEAKAKPNLECFSPAFYTHKYGYKLQVSAFLNGNGSGEGTHLSLYIRVLPGAFDNLLEWPFARRVTFSLLDQSDPGLAKPQHVTETFHPDPNWKNFQKPGTWRGSLDESSLGFGYPKFISHQDIRKRNYVRDDAVFIRAAVELPRKILS

SEQ ID NO: 872094 - protein, 533 aa, Homo sapiens
VLVLLRSRRRPEPGAPLQRGAGCGAAACLAPLARAGRSPAMPGFDYKFLEKPKRRLLCPLCGKPMREPVQVSTCGHRFCDTCLQEFLSEGVFKCPEDQLPLDYAKIYPDPELEVQVLGLPIRCIHSEEGCRWSGPLRHLQVGSDVRAGTTSPLAGTELQPSHQGHLNTCSFNVIPCPNRCPMKLSRRDLPAHLQHDCPKRRLKCEFCGCDFSGEAYESHEGMCPQESVYCENKCGARMMRRLLAQHATSECPKRTQPCTYCTKEFVFDTIQSHQYQCPRLPVACPNQCGVGTVAREDLPGHLKDSCNTALVLCPFKDSGCKHRCPKLAMARHVEESVKPHLAMMCALVSRQRQELQELRRELEELSVGSDGVLIWKIGSYGRRLQEAKAKPNLECFSPAFYTHKYGYKLQVSAFLNGNGSGEGTHLSLYIRVLPGAFDNLLEWPFARRVTFSLLDQSDPGLAKPQHVTETFHPDPNWKNFQKPGTWRGSLDESSLGFGYPKFISHQDIRKRNYVRDDAVFIRAAVELPRKILS

SEQ ID NO: 872095 - protein, 510 aa, Homo sapiens; identical to SEQ ID NO: 872080

SEQ ID NO: 872096 - protein, 463 aa, Homo sapiens
VLVLLRSRRRPEPGAPLQRGAGCGAAACLAPLARAGRSPAMPGFDYKFLEKPKRRLLCPLCGKPMREPVQVSTCGHRFCDTCLQEFLSEGVFKCPEDQLPLDYAKIYPDPELEVQVLGLPIRCIHSEEGCRWSGPLRHLQGHLNTCSFNVIPCPNRCPMKLSRRDLPAHLQHDCPKRRLKCEFCGCDFSGEAYESHEGMCPQESVYCENKCGARMMRRLLAQHATSECPKRTQPCTYCTKEFVFDTIQSHQYQCPRLPVACPNQCGVGTVAREDLPGHLKDSCNTALVLCPFKDSGCKHRCPKLAMARHVEESVKPHLAMMCALVSRQRQELQELRRELEELSVGSDGVLIWKIGSYGRRLQEAKAKPNLECFSPAFYTHKYGYKLQVSAFLNGNGSGEGTHLSLYIRVLPGAFDNLLEWPFARRVTFSLLDQSDPGLAKPQWVHVIIHVSPMKHEQRRLTYQ

SEQ ID NO: 872097 - protein, 96 aa, Homo sapiens
SCRYFRWPCSFNVFSLLDQSDPGLAKPQHVTETFHPDPNWKNFQKPGTWRGSLDESSLGFGYPKFISHQDIRKRNYVRDDAVFIRAAVELPRKILS

SEQ ID NO: 872098 - protein, 1075 aa, Homo sapiens
MCVMLVSNLPNKGYSVEEVYDLAKPFGGLKDILILSSHKKAYIEINRKAAESMVKFYTCFPVLMDGNQLSISMAPENMNIKDEEAIFITLVKENDPEANIDTIYDRFVHLDNLPEDGLQCVLCVGLQFGKVDHHVFISNRNKAILQLDSPESAQSMYSFLKQNPQNIGDHMLTCSLSPKIDLPEVQIEHDPELEKESPGLKNSPIDESEVQTATDSPSVKPNELEEESTPSIQTETLVQQEEPCEEEAEKATCDSDFAVETLELETQGEEVKEEIPLVASASVSIEQFTENAEECALNQQMFNSDLEKKGAEIINPKTALLPSDSVFAEERNLKGILEESPSEAEDFISGITQTMVEAVAEVEKNETVSEILPSTCIVTLVPGIPTGDEKTVDKKNISEKKGNMDEKEEKEFNTKETRMDLQIGTEKAEKNEGRMDAEKVEKMAAMKEKPAENTLFKAYPNKGVGQANKPDETSKTSILAVSDVSSSKPSIKAVIVSSPKAKATVSKTENQKSFPKSVPRDQINAEKKLSAKEFGLLKPTSARSGLAESSSKFKPTQSSLTRGGSGRISALQGKLSKLDYRDITKQSQETEARPSIMKRDDSNNKTLAEQNTKNPKSTTGRSSKSKEEPLFPFNLDEFVTVDEVIEEVNPSQAKQNPLKGKRKETLKNVPFSELNLKKKKGKTSTPRGVEGELSFVTLDEIGEEEDAAAHLAQALVTVDEVIDEEELNMEEMVKNSNSLFTLDELIDQDDCISHSEPKDVTVLSVAEEQDLLKQERLVTVDEIGEVEELPLNESADITFATLNTKGNEGDIVRDSIGFISSQVPEDPSTLVTVDEIQDDSSDLHLVTLDEVTEEDEDSLADFNNLKEELNFVTVDEVGEEEDGDNDLKVELAQSKNDHPTDKKGNRKKRAVDTKKTKLESLSQVGPVNENVMEEDLKTMIERHLTAKTPTKRVRIGKTLPSEKAVVTEPAKGEEAFQMSEVDEESGLKDSEPERKRKKTEDSSSGKSVASDVPEELDFLVPKAGFFCPICSLFYSGEKAMTNHCKSTRHKQNTEKFMAKQRKEKEQNEAEERSSR

SEQ ID NO: 872099 - protein, 171 aa, Homo sapiens
MYRPRSRSPRICHRFISRYRSRSRSRSPYRIRNPFRGSPKCFRSVSPERMSRRSVRSSDRKKALEDVVQRSGHGTEFNKQKHLEAADKGHSPAQKPKTSSGTKPSVKPTSATKSDSNLGGHSIRCKSKFEDDLVSTGLLRVLRKLKKLYGGFNDHGVEREFWRGRQKQVGF

SEQ ID NO: 872100 - protein, 918 aa, Homo sapiens
MSRPRFNPRGDFPLQRPRAPNPSGMRPPGPFMRPGSMGLPRFYPAGRARGIPHRFAGHESYQNMGPQRMNVQVTQHRTDPRLTKEKLDFHEAQQKKGKPHGSRWDDEPHISASVAVKQSSVTQVTEQSPKVQSRYTKESASSILASFGLSNEDLEELSRYPDEQLTPENMPLILRDIRMRKMGRRLPNLPSQSRNKETLGSEAVSSNVIDYGHASKYGYTEDPLEVRIYDPEIPTDEVENEFQSQQNISASVPNPNVICNSMFPVEDVFRQMDFPGESSNNRSFFSVESGTKMSGLHISGGQSVLEPIKSVNQSINQTVSQTMSQSLIPPSMNQQPFSSELISSVSQQERIPHEPVINSSNVHVGSRGSKKNYQSQADIPIRSPFGIVKASWLPKFSHADAQKMKRLPTPSMMNDYYAASPRIFPHLCSLCNVECSHLKDWIQHQNTSTHIESCRQLRQQYPDWNPEILPSRRNEGNRKENETPRRRSHSPSPRRSRRSSSSHRFRRSRSPMHYMYRPRSRSPRICHRFISRYRSRSRSRSPYRIRNPFRGSPKCFRSVSPERMSRRSVRSSDRKKALEDVVQRSGHGTEFNKQKHLEAADKGHSPAQKPKTSSGTKPSVKPTSATKSDSNLGGHSIRCKSKNLEDDTLSECKQVSDKAVSLQRKLRKEQSLHYGSVLLITELPEDGCTEEDVRKLFQPFGKVNDVLIVPYRKEAYLEMEFKEAITAIMKYIETTPLTIKGKSVKICVPGKKKAQNKEVKKKTLESKKVSASTLKRDADASKAVEIVTSTSAESVDQTQQLVPLVRNTARDHDGTPENEGEETVQSALFGFQYDASDHTMAWLGPNTVPEVKEMILQDPQLQTTQLPQTTQAPDITWGMLKKTTYKAEQILLQTQKPFTPDNLFLALLSGDAKPEYEQ

SEQ ID NO: 872101 - protein, 1195 aa, Homo sapiens
MSRPRFNPRGDFPLQRPRAPNPSGMRPPGPFMRPGSMGLPRFYPAGRARGIPHRFAGHESYQNMGPQRMNVQVTQHRTDPRLTKEKLDFHEAQQKKGKPHGSRWDDEPHISASVAVKQSSVTQVTEQSPKVQSRYTKESASSILASFGLSNEDLEELSRYPDEQLTPENMPLILRDIRMRKMGRRLPNLPSQSRNKETLGSEAVSSNVIDYGHASKYGYTEDPLEVRIYDPEIPTDEVENEFQSQQNISASVPNPNVICNSMFPVEDVFRQMDFPGESSNNRSFFSVESGTKMSGLHISGGQSVLEPIKSVNQSINQTVSQTMSQSLIPPSMNQQPFSSELISSVSQQERIPHEPVINSSNVHVGSRGSKKNYQSQADIPIRSPFGIVKASWLPKFSHADAQKMKRLPTPSMMNDYYAASPRIFPHLCSLCNVECSHLKDWIQHQNTSTHIESCRQLRQQYPDWNPEILPSRRNEGNRKENETPRRRSHSPSPRRSRRSSSSHRFRRSRSPMHYMYRPRSRSPRICHRFISRYRSRSRSRSPYRIRNPFRGSPKCFRSVSPERMSRRSVRSSDRKKALEDVVQRSGHGTEFNKQKHLEAADKGHSPAQKPKTSSGTKPSVKPTSATKSDSNLGGHSIRCKSKNLEDDTLSECKQVSDKAVSLQRKLRKEQSLHYGSVLLITELPEDGCTEEDVRKLFQPFGKVNDVLIVPYRKEAYLEMEFKEAITAIMKYIETTPLTIKGKSVKICVPGKKKAQNKEVKKKTLESKKVSASTLKRDADASKAVEIVTSTSAAKTGQAKASVAKVNKSTGKSASSVKSVVTVAVKGNKASIKTAKSGGKKSLEAKKTGNVKNKDSNKPVTIPENSEIKTSIEVKATENCAKEAISDAALEATENEPLNKETEEMCVMLVSNLPNKGYSVEEVYDLAKPFGGLKDILILSSHKKAYIEINRKAAESMVKFYTCFPVLMDGNQLSISMAPENMNIKDEEAIFITLVKENDPEANIDTIYDRFVHLDNLPEDGLQCVLCVGLQFGKVDHHVFISNRNKAILQLDSPESAQSMYSFLKQNPQNIGDHMLTCSLSPKIDLPEVQIEHDPEIKKKKVDEESGLKDSEPERKRKKTEDSSSGKSVASDVPEELDFLVPKAGFFCPICSLFYSGEKAMTNHCKSTRHKQNTEKFMAKQRKEKEQNEAEERSSR

SEQ ID NO: 872102 - protein, 817 aa, Homo sapiens
MSRPRFNPRGDFPLQRPRAPNPSGMRPPGPFMRPGSMGLPRFYPAGRARGIPHRFAGHESYQNMGPQRMNVQVTQHRTDPRLTKEKLDFHEAQQKKGKPHGSRWDDEPHISASVAVKQSSVTQVTEQSPKVQSRYTKESASSILASFGLSNEDLEELSRYPDEQLTPENMPLILRDIRMRKMGRRLPNLPSQSRNKETLGSEAVSSNVIDYGHASKYGYTEDPLEVRIYDPEIPTDEVENEFQSQQNISASVPNPNVICNSMFPVEDVFRQMDFPGESSNNRSFFSVESGTKMSGLHISGGQSVLEPIKSVNQSINQTVSQTMSQSLIPPSMNQQPFSSELISSVSQQERIPHEPVINSSNVHVGSRGSKKNYQSQADIPIRSPFGIVKASWLPKFSHADAQKMKRLPTPSMMNDYYAASPRIFPHLCSLCNVECSHLKDWIQHQNTSTHIESCRQLRQQYPDWNPEILPSRRNEGNRKENETPRRRSHSPSPRRSRRSSSSHRFRRSRSPMHYMYRPRSRSPRICHRFISRYRSRSRSRSPYRIRNPFRGSPKCFRSVSPERMSRRSVRSSDRKKALEDVVQRSGHGTEFNKQKHLEAADKGHSPAQKPKTSSGTKPSVKPTSATKSDSNLGGHSIRCKSKNLEDDTLSECKQVSDKAVSLQRKLRKEQSLHYGSVLLITELPEDGCTEEDVRKLFQPFGKVNDVLIVPYRKEAYLEMEFKEAITAIMKYIETTPLTIKGKSVKICVPGKKKAQNKEVKKKTLESKKVSASTLKRDADASKAVEIVTSTSAAKTGQAKASVAKVNKSTARHGGSRL

SEQ ID NO: 872103 - protein, 918 aa, Homo sapiens; identical to SEQ ID NO: 872100

SEQ ID NO: 872104 - protein, 404 aa, Homo sapiens
MYRPRSRSPRICHRFISRYRSRSRSRSPYRIRNPFRGSPKCFRSVSPERMSRRSVRSSDRKKALEDVVQRSGHGTEFNKQKHLEAADKGHSPAQKPKTSSGTKPSVKPTSATKSDSNLGGHSIRCKSKNLEDDTLSECKQVSDKAVSLQRKLRKEQSLHYGSVLLITELPEDGCTEEDVRKLFQPFGKVNDVLIVPYRKEAYLEMEFKEAITAIMKYIETTPLTIKGKSVKICVPGKKKAQNKEVKKKTLESKKVSASTLKRDADASKAVEIVTSTSAESVDQTQQLVPLVRNTARDHDGTPENEGEETVQSALFGFQYDASDHTMAWLGPNTVPEVKEMILQDPQLQTTQLPQTTQAPDITWGMLKKTTYKAEQILLQTQKPFTPDNLFLALLSGDAKPEYEQ

SEQ ID NO: 872105 - protein, 615 aa, Homo sapiens
MVKFYTCFPVLMDGNQLSISMAPENMNIKDEEAIFITLVKENDPEANIDTIYDRFVHLDNLPEDGLQCVLCVGLQFGKVDHHVFISNRNKAILQLDSPESAQSMYSFLKQNPQNIGDHMLTCSLSPKIDLPEVQIEHDPEIRKRKTLAEQNTKNPKSTTGRSSKSKEEPLFPFNLDEFVTVDEVIEEVNPSQAKQNPLKGKRKETLKNVPFSELNLKKKKGKTSTPRGVEGELSFVTLDEIGEEEDAAAHLAQALVTVDEVIDEEELNMEEMVKNSNSLFTLDELIDQDDCISHSEPKDVTVLSVAEEQDLLKQERLVTVDEIGEVEELPLNESADITFATLNTKGNEGDIVRDSIGFISSQVPEDPSTLVTVDEIQDDSSDLHLVTLDEVTEEDEDSLADFNNLKEELNFVTVDEVGEEEDGDNDLKVELAQSKNDHPTDKKGNRKKRAVDTKKTKLESLSQVGPVNENVMEEDLKTMIERHLTAKTPTKRVRIGKTLPSEKAVVTEPAKGEEAFQMSEVDEESGLKDSEPERKRKKTEDSSSGKSVASDVPEELDFLVPKAGFFCPICSLFYSGEKAMTNHCKSTRHKQNTEKFMAKQRKEKEQNEAEERSSR

SEQ ID NO: 872106 - protein, 1978 aa, Homo sapiens
MSRPRFNPRGDFPLQRPRAPNPSGMRPPGPFMRPGSMGLPRFYPAGRARGIPHRFAGHESYQNMGPQRMNVQVTQHRTDPRLTKEKLDFHEAQQKKGKPHGSRWDDEPHISASVAVKQSSVTQVTEQSPKVQSRYTKESASSILASFGLSNEDLEELSRYPDEQLTPENMPLILRDIRMRKMGRRLPNLPSQSRNKETLGSEAVSSNVIDYGHASKYGYTEDPLEVRIYDPEIPTDEVENEFQSQQNISASVPNPNVICNSMFPVEDVFRQMDFPGESSNNRSFFSVESGTKMSGLHISGGQSVLEPIKSVNQSINQTVSQTMSQSLIPPSMNQQPFSSELISSVSQQERIPHEPVINSSNVHVGSRGSKKNYQSQADIPIRSPFGIVKASWLPKFSHADAQKMKRLPTPSMMNDYYAASPRIFPHLCSLCNVECSHLKDWIQHQNTSTHIESCRQLRQQYPDWNPEILPSRRNEGNRKENETPRRRSHSPSPRRSRRSSSSHRFRRSRSPMHYMYRPRSRSPRICHRFISRYRSRSRSRSPYRIRNPFRGSPKCFRSVSPERMSRRSVRSSDRKKALEDVVQRSGHGTEFNKQKHLEAADKGHSPAQKPKTSSGTKPSVKPTSATKSDSNLGGHSIRCKSKNLEDDTLSECKQVSDKAVSLQRKLRKEQSLHYGSVLLITELPEDGCTEEDVRKLFQPFGKVNDVLIVPYRKEAYLEMEFKEAITAIMKYIETTPLTIKGKSVKICVPGKKKAQNKEVKKKTLESKKVSASTLKRDADASKAVEIVTSTSAAKTGQAKASVAKVNKSTGKSASSVKSVVTVAVKGNKASIKTAKSGGKKSLEAKKTGNVKNKDSNKPVTIPENSEIKTSIEVKATENCAKEAISDAALEATENEPLNKETEEMCVMLVSNLPNKGYSVEEVYDLAKPFGGLKDILILSSHKKAYIEINRKAAESMVKFYTCFPVLMDGNQLSISMAPENMNIKDEEAIFITLVKENDPEANIDTIYDRFVHLDNLPEDGLQCVLCVGLQFGKVDHHVFISNRNKAILQLDSPESAQSMYSFLKQNPQNIGDHMLTCSLSPKIDLPEVQIEHDPELEKESPGLKNSPIDESEVQTATDSPSVKPNELEEESTPSIQTETLVQQEEPCEEEAEKATCDSDFAVETLELETQGEEVKEEIPLVASASVSIEQFTENAEECALNQQMFNSDLEKKGAEIINPKTALLPSDSVFAEERNLKGILEESPSEAEDFISGITQTMVEAVAEVEKNETVSEILPSTCIVTLVPGIPTGDEKTVDKKNISEKKGNMDEKEEKEFNTKETRMDLQIGTEKAEKNEGRMDAEKVEKMAAMKEKPAENTLFKAYPNKGVGQANKPDETSKTSILAVSDVSSSKPSIKAVIVSSPKAKATVSKTENQKSFPKSVPRDQINAEKKLSAKEFGLLKPTSARSGLAESSSKFKPTQSSLTRGGSGRISALQGKLSKLDYRDITKQSQETEARPSIMKRDDSNNKTLAEQNTKNPKSTTGRSSKSKEEPLFPFNLDEFVTVDEVIEEVNPSQAKQNPLKGKRKETLKNVPFSELNLKKKKGKTSTPRGVEGELSFVTLDEIGEEEDAAAHLAQALVTVDEVIDEEELNMEEMVKNSNSLFTLDELIDQDDCISHSEPKDVTVLSVAEEQDLLKQERLVTVDEIGEVEELPLNESADITFATLNTKGNEGDIVRDSIGFISSQVPEDPSTLVTVDEIQDDSSDLHLVTLDEVTEEDEDSLADFNNLKEELNFVTVDEVGEEEDGDNDLKVELAQSKNDHPTDKKGNRKKRAVDTKKTKLESLSQVGPVNENVMEEDLKTMIERHLTAKTPTKRVRIGKTLPSEKAVVTEPAKGEEAFQMSEVDEESGLKDSEPERKRKKTEDSSSGKSVASDVPEELDFLVPKAGFFCPICSLFYSGEKAMTNHCKSTRHKQNTEKFMAKQRKEKEQNEAEERSSR

SEQ ID NO: 872107 - protein, 820 aa, Homo sapiens
MSRPRFNPRGDFPLQRPRAPNPSGMRPPGPFMRPGSMGLPRFYPAGRARGIPHRFAGHESYQNMGPQRMNVQVTQHRTDPRLTKEKLDFHEAQQKKGKPHGSRWDDEPHISASVAVKQSSVTQVTEQSPKVQSRYTKESASSILASFGLSNEDLEELSRYPDEQLTPENMPLILRDIRMRKMGRRLPNLPSQSRNKETLGSEAVSSNVIDYGHASKYGYTEDPLEVRIYDPEIPTDEVENEFQSQQNISASVPNPNVICNSMFPVEDVFRQMDFPGESSNNRSFFSVESGTKMSGLHISGGQSVLEPIKSVNQSINQTVSQTMSQSLIPPSMNQQPFSSELISSVSQQERIPHEPVINSSNVHVGSRGSKKNYQSQADIPIRSPFGIVKASWLPKFSHADAQKMKRLPTPSMMNDYYAASPRIFPHLCSLCNVECSHLKDWIQHQNTSTHIESCRQLRQQYPDWNPEILPSRRNEGNRKENETPRRRSHSPSPRRSRRSSSSHRFRRSRSPMHYMYRPRSRSPRICHRFISRYRSRSRSRSPYRIRNPFRGSPKCFRSVSPERMSRRSVRSSDRKKALEDVVQRSGHGTEFNKQKHLEAADKGHSPAQKPKTSSGTKPSVKPTSATKSDSNLGGHSIRCKSKNLEDDTLSECKQVSDKAVSLQRKLRKEQSLHYGSVLLITELPEDGCTEEDVRKLFQPFGKVNDVLIVPYRKEAYLEMEFKEAITAIMKYIETTPLTIKGKSVKICVPGKKKAQNKEVKKKTLESKKVSASTLKRDADASKAVEIVTSTSAGWSSVVESQFIAVSTSQVQVLLPPHPPE

SEQ ID NO: 872108 - protein, 814 aa, Homo sapiens
MSRPRFNPRGDFPLQRPRAPNPSGMRPPGPFMRPGSMGLPRFYPAGRARGIPHRFAGHESYQNMGPQRMNVQVTQHRTDPRLTKEKLDFHEAQQKKGKPHGSRWDDEPHISASVAVKQSSVTQVTEQSPKVQSRYTKESASSILASFGLSNEDLEELSRYPDEQLTPENMPLILRDIRMRKMGRRLPNLPSQSRNKETLGSEAVSSNVIDYGHASKYGYTEDPLEVRIYDPEIPTDEVENEFQSQQNISASVPNPNVICNSMFPVEDVFRQMDFPGESSNNRSFFSVESGTKMSGLHISGGQSVLEPIKSVNQSINQTVSQTMSQSLIPPSMNQQPFSSELISSVSQQERIPHEPVINSSNVHVGSRGSKKNYQSQADIPIRSPFGIVKASWLPKFSHADAQKMKRLPTPSMMNDYYAASPRIFPHLCSLCNVECSHLKDWIQHQNTSTHIESCRQLRQQYPDWNPEILPSRRNEGNRKENETPRRRSHSPSPRRSRRSSSSHRFRRSRSPMHYMYRPRSRSPRICHRFISRYRSRSRSRSPYRIRNPFRGSPKCFRSVSPERMSRRSVRSSDRKKALEDVVQRSGHGTEFNKQKHLEAADKGHSPAQKPKTSSGTKPSVKPTSATKSDSNLGGHSIRCKSKNLEDDTLSECKQVSDKAVSLQRKLRKEQSLHYGSVLLITELPEDGCTEEDVRKLFQPFGKVNDVLIVPYRKEAYLEMEFKEAITAIMKYIETTPLTIKGKSVKICVPGKKKAQNKEVKKKTLESKKVSASTLKRDADASKAVEIVTSTSAGLLPTGGGNNYPQIVLAPGLCH

SEQ ID NO: 872109 - protein, 470 aa, Homo sapiens
MSRPRFNPRGDFPLQRPRAPNPSGMRPPGPFMRPGSMGLPRFYPAGRARGIPHRFAGHESYQNMGPQRMNVQVTQHRTDPRLTKEKLDFHEAQQKKGKPHGSRWDDEPHISASVAVKQSSVTQVTEQSPKVQSRYTKESASSILASFGLSNEDLEELSRYPDEQLTPENMPLILRDIRMRKMGRRLPNLPSQSRNKETLGSEAVSSNVIDYGHASKYGYTEDPLEVRIYDPEIPTDEVENEFQSQQNISASVPNPNVICNSMFPVEDVFRQMDFPGESSNNRSFFSVESGTKMSGLHISGGQSVLEPIKSVNQSINQTVSQTMSQSLIPPSMNQQPFSSELISSVSQQERIPHEPVINSSNVHVGSRGSKKNYQSQADIPIRSPFGIVKASWLPKFSHADAQKMKRLPTPSMMNDYYAASPRIFPHLCSLCNVECSHLKDWIQHQNTSTHIESCRQLRQHSLQPPPPGFK

SEQ ID NO: 872110 - protein, 44 aa, Homo sapiens
MRQQLSAQQKQYIKVLKQLLKASRASVSQAQLRVLRQTVVSHNP

SEQ ID NO: 872111 - protein, 376 aa, Homo sapiens
RAGQIKLGAALRAGPQRMRPAFALCLLWQALWPGPGGGEHPTADRAGCSASGACYSLHHATMKRQAAEEACILRGGALSTVRAGAELRAVLALLRAGPGPGGGSKDLLFWVALERRRSHCTLENEPLRGFSWLSSDPGGLESDTLQWVEEPQRSCTARRCAVLQATGGVEPAGWKEMRCHLRANGYLCKYQFEVLCPAPRPGAASNLSYRAPFQLHSAALDFSPPGTEVSALCRGQLPISVTCIADEIGARWDKLSGDVLCPCPGRYLRAGKCAELPNCLDDLGGFACECATGFELGKDGRFLCDQWGRTADPWGDRGAHQAPAGHCNQPRAAENMANQGRREAGRDIFLCLFGEFGEVIELFKTLETNRTQYNLH

SEQ ID NO: 872112 - protein, 351 aa, Homo sapiens
RAGQIKLGAALRAGPQRMRPAFALCLLWQALWPGPGGGEHPTADRAGCSASGACYSLHHATMKRQAAEEACILRGGALSTVRAGAELRAVLALLRAGPGPGGGSKDLLFWVALERRRSHCTLENEPLRGFSWLSSDPGGLESDTLQWVEEPQRSCTARRCAVLQATGGVEPAGWKEMRCHLRANGYLCKYQFEVLCPAPRPGAASNLSYRAPFQLHSAALDFSPPGTEVSALCRGQLPISVTCIADEIGARWDKLSGDVLCPCPGRYLRAGKCAELPNCLDDLGGFACECATGFELGKDGRFLCDQWGRTADPWGDRGAHQAPAGHCNQPRAAENMANQGRREAGRDTTCP

SEQ ID NO: 872113 - protein, 507 aa, Homo sapiens
RAGQIKLGAALRAGPQRMRPAFALCLLWQALWPGPGGGEHPTADRAGCSASGACYSLHHATMKRQAAEEACILRGGALSTVRAGAELRAVLALLRAGPGPGGGSKDLLFWVALERRRSHCTLENEPLRGFSWLSSDPGGLESDTLQWVEEPQRSCTARRCAVLQATGGVEPAGWKEMRCHLRANGYLCKYQFEVLCPAPRPGAASNLSYRAPFQLHSAALDFSPPGTEVSALCRGQLPISVTCIADEIGARWDKLSGDVLCPCPGRYLRAGKCAELPNCLDDLGGFACECATGFELGKDGRSCVTSGEGQPTLGGTGVPTRRPPATATSPVPQRTWPIRVDEKLGETPLVPEQDNSVTSIPEIPRWGSQSTMSTLQMSLQAESKATITPSGSVISKFNSTTSSATPQAFDSSSAVVFIFVSTAVVVLVILTMTVLGLVKLCFHESPSSQPRKESMGPPGLESDPEPAALGSSSAHCTNNGVKVGDCDLRDRAEGALLAESPLGSSDA

SEQ ID NO: 872114 - protein, 507 aa, Homo sapiens; identical to SEQ ID NO: 872113

SEQ ID NO: 872115 - protein, 507 aa, Homo sapiens; identical to SEQ ID NO: 872113

SEQ ID NO: 872116 - protein, 151 aa, Homo sapiens
MICEASFPPLSCRCFILFSSFGPKEADEESWSERDPGSHSNFPLTCCETLASSLACLSLSFPPCKMDIKISAPLSCSSINVILYTACLVPAPVQMLRKYRPYLGALLSMKTGPLAKEKYFVISACSCPCPHEQVSSLSPPALLRTRFLIQI

SEQ ID NO: 872117 - protein, 221 aa, Homo sapiens
MASVTRAVFGELPSGGGTVEKFQLQSDLLRVDIISWGCTITALEVKDRQGRASDVVLGFAELEGYLQKQPYFGAVIGRVANRIAKGTFKVDGKEYHLAINKEPNSLHGGVRGFDKVLWTPRVLSNGVQFSRISPDGEEGYPGELKVWVTYTLDGGELIVNYRAQASQATPVNLTNHSYFNLAGQASPNINDHEVTIEADTYLPVDETLIPTGGTNRRFLQG

SEQ ID NO: 872118 - protein, 342 aa, Homo sapiens
MASVTRAVFGELPSGGGTVEKFQLQSDLLRVDIISWGCTITALEVKDRQGRASDVVLGFAELEGYLQKQPYFGAVIGRVANRIAKGTFKVDGKEYHLAINKEPNSLHGGVRGFDKVLWTPRVLSNGVQFSRISPDGEEGYPGELKVWVTYTLDGGELIVNYRAQASQATPVNLTNHSYFNLAGQASPNINDHEVTIEADTYLPVDETLIPTGEVAPVQGTAFDLRKPVELGKHLQDFHLNGFDHNFCLKGSKEKHFCARVHHAASGRVLEVYTTQPGVQFYTGNFLDGTLKGKNGAVYPKHSGFCLETQNWPDAVNQPRFPPVLLRPGEEYDHTTWFKFSVA

SEQ ID NO: 872119 - protein, 270 aa, Homo sapiens
MASVTRAVFGELPSGGGTVEKFQLQSDLLRVDIISWGCTITALEVKDRQGRASDVVLGFAELEGYLQKQPYFGAVIGRVANRIAKGTFKVDGKEYHLAINKEPNSLHGGVRGFDKVLWTPRVLSNGVQFSRISPDGEEGYPGELKVWVTYTLDGGELIVNYRAQASQATPVNLTNHSYFNLAGQASPNINDHEVTIEADTYLPVDETLIPTGEVAPVQGTAFDLRKPVELGKHLQDFHLNGFDHNFCLKGSNTPPSPGSSFTRATSWMAH

SEQ ID NO: 872120 - protein, 383 aa, Homo sapiens
MASVTRAVFGELPSGGGTVEKFQLQSDLLRVDIISWGCTITALEVKDRQGRASDVVLGFAELEGYLQKQPYFGAVIGRVANRIAKGTFKVDGKEYHLAINKEPNSLHGGVRGFDKVLWTPRVLSNGVQFSRISPDGEEGYPGELKVWVTYTLDGGELIVNYRAQASQATPVNLTNHSYFNLAGQASPNINDHEVTIEADTYLPVDETLIPTGEVAPVQGTAFDLRKPVELGKHLQDFHLNGFDHNFCLKGSKEKHFCARVHHAASGRVLEVYTTQPGVQFYTGNFLDGTLKGKNGAVYPKHSGFCLETQNRPTLGKKDRQALETGAIRVRREPCLSQHSEDDIAPGTEIVCDKAGAPSFLDNQSISDGFWLVILKKKKKSMLY

SEQ ID NO: 872121 - protein, 283 aa, Homo sapiens
MASVTRAVFGELPSGGGTVEKFQLQSDLLRVDIISWGCTITALEVKDRQGRASDVVLGFAELEGYLQKQPYFGAVIGRVANRIAKGTFKVDGKEYHLAINKEPNSLHGGVRGFDKVLWTPRVLSNGVQFSRISPDGEEGYPGELKVWVTYTLDGGELIVNYRAQASQATPVNLTNHSYFNLAGQASPNINDHEVTIEADTYLPVDETLIPTGEVAPVQGTAFDLRKPVELGKHLQDFHLNGFDHNFCLKGSKEKHFCARVHHAASGRVLEVPPGSSFLWLKEV

SEQ ID NO: 872122 - protein, 342 aa, Homo sapiens; identical to SEQ ID NO: 872118

SEQ ID NO: 872123 - protein, 283 aa, Homo sapiens; identical to SEQ ID NO: 872121

SEQ ID NO: 872124 - protein, 221 aa, Homo sapiens; identical to SEQ ID NO: 872117

SEQ ID NO: 872125 - protein, 270 aa, Homo sapiens; identical to SEQ ID NO: 872119

SEQ ID NO: 872126 - protein, 1038 aa, Homo sapiens
MTSSLQRPWRVPWLPWTILLVSTAAASQNQERLCAFKDPYQQDLGIGESRISHENGTILCSKGSTCYGLWEKSKGDINLVKQGCWSHIGDPQECHYEECVVTTTPPSIQNGTYRFCCCSTDLCNVNFTENFPPPDTTPLSPPHSFNRDETIIIALASVSVLAVLIVALCFGYRMLTGDRKQGLHSMNMMEAAASEPSLDLDNLKLLELIGRGRYGAVYKGSLDERPVAVKVFSFANRQNFINEKNIYRVPLMEHDNIARFIVGDERVTADGRMEYLLVMEYYPNGSLCKYLSLHTSDWVSSCRLAHSVTRGLAYLHTELPRGDHYKPAISHRDLNSRNVLVKNDGTCVISDFGLSMRLTGNRLVRPGEEDNAAISEVGTIRYMAPEVLEGAVNLRDCESALKQVDMYALGLIYWEIFMRCTDLFPGESVPEYQMAFQTEVGNHPTFEDMQVLVSREKQRPKFPEAWKENSLAVRSLKETIEDCWDQDAEARLTAQCAEERMAELMMIWERNKSVSPTVNPMSTAMQNERNLSHNRRVPKIGPYPDYSSSSYIEDSIHHTDSIVKNISSEHSMSSTPLTIGEKNRNSINYERQQAQARIPSPETSVTSLSTNTTTTNTTGLTPSTGMTTISEMPYPDETNLHTTNVAQSIGPTPVCLQLTEEDLETNKLDPKEVDKNLKESSDENLMEHSLKQFSGPDPLSSTSSSLLYPLIKLAVEATGQQDFTQTANGQACLIPDVLPTQIYPLPKQQNLPKRPTSLPLNTKNSTKEPRLKFGSKHKSNLKQVETGVAKMNTINAAEPHVVTVTMNGVAGRNHSVNSHAATTQYANGTVLSGQTTNIVTHRAQEMLQNQFIGEDTRLNINSSPDEHEPLLRREQQAGHDEGVLDRLVDRRERPLEGGRTNSNNNNSNPCSEQDVLAQGVPSTAADPGPSKPRRAQRPNSLDLSATNVLDGSSIQIGESTQDGKSGSGEKIKKRVKTPYSLKRWRPSTWVISTESLDCEVNNNGSNRAVHSKSSTAVYLAEGGTATTMVSKDIGMNCL

SEQ ID NO: 872127 - protein, 1327 aa, Homo sapiens
MEFLSEVNKWLRQNSVIAFIALNRPSLTHKITLTVYYNFRSNYSSEPIVSFTLFPSKELVTLSENDSSSHDLKHCEEKSFKWHAKPYEGRAAIKPTFFEQTETKLLSFQNCVIFLNPIFNNFSFCQFFTLSLICEQHLLFTLEYTFLVIKLLEIILFLKALCFFALLIISSKTTSACFFQIKHFLSNNGLFSKQKLFSINLQTDDFTFFYFFSIIRVLSKCYIVYSKIVPGIKRLRGKHKSPNFWFMFLSPEQYFLTHIPLSYHLAKDSLNFPIFCPKYCDLLVYKPSHLPCAVILQVRCYYTYHLFSWIAEHSSGFIELRISVSAQDFHVCVLLALFFIQPLESIFSLLARNFFHSYYSSINKLFLSCLVHFHLVLLPLNIFHMHFRIFFSNICRTTLNQNEIMFLLQFEALRINDQFEVYTDLFLPEELSYVLLYLYLGQLIVGCPTFFNIGKIMIKCFEKLICQIKITNSLLFHSSMFKTNNFLSPVFLSKLLKKYERWKVYIIFINFKLYIRLLKSVIYKQAKFILNDLMYANTHLINKCFLKLTFNCYHKVLYVEKWGPFEYKIIQLKILKFISLDGNVTLKDIIIGKVLILVPLTKSYLYTRIRSLKELDLNYSLDKNDLIVNFLKLSKCIIGKEKKPTVTSVGSYKKAHTEMLKYTYAISLKPQSNHMSIVINIPILQMRKLKLREAKKYAQGPHLVTDKAGISVYVCLSPHLFHPYHTAYMPYDRMCNGLTFFKKFRPGAVAYAYNPRTLGGRAGWIMRSDVQHQPGQDGETPSLLKIFFKNLLSVVVGACSPSYSGGYRQENLLNPRGGGCSELRRATALQPRRQSKTASKKKHKNSVTILWHNFHLYMSQTTYLNDFGKLGKYEICRHIYADCCLRNNYYILDKTQSCIFHHESSKSFHFTPNISYIAELMDKVNFTEKVKIALGTETFPKIDSIADLGELTKNFSLINPLNPSSKLLLLITLENLLIYRTNGVGYEEGYKDIMSFLLKFSIASLHVSTCSRKCALVLNVKIFKERKEHSSKCGLQWELSQNIGKYFYLNYFQIDFYSQVELVGCSCYTEISSLCTVPPESHLKWKNISMSFSFFHIYGHEYFIGDALTPRILRLYFHTTFYKVMLNLLPVMCRLLCNYSQIASYIAFIFPSNFFKVKIRTHMLIIYDQSFWKFVTLPHKPQETFSECNVSKCTVTGSLLSSIIRLHFNFVDYELCKLYPKLSCMIPSYNIFLDSSKSGKSLFELVTLKFVIKKEGFSTSFQINIKKRGNHRAFKCTFPLLSLNHLIVRLGAVAHACNPSTLGGRDGGSRGQGTEIILANTMKPHLY

SEQ ID NO: 872128 - protein, 108 aa, Homo sapiens
PAQLPVALVGPQLPEAKFPRPRSGLTVASPGSAPALRWHLQAPNGLRSVGSSRPSLGLPAASAGPNRPEVGLSRPSLGLPAASAGPSHPQIGLELGLEEQQVGLPGPN

SEQ ID NO: 872129 - protein, 639 aa, Homo sapiens
AKAALRVAAMSVSSGVQILTKPETVDRRRSAETTKEAGRPLEMAVSEPEASAAEWKQLDPAQSNLYNDVMLENYCNQASMGCQAPKPDMISKLEKGEAPWLGKGKRPSQGCPSKIARPKQKETDGKVQKDDDQLENIQKSQNKLLREVAVKKKTQAKKNGSDCGSLGKKNNLHKKHVPSKKRLLKFESCGKILKQNLDLPDHSRNCVKRKSDAAKEHKKSFNHSLSDTRKGKKQTGKKHEKLSSHSSSDKCNKTGKKHDKLCCHSSSHIKQDKIQTGEKHEKSPSLSSSTKHEKPQACVKPYECNQCGKVLSHKQGLIDHQRVHTGEKPYECNECGIAFSQKSHLVVHQRTHTGEKPYECIQCGKAHGHKHALTDHLRIHTGEKPYECAECGKTFRHSSNLIQHVRSHTGEKPYECKECGKSFRYNSSLTEHVRTHTGEIPYECNECGKAFKYSSSLTKHMRIHTGEKPFECNECGKAFSKKSHLIIHQRTHTKEKPYKCNECGKAFGHSSSLTYHMRTHTGESPFECNQCGKGFKQIEGLTQHQRVHTGEKPYECNECGKAFSQKSHLIVHQRTHTGEKPYECNECEKAFNAKSQLVIHQRSHTGEKPYECNECGKTFKQNASLTKHVKTHSEDKSHE

SEQ ID NO: 872130 - protein, 103 aa, Homo sapiens
QAHPWSSRGHVAWPSCGHPAGMWHVHPVVIPQARGVAIPWSSRRHVACSSVVILQAHGLAVLWLQLSLAWLQHPVLVFGVLLMASDVEHLFMCFIRLIISLLW

SEQ ID NO: 872131 - protein, 308 aa, Homo sapiens [sequence omitted]

SEQ ID NO: 872132 - protein, 179 aa, Homo sapiens
MRALVLLLSLFLLGGQAQHVSDWTYSEGALDEAHWPQHYPACGGQRQSPINLQRTKVRYNPSLKGLNMTGYETQAGEFPMVNNGHTDWQAELFLPSLSSPCGEGAKHKGQRQWLCSPSLDSWWEAIIDGGSLWATLAECGLRAEGPEEGRHMEEKSPASQGACSGSRLPISRGPCTFFL

SEQ ID NO: 872133 - protein, 216 aa, Homo sapiens
AASRWAEARGVRRGPGGSQESQAEAEPPPLPPGAFPAVSVKEEPEAEVRMVNGKPKKVRKPRTIYSSYQLAALQRRFQKAQYLALPERAELAAQLGLTQTQVKIWFQNRRSKFKKLYKNGEVPLEHSPNNSDSMACNSPPSPALWDTSSHSTPAPARSQLPPPLPYSASPSYLDDPTNSWYHAQNLSGPHLQQQPPQPATLHHASPGPPPNPGAVY

SEQ ID NO: 872134 - protein, 287 aa, Homo sapiens
MSGSFDRKLSSILTDISSSLSCHAGSKDSPTLPESSVTDLGYYSAPQHDYYSGQPYGQTVNPYTYHHQFNLNGLAGTGAYSPKSEYTYGASYRQYGAYREQPLPAQDPVSVKEEPEAEVRMVNGKPKKVRKPRTIYSSYQLAALQRRFQKAQYLALPERAELAAQLGLTQTQVKIWFQNRRSKFKKLYKNGEVPLEHSPNNSDSMACNSPPSPALWDTSSHSTPAPARSQLPPPLPYSASPSYLDDPTNSWYHAQNLSGPHLQQQPPQPATLHHASPGPPPNPGAVY

SEQ ID NO: 872135 - protein, 101 aa, Homo sapiens
RAMVLERGKQIIGSCDITEWTPLTAAAASASHPAPCLSRAPAQPWGCVLSTHLACTLDKGPQDQAEGASVLATQESSRSTGKRNSLSPSLAPSSRDPSASR

SEQ ID NO: 872136 - protein, 127 aa, Homo sapiens
NSGCVTDLRADGPGPWGAARGTASPAAPRSKTAVKSAAVSRAAVAAAAPAVAVGALAAGALAAGAAAADRLAVDLAAEAVEAAEAAGVAAVDPVAVGPVAAAPGAVGLCAASPHLYATQNEDLSLHH

SEQ ID NO: 872137 - protein, 306 aa, Homo sapiens
MKGTKDLTSQQKESNVKTFCSKNILAILGFSSIIAVIALLAVGLTQNKALPENVKYGIVLDAGSSHTSLYIYKWPAEKENDTGVVHQVEECRVKGPGISKFVQKVNEIGIYLTDCMERAREVIPRSQHQETPVYLGATAGMRLLRMESEELADRVLDVVERSLSNYPFDFQGARIITGQEEGAYGWITINYLLGKFSQKTRWFSIVPYETNNQETFGALDLGGASTQVTFVPQNQTIESPDNALQFRLYGKDYNVYTHSFLCYGKDQALWQKLAKDIQASITQSRPAPFTSAPPAPTSCCFLFQIQ

SEQ ID NO: 872138 - protein, 510 aa, Homo sapiens
MEDTKESNVKTFCSKNILAILGFSSIIAVIALLAVGLTQNKALPENVKYGIVLDAGSSHTSLYIYKWPAEKENDTGVVHQVEECRVKGPGISKFVQKVNEIGIYLTDCMERAREVIPRSQHQETPVYLGATAGMRLLRMESEELADRVLDVVERSLSNYPFDFQGARIITGQEEGAYGWITINYLLGKFSQKTRWFSIVPYETNNQETFGALDLGGASTQVTFVPQNQTIESPDNALQFRLYGKDYNVYTHSFLCYGKDQALWQKLAKDIQVASNEILRDPCFHPGYKKVVNVSDLYKTPCTKRFEMTLPFQQFEIQGIGNYQQCHQSILELFNTSYCPYSQCAFNGIFLPPLQGDFGAFSAFYFVMKFLNLTSEKVSQEKVTEMMKKFCAQPWEEIKTSYAGVKEKYLSEYCFSGTYILSLLLQGYHFTADSWEHIHFIGKIQGSDAGWTLGYMLNLTNMIPAEQPLSTPLSHSTYVFLMVLFSLVLFTVAIIGLLIFHKPSYFWKDMV

SEQ ID NO: 872139 - protein, 510 aa, Homo sapiens; identical to SEQ ID NO: 872138

SEQ ID NO: 872140 - protein, 510 aa, Homo sapiens; identical to SEQ ID NO: 872138

SEQ ID NO: 872141 - protein, 510 aa, Homo sapiens; identical to SEQ ID NO: 872138

SEQ ID NO: 872142 - protein, 517 aa, Homo sapiens
MKGTKDLTSQQKESNVKTFCSKNILAILGFSSIIAVIALLAVGLTQNKALPENVKYGIVLDAGSSHTSLYIYKWPAEKENDTGVVHQVEECRVKGPGISKFVQKVNEIGIYLTDCMERAREVIPRSQHQETPVYLGATAGMRLLRMESEELADRVLDVVERSLSNYPFDFQGARIITGQEEGAYGWITINYLLGKFSQKTRWFSIVPYETNNQETFGALDLGGASTQVTFVPQNQTIESPDNALQFRLYGKDYNVYTHSFLCYGKDQALWQKLAKDIQVASNEILRDPCFHPGYKKVVNVSDLYKTPCTKRFEMTLPFQQFEIQGIGNYQQCHQSILELFNTSYCPYSQCAFNGIFLPPLQGDFGAFSAFYFVMKFLNLTSEKVSQEKVTEMMKKFCAQPWEEIKTSYAGVKEKYLSEYCFSGTYILSLLLQGYHFTADSWEHIHFIGKIQGSDAGWTLGYMLNLTNMIPAEQPLSTPLSHSTYVFLMVLFSLVLFTVAIIGLLIFHKPSYFWKDMV

SEQ ID NO: 872143 - protein, 513 aa, Homo sapiens
FFLLLLVLESNVKTFCSKNILAILGFSSIIAVIALLAVGLTQNKALPENVKYGIVLDAGSSHTSLYIYKWPAEKENDTGVVHQVEECRVKGPGISKFVQKVNEIGIYLTDCMERAREVIPRSQHQETPVYLGATAGMRLLRMESEELADRVLDVVERSLSNYPFDFQGARIITGQEEGAYGWITINYLLGKFSQKTRWFSIVPYETNNQETFGALDLGGASTQVTFVPQNQTIESPDNALQFRLYGKDYNVYTHSFLCYGKDQALWQKLAKDIQVASNEILRDPCFHPGYKKVVNVSDLYKTPCTKRFEMTLPFQQFEIQGIGNYQQCHQSILELFNTSYCPYSQCAFNGIFLPPLQGDFGAFSAFYFVMKFLNLTSEKVSQEKVTEMMKKFCAQPWEEIKTSYAGVKEKYLSEYCFSGTYILSLLLQGYHFTADSWEHIHFIGKIQGSDAGWTLGYMLNLTNMIPAEQPLSTPLSHSTYVFLMVLFSLVLFTVAIIGLLIFHKPSYFWKDMV

SEQ ID NO: 872144 - protein, 372 aa, Homo sapiens
MESEELADRVLDVVERSLSNYPFDFQGARIITGQEEGAYGWITINYLLGKFSQKTRWFSIVPYETNNQETFGALDLGGASTQVTFVPQNQTIESPDNALQFRLYGKDYNVYTHSFLCYGKDQALWQKLAKDIQVASNEILRDPCFHPGYKKVVNVSDLYKTPCTKRFEMTLPFQQFEIQGIGNYQQCHQSILELFNTSYCPYSQCAFNGIFLPPLQGDFGAFSAFYFVMKFLNLTSEKVSQEKVTEMMKKFCAQPWEEIKTSYAGVKEKYLSEYCFSGTYILSLLLQGYHFTADSWEHIHFIGKIQGSDAGWTLGYMLNLTNMIPAEQPLSTPLSHSTYVFLMVLFSLVLFTVAIIGLLIFHKPSYFWKDMV

SEQ ID NO: 872145 - protein, 190 aa, Homo sapiens
MKKTGFEVPSETGPANLAPPTSPRVCYISVSLRTSLTETDHSKQRLGGGKTRKEEENKSCYLWKIQRYGIVLDAGSSHTSLYIYKWPAEKENDTGVVHQVEECRVKGPGISKFVQKVNEIGIYLTDCMERAREVIPRSQHQETPVYLGATAGMRLLRVPGSLLAKRKVPMAGLLSTICWANSVRKQGGSA

SEQ ID NO: 872146 - protein, 510 aa, Homo sapiens; identical to SEQ ID NO: 872138

SEQ ID NO: 872147 - protein, 72 aa, Homo sapiens
AVGVRRTERFRAHFAAQRTEPGLRCKETPEAGTRIANFFSPRIPTAFCYKQQRMNEDRKLEPRSGILLMTNT

SEQ ID NO: 872148 - protein, 517 aa, Homo sapiens; identical to SEQ ID NO: 872142

SEQ ID NO: 872149 - protein, 72 aa, Homo sapiens; identical to SEQ ID NO: 872147

SEQ ID NO: 872150 - protein, 510 aa, Homo sapiens; identical to SEQ ID NO: 872138

SEQ ID NO: 872151 - protein, 510 aa, Homo sapiens; identical to SEQ ID NO: 872138

SEQ ID NO: 872152 - protein, 469 aa, Homo sapiens
MEDTKESNVKTFCSKNILAILGFSSIIAVIALLAVGLTQNKALPENVKYGIVLDAGSSHTSLYIYKWPAEKENDTGVVHQVEECRVKGPGISKFVQKVNEIGIYLTDCMERAREVIPRSQHQETPVYLGATAGMRLLRMESEELADRVLDVVERSLSNYPFDFQGARIITGQEEGAYGWITINYLLGKFSQKTRWFSIVPYETNNQETFGALDLGGASTQVTFVPQNQTIESPDNALQFRLYGKDYNVYTHSFLCYGKDQALWQKLAKDIQQFEIQGIGNYQQCHQSILELFNTSYCPYSQCAFNGIFLPPLQGDFGAFSAFYFVMKFLNLTSEKVSQEKVTEMMKKFCAQPWEEIKTSYAGVKEKYLSEYCFSGTYILSLLLQGYHFTADSWEHIHFIGKIQGSDAGWTLGYMLNLTNMIPAEQPLSTPLSHSTYVFLMVLFSLVLFTVAIIGLLIFHKPSYFWKDMV

SEQ ID NO: 872153 - protein, 507 aa, Homo sapiens
MQESNVKTFCSKNILAILGFSSIIAVIALLAVGLTQNKALPENVKYGIVLDAGSSHTSLYIYKWPAEKENDTGVVHQVEECRVKGPGISKFVQKVNEIGIYLTDCMERAREVIPRSQHQETPVYLGATAGMRLLRMESEELADRVLDVVERSLSNYPFDFQGARIITGQEEGAYGWITINYLLGKFSQKTRWFSIVPYETNNQETFGALDLGGASTQVTFVPQNQTIESPDNALQFRLYGKDYNVYTHSFLCYGKDQALWQKLAKDIQVASNEILRDPCFHPGYKKVVNVSDLYKTPCTKRFEMTLPFQQFEIQGIGNYQQCHQSILELFNTSYCPYSQCAFNGIFLPPLQGDFGAFSAFYFVMKFLNLTSEKVSQEKVTEMMKKFCAQPWEEIKTSYAGVKEKYLSEYCFSGTYILSLLLQGYHFTADSWEHIHFIGKIQGSDAGWTLGYMLNLTNMIPAEQPLSTPLSHSTYVFLMVLFSLVLFTVAIIGLLIFHKPSYFWKDMV

SEQ ID NO: 872154 - protein, 402 aa, Homo sapiens
MERAREVIPRSQHQETPVYLGATAGMRLLRMESEELADRVLDVVERSLSNYPFDFQGARIITGQEEGAYGWITINYLLGKFSQKTRWFSIVPYETNNQETFGALDLGGASTQVTFVPQNQTIESPDNALQFRLYGKDYNVYTHSFLCYGKDQALWQKLAKDIQVASNEILRDPCFHPGYKKVVNVSDLYKTPCTKRFEMTLPFQQFEIQGIGNYQQCHQSILELFNTSYCPYSQCAFNGIFLPPLQGDFGAFSAFYFVMKFLNLTSEKVSQEKVTEMMKKFCAQPWEEIKTSYAGVKEKYLSEYCFSGTYILSLLLQGYHFTADSWEHIHFIGKIQGSDAGWTLGYMLNLTNMIPAEQPLSTPLSHSTYVFLMVLFSLVLFTVAIIGLLIFHKPSYFWKDMV

SEQ ID NO: 872155 - protein, 144 aa, Homo sapiens [sequence omitted]

SEQ ID NO: 872156 - protein, 276 aa, Homo sapiens
MEDTKESNVKTFCSKNILAILGFSSIIAVIALLAVGLTQNKALPENVKYGIVLDAGSSHTSLYIYKWPAEKENDTGVVHQVEECRVKGPGISKFVQKVNEIGIYLTDCMERAREVIPRSQHQETPVYLGATAGMRLLRMESEELADRVLDVVERSLSNYPFDFQGARIITGQEEGAYGWITINYLLGKFSQKTRWFSIVPYETNNQETFGALDLGGASTQVTFVPQNQTIESPDNALQFRLYGKDYNVYTHSFLCYGKDQALWQKLAKDIQMPSAF

SEQ ID NO: 872157 - protein, 164 aa, Homo sapiens
FGCWSQGYRPTVPASAGLRGGEQSRREAQAVWTSLLPNLCWPLILCHPWLRGVSPERDLRGKSGLGSEKSVTLRSAPHLCLNRAGLSLTPPLAAQLGFPPEHHASSSTGAACFPRLLWNWPEVPDAVHCAAALRALQPERQFTGFWENSAASPARGQGHSFAGG

SEQ ID NO: 872158 - protein, 113 aa, Homo sapiens
QGQLSQVRVGMTHGLLELGWWSWKGRPMPLGEGLCAEGCPQRPGYQEHCSRQGAFLPDLAGRKTWSAFPPCRAAPHGPGFLESLTALCGRLVLILRTPLLAVNFRARDMRPLF

SEQ ID NO: 872159 - protein, 169 aa, Homo sapiens
FGCWSQGYRPTVPASAGLRGGEQSRREAQAVWTSLLPNLCWPLILCHPWLRGVSPERDLRGKSGLGSEKSVTLRSAPHLCLNRAGLSLTPPLAAQLGFPPEHHASSSTGAACFPRLLWNWPEVPDAVHCAAALRALQPERQFTGFWENSAASPARGQGLHPMDLGSWSL

SEQ ID NO: 872160 - protein, 164 aa, Homo sapiens; identical to SEQ ID NO: 872157

SEQ ID NO: 872161 - protein, 80 aa, Homo sapiens
LGPNTDSPEPGPPSVGPPSLPHPDPGALQPQHGHLRLNQSDPGVFTLTREFPGPNSAPDPAPPSSHSRPLGSTIKSAWFQ

SEQ ID NO: 872162 - protein, 126 aa, Homo sapiens
RTRGSTHASTLTDSPIGVTGTLRLLPGLSLTMLSRVVLSAAATAAPSLKNAAFLGPGVLQATRTFHTGQPHLVPVPPLPEYGGKVRYGLIPEEFFQFLYPKTGVTGPYVLGTGLICVRFIQRNICD

SEQ ID NO: 872163 - protein, 83 aa, Homo sapiens
ALGRGKGAPRPGISAHRTGTAQPPTAVPCRRAHLGEDSTPGPPGALGGVGFPSASPRFQLQPRLKLDAGRRLRSGSKPHVVHL

SEQ ID NO: 872164 - protein, 83 aa, Homo sapiens; identical to SEQ ID NO: 872163

SEQ ID NO: 872165 - protein, 83 aa, Homo sapiens; identical to SEQ ID NO: 872163

SEQ ID NO: 872166 - protein, 83 aa, Homo sapiens; identical to SEQ ID NO: 872163

SEQ ID NO: 872167 - protein, 83 aa, Homo sapiens; identical to SEQ ID NO: 872163

SEQ ID NO: 872168 - protein, 106 aa, Homo sapiens
  misc_feature (4)..(4): Xaa can be any naturally occurring amino acid
MRIXYLSLCQAHLLGPPRRLGYDIADRLSKDARGYIGDAQTTGTFHTGQPHLVPVPPLPEYGGKVRYGLIPEEFFQFLYPKTGVTGPYVLGTGLICVRFIQRNICD

SEQ ID NO: 872169 - protein, 83 aa, Homo sapiens; identical to SEQ ID NO: 872163

SEQ ID NO: 872170 - protein, 90 aa, Homo sapiens
MQARTKRGRGNRTSQLAIRSGPEIDSGTRQQGVASPSESRTGAEEPTAEDGAGQDRDTTIGTRARHSGVETKQAADRQQPTTQTKTRPDP

SEQ ID NO: 872171 - protein, 110 aa, Homo sapiens
MLSRVVLSAAATAAPSLKNAAFLGPGVLQATRTFHTGQPHLVPVPPLPEYGGKVRYGLIPEEFFSVLGKRNWKNSSGSVQFLYPKTGVTGPYVLGTGLICVRFIQRNICD

SEQ ID NO: 872172 - protein, 83 aa, Homo sapiens; identical to SEQ ID NO: 872163

SEQ ID NO: 872173 - protein, 83 aa, Homo sapiens; identical to SEQ ID NO: 872163

SEQ ID NO: 872174 - protein, 116 aa, Homo sapiens
GRVGRPTRRRTLRLLPGLSLTMLSRVVLSAAATAAPSLKNAAFLGPGVLQATRTFHTGQPHLVPVPPLPEYGGKVRYGLIPEEFFQFLYPKTGVTGPYVLGTGLICVRFIQRNICD

SEQ ID NO: 872175 - protein, 240 aa, Homo sapiens
TAQNSVPAGSGSELRNAGQGWGQLGDATQDSNWTPAGDSAPAANPTWCTSEPPPLSRGNRNSTSRENCFYGSILLSGCRPHAIGSQRYLTLLAIIFFKNLPRKVEGRVQNFHLARLVSGHLGSALTDSPIGVTGTLRLLPGLSLTMLSRVVLSAAATAAPSLKNAAFLGPGVLQATRTFHTGQPHLVPVPPLPEYGGKVRYGLIPEEFFQFLYPKTGVTGPYVLGTGLICVRFIQRNICD

SEQ ID NO: 872176 - protein, 83 aa, Homo sapiens; identical to SEQ ID NO: 872163

SEQ ID NO: 872177 - protein, 83 aa, Homo sapiens; identical to SEQ ID NO: 872163

SEQ ID NO: 872178 - protein, 83 aa, Homo sapiens; identical to SEQ ID NO: 872163

SEQ ID NO: 872179 - protein, 87 aa, Homo sapiens
AVSDASIVVLPDLKMANRRDDNYSCSELDNLAVGLIISEDPCFCTECRNLTHRVQGYCRQQGPFIQGSHTLSLYHLFLNTEEKFVMD

SEQ ID NO: 872180 - protein, 83 aa, Homo sapiens; identical to SEQ ID NO: 872163

SEQ ID NO: 872181 - protein, 83 aa, Homo sapiens; identical to SEQ ID NO: 872163

SEQ ID NO: 872182 - protein, 171 aa, Homo sapiens
HNVPVITGSKDLQNVNIIPCILFGPVTSQLPRIFTRIGEDYDERVLPSITTEILKSVVARFDAGELITQRELVSRQVSDDLMERAATFGLILDDVSLTHLTFRKEFTEAAGSQTGGSAGCREGQNSLATAGDGLMELCKLEAAEDITYQLSRSWNITNLPAGQSVLLQLPQ

SEQ ID NO: 872183 - protein, 162 aa, Homo sapiens
DPVTRAISDYTQTLSKRPDIPTFESLTFKNRTAGLIDTSWSAIQIGIYAKHLEHWLRHFPIRQMLFVSGERLISDPAGELGRVQDFLGLKRIITDKHFYFNKTKGFPCLKKAEGSSRPHCLGKTKGRTHPEIDREVVRRLREFYRPFNLKFYQMTGHDFGWD

SEQ ID NO: 872184 - protein, 241 aa, Homo sapiens
MNRCWALFLSLCCYLRLVSAEGDPIPEELYEMLSDHSIRSFDDLQRLLHGDPGEEDGAELDLNMTRSHSGGELESLARGRRSLGSLTIAEPAMIAECKTRTEVFEISRRLIDRTNANFLVWPPCVEVQRCSGCCNNRNVQCRPTQVQLRPVQVRKIEIVRKKPIFKKATVTLEDHLACKCETVAAARPVTRSPGGSQEQRAKTPQTRVTIRTVRVRRPPKGKHRKFKHTHDKTALKETLGA

SEQ ID NO: 872185 - protein, 108 aa, Homo sapiens
MNPPEVCLLASCVTINLSALAGCADSLRRVPLTLGASGVISHTGVTYTHTHIHAHTCVHIHAGLQLGGGLCLAGRRDTQATLLVLVLAQLLTRGLVRVSGSDERWVSA

SEQ ID NO: 872186 - protein, 241 aa, Homo sapiens; identical to SEQ ID NO: 872184

SEQ ID NO: 872187 - protein, 256 aa, Homo sapiens
PQLSYGYDEKSTGGISVPGPMGPSGPRGLPGPPGAPGDPIPEELYEMLSDHSIRSFDDLQRLLHGDPGEEDGAELDLNMTRSHSGGELESLARGRRSLGSLTIAEPAMIAECKTRTEVFEISRRLIDRTNANFLVWPPCVEVQRCSGCCNNRNVQCRPTQVQLRPVQVRKIEIVRKKPIFKKATVTLEDHLACKCETVAAARPVTRSPGGSQEQRAKTPQTRVTIRTVRVRRPPKGKHRKFKHTHDKTALKETLGA

SEQ ID NO: 872188 - protein, 55 aa, Homo sapiens
MIAECKTRTEVFEISRRLIDRTNANFLVWPPCVEVQRCSGCCNNRNVQCRPTQVQ

SEQ ID NO: 872189 - protein, 95 aa, Homo sapiens
MNRCWALFLSLCCYLRLVSAEGDPIPEELYEMLSDHSIRSFDDLQRLLHGDPGEEDRAEMYLNMIPHQPLDSSCRARLDYREVTWVATDQQMTRR

SEQ ID NO: 872190 - protein, 226 aa, Homo sapiens
MFIMGLGDPIPEELYEMLSDHSIRSFDDLQRLLHGDPGEEDGAELDLNMTRSHSGGELESLARGRRSLGSLTIAEPAMIAECKTRTEVFEISRRLIDRTNANFLVWPPCVEVQRCSGCCNNRNVQCRPTQVQLRPVQVRKIEIVRKKPIFKKATVTLEDHLACKCETVAAARPVTRSPGGSQEQRAKTPQTRVTIRTVRVRRPPKGKHRKFKHTHDKTALKETLGA

SEQ ID NO: 872191 - protein, 266 aa, Homo sapiens
KGETGEQGDRGIKGHRGFSGLQGPPGPPGSPGEQGPSGASGPAGPRGDPIPEELYEMLSDHSIRSFDDLQRLLHGDPGEEDGAELDLNMTRSHSGGELESLARGRRSLGSLTIAEPAMIAECKTRTEVFEISRRLIDRTNANFLVWPPCVEVQRCSGCCNNRNVQCRPTQVQLRPVQVRKIEIVRKKPIFKKATVTLEDHLACKCETVAAARPVTRSPGGSQEQRAKTPQTRVTIRTVRVRRPPKGKHRKFKHTHDKTALKETLGA

SEQ ID NO: 872192 - protein, 262 aa, Homo sapiens
GPKGDRGDAGPKGADGSPGKDGVRGLTGPIGPPGPAGAPGDKGDPIPEELYEMLSDHSIRSFDDLQRLLHGDPGEEDGAELDLNMTRSHSGGELESLARGRRSLGSLTIAEPAMIAECKTRTEVFEISRRLIDRTNANFLVWPPCVEVQRCSGCCNNRNVQCRPTQVQLRPVQVRKIEIVRKKPIFKKATVTLEDHLACKCETVAAARPVTRSPGGSQEQRAKTPQTRVTIRTVRVRRPPKGKHRKFKHTHDKTALKETLGA

SEQ ID NO: 872193 - protein, 244 aa, Homo sapiens
MTEPGASPEDPWVKVEYAYSDNSLDPGLFVESTRKGSVVSRANSIGSTSASSVPNTDDEDSDYHQEAYKESYKDRRRRAHTQAEQKRRDAIKRGYDDLQTIVPTCQQQDFSIGSQKLSKAIVLQKTIDYIQFLHKEKKKQEEEVSTLRKDVTALKIMKVNYEQIVKAHQDNPHEGEDQVSDQVKFNVFQGIMDSLFQSFNASISVASFQELSACVFSWIEEHCKPQTLREIVIGVLHQLKNQLY

SEQ ID NO: 872194 - protein, 298 aa, Homo sapiens
MTEPGASPEDPWVKASPVGAHAGEGRAGRARARRGAGRRGASLLSPKSPTLSVPRGCREDSSHPACAKVEYAYSDNSLDPGLFVESTRKGSVVSRANSIGSTSASSVPNTDDEDSDYHQEAYKESYKDRRRRAHTQAEQKRRDAIKRGYDDLQTIVPTCQQQDFSIGSQKLSKAIVLQKTIDYIQFLHKEKKKQEEEVSTLRKDVTALKIMKVNYEQIVKAHQDNPHEGEDQVSDQVKFNVFQGIMDSLFQSFNASISVASFQELSACVFSWIEEHCKPQTLREIVIGVLHQLKNQLY

SEQ ID NO: 872195 - protein, 111 aa, Homo sapiens
MTEPGASPEDPWVKVEYAYSDNSLDPGLFVESTRKGSVVSRANSIGSTSASSVPNTDDEDSDYHQEAYKESYKDRRRRAHTQAEQKRRDAIKGSYMTQTSSTAAAALIGQS

SEQ ID NO: 872196 - protein, 244 aa, Homo sapiens; identical to SEQ ID NO: 872193

SEQ ID NO: 872197 - protein, 244 aa, Homo sapiens; identical to SEQ ID NO: 872193

SEQ ID NO: 872198 - protein, 389 aa, Homo sapiens
MTEPGASPEDPWVKASPVGAHAGEGRAGRARARRGAGRRGASLLSPKSPTLSVPRGCREDSSHPACAKVEYAYSDNSLDPGLFVESTRKGSVVSRANSIGSTSASSVPNTGGSNIPPDLRGLRYVIIVIPFLDREAPAIHTGVLEPKYQTQGLTIFHLIWNIRWFCPSAFSGHQVLPSWGKVGYWTPLGPKMTFPAPISERNDEDSDYHQEAYKESYKDRRRRAHTQAEQKRRDAIKRGYDDLQTIVPTCQQQDFSIGSQKLSKAIVLQKTIDYIQFLHKEKKKQEEEVSTLRKDVTALKIMKVNYEQIVKAHQDNPHEGEDQVSDQVKFNVFQGIMDSLFQSFNASISVASFQELSACVFSWIEEHCKPQTLREIVIGVLHQLKNQLY

SEQ ID NO: 872199 - protein, 333 aa, Homo sapiens
PPASSPQGARPLARFRSGGYKMTEPGASPEDPWVKVEYAYSDNSLDPGLFVESTRKGSVVSRANSIGSTSASSVPNTDDEDSDYHQEAYKESYKDRRRRAHTQAEQKRRDAIKRGYDDLQTIVPTCQQQDFSIGSQKLSKAIVLQKSMARESTGGDGAKRGCEEASASYPPMARPWCGDCHGIVGVWGKGNKVSLIFLVENTSVPVLFFLHPTLAIDYIQFLHKEKKKQEEEVSTLRKDVTALKIMKVNYEQIVKAHQDNPHEGEDQVSDQVKFNVFQGIMDSLFQSFNASISVASFQELSACVFSWIEEHCKPQTLREIVIGVLHQLKNQLY

SEQ ID NO: 872200 - protein, 159 aa, Homo sapiens
MTEPGASPEDPWVKVEYAYSDNSLDPGLFVESTRKGSVVSRANSIGSTSASSVPNTDDEDSDYHQEAYKESYKDRRRRAHTQAEQKRRDAIKRGYDDLQTIVPTCQQQDFSIGSQKLSKAIVLQKTIDYIQFLHKEKKKQEEEVSTLRKDVTALKIMKV

SEQ ID NO: 872201 - protein, 113 aa, Homo sapiens [sequence omitted]

SEQ ID NO: 872202 - protein, 244 aa, Homo sapiens; identical to SEQ ID NO: 872193

SEQ ID NO: 872203 - protein, 244 aa, Homo sapiens; identical to SEQ ID NO: 872193

SEQ ID NO: 872204 - protein, 214 aa, Homo sapiens
MTEPGASPEDPWVKVEYAYSDNSLDPDDEDSDYHQEAYKESYKDRRRRAHTQAEQKRRDAIKRGYDDLQTIVPTCQQQDFSIGSQKLSKAIVLQKTIDYIQFLHKEKKKQEEEVSTLRKDVTALKIMKVNYEQIVKAHQDNPHEGEDQVSDQVKFNVFQGIMDSLFQSFNASISVASFQELSACVFSWIEEHCKPQTLREIVIGVLHQLKNQLY

SEQ ID NO: 872205 - protein, 244 aa, Homo sapiens; identical to SEQ ID NO: 872193

SEQ ID NO: 872206 - protein, 268 aa, Homo sapiens
MTEPGASPEDPWVKASPVGAHAGEGRAGRARARRGAGRRGASLLSPKSPTLSVPRGCREDSSHPACAKVEYAYSDNSLDPDDEDSDYHQEAYKESYKDRRRRAHTQAEQKRRDAIKRGYDDLQTIVPTCQQQDFSIGSQKLSKAIVLQKTIDYIQFLHKEKKKQEEEVSTLRKDVTALKIMKVNYEQIVKAHQDNPHEGEDQVSDQVKFNVFQGIMDSLFQSFNASISVASFQELSACVFSWIEEHCKPQTLREIVIGVLHQLKNQLY

SEQ ID NO: 872207 - protein, 249 aa, Homo sapiens
FPCSVPQVEYAYSDNSLDPGLFVESTRKGSVVSRANSIGSTSASSVPNTDDEDSDYHQEAYKESYKDRRRRAHTQAEQKRRDAIKGYKNPFPLLFPQRGYDDLQTIVPTCQQQDFSIGSQKLSKAIVLQKTIDYIQFLHKEKKKQEEEVSTLRKDVTALKIMKVNYEQIVKAHQDNPHEGEDQVSDQVKFNVFQGIMDSLFQSFNASISVASFQELSACVFSWIEEHCKPQTLREIVIGVLHQLKNQLY

SEQ ID NO: 872208 - protein, 256 aa, Homo sapiens
MMRTVITTRRPTRSPTKTGGGAHTLRLSRRGGTPSREAMMTFRPSSPLASSRTSPLAPKSSAKPSFYKRVWLGKALEGMEPSGGCEEASASYPPMARPWCGDCHGIVGVWGKGNKVSLIFLVENTSVPVLFFLHPTLAIDYIQFLHKEKKKQEEEVSTLRKDVTALKIMKVNYEQIVKAHQDNPHEGEDQVSDQVKFNVFQGIMDSLFQSFNASISVASFQELSACVFSWIEEHCKPQTLREIVIGVLHQLKNQLY

SEQ ID NO: 872209 - protein, 82 aa, Homo sapiens
PLKIKWGWEKPNTKKKPTDQVKFNVFQGIMDSLFQSFNASISVASFQELSACVFSWIEEHCKPQTLREIVIGVLHQLKNQLY

SEQ ID NO: 872210 - protein, 159 aa, Homo sapiens
MTEPGASPEDPWVKVEYAYSDNSLDPGLFVESTRKGSVVSRANSIGSTSASSVPNTDDEDSDYHQEAYKESYKDRRRRAHTQAEQKRRDAIKRGYDDLQTIVPTCQQQDSCPLSPLFKPQISAHDLHRFGNCFPLFWSLGQHFWPKFGQHLAQVWAFWQ

SEQ ID NO: 872211 - protein, 127 aa, Homo sapiens
AAAASTGRRRGRRRVRACGRIHHNMANLFIRKMVNPLLYLSRHTVKPRALSTFLFGSIRGAAPVAVEPGAAVRSLLSPGLLPHLLPALGFKNKTVLKKRCKDCYLVKRRGRWYVYCKTHPRHKQRQM

SEQ ID NO: 872212 - protein, 169 aa, Homo sapiens
MRPKFKLPPSQVSGSSTSQGFAHSPTLAAGGKGKEATVHCPLFSWHTWLIKAVFKLRSRLQLIHHNMANLFIRKMVNPLLYLSRHTVKPRALSTFLFGSIRGAAPVAVEPGAAVRSLLSPGLLPHLLPALGFKNKTVLKKRCKDCYLVKRRGRWYVYCKTHPRHKQRQM

SEQ ID NO: 872213 - protein, 127 aa, Homo sapiens; identical to SEQ ID NO: 872211

SEQ ID NO: 872214 - protein, 115 aa, Homo sapiens
AAAASTGRRRGRRRVRACGRIHHNMANLFIRKMVNPLLYLSRHTVKPRALSTFLFGSIRGAAPVAVEPGAAVRSLLSPGLLPHLLPALGFKNKTVLKKRCKDCYLVKRRGRWYVY

SEQ ID NO: 872215 - protein, 127 aa, Homo sapiens; identical to SEQ ID NO: 872211

SEQ ID NO: 872216 - protein, 103 aa, Homo sapiens [sequence omitted]

SEQ ID NO: 872217 - protein, 162 aa, Homo sapiens
MALICCFFPSEEKEGDATKDSLDDLFPNEEEEDPSNGLSRGQGATAAQQGGYEIPARLRTLHNLVIQYAAQGRYEVAVPLCKQALEDLERTSGRGHPDVATMLNILALVYRDQNKYKEAAHLLNDALSIRESTLGPDHPAVSIPCPPHPTPRTPHHCCFGLS

SEQ ID NO: 872218 - protein, 337 aa, Homo sapiens
HEPARAAATPADCRPGKVPQARMSGLVLGQRDEPAGHRLSQEEILGSTRLVSQGLEALRSEHQAVLQSLSQTIECLQQGGHEEGLVHEKARQLRRSMENIELGLSEAQVMLALASHLSTVESEKQKLRAQVRRLCQENQWLRDELAGTQQRLQRSEQAVAQLEEEKKHLEFLGQLRQYDEDGHTSEEKEGDATKDSLDDLFPNEEEEDPSNGLSRGQGATAAQQGGYEIPARLRTLHNLVIQYAAQGRYEVAVPLCKQALEDLERTSGRGHPDVATMLNILALVYRDQNKYKEAAHLLNDALSIRESTLGPDHPAVSIPCPPHPTPRTPHHCCFGLS

SEQ ID NO: 872219 - protein, 619 aa, Homo sapiens
MSGLVLGQRDEPAGHRLSQEEILGSTRLVSQGLEALRSEHQAVLQSLSQTIECLQQGGHEEGLVHEKARQLRRSMENIELGLSEAQVMLALASHLSTVESEKQKLRAQVRRLCQENQWLRDELAGTQQRLQRSEQAVAQLEEEKKHLEFLGQLRQYDEDGHTSEEKEGDATKDSLDDLFPNEEEEDPSNGLSRGQGATAAQQGGYEIPARLRTLHNLVIQYAAQGRYEVAVPLCKQALEDLERTSGRGHPDVATMLNILALVYRDQNKYKEAAHLLNDALSIRESTLGPDHPAVAATLNNLAVLYGKRGKYKEAEPLCQRALEIREKVLGTNHPDVAKQLNNLALLCQNQGKYEAVERYYQRALAIYEGQLGPDNPNVARTKNNLASCYLKQGKYAEAETLYKEILTRAHVQEFGSVDDDHKPIWMHAEEREEMSKSRHHEGGTPYAEYGGWYKACKVSSPTVNTTLRNLGALYRRQGKLEAAETLEECALRSRRQGTDPISQTKVAELLGESDGRRTSQEGPGDSVKFEGGEDASVAVEWSGDGSGTLQRSGSLGKIRDVLRRSSELLVRKLQGTEPRPSSSNMKRAASLNYLNQPSAAPLQVSRGLSASTMDLSSSS

SEQ ID NO: 872220 - protein, 532 aa, Homo sapiens
MLALASHLSTVESEKQKLRAQVRRLCQENQWLRDELAGTQQRLQRSEQAVAQLEEEKKHLEFLGQLRQYDEDGHTSEEKEGDATKDSLDDLFPNEEEEDPSNGLSRGQGATAAQQGGYEIPARLRTLHNLVIQYAAQGRYEVAVPLCKQALEDLERTSGRGHPDVATMLNILALVYRDQNKYKEAAHLLNDALSIRESTLGPDHPAVAATLNNLAVLYGKRGKYKEAEPLCQRALEIREKVLGTNHPDVAKQLNNLALLCQNQGKYEAVERYYQRALAIYEGQLGPDNPNVARTKNNLASCYLKQGKYAEAETLYKEILTRAHVQEFGSVDDDHKPIWMHAEEREEMSKSRHHEGGTPYAEYGGWYKACKVSSPTVNTTLRNLGALYRRQGKLEAAETLEECALRSRRQGTDPISQTKVAELLGESDGRRTSQEGPGDSVKFEGGEDASVAVEWSGDGSGTLQRSGSLGKIRDVLRRSSELLVRKLQGTEPRPSSSNMKRAASLNYLNQPSAAPLQVSRGLSASTMDLSSSS

SEQ ID NO: 872221 - protein, 466 aa, Homo sapiens
MALICCFFPSEEKEGDATKDSLDDLFPNEEEEDPSNGLSRGQGATAAQQGGYEIPARLRTLHNLVIQYAAQGRYEVAVPLCKQALEDLERTSGRGHPDVATMLNILALVYRDQNKYKEAAHLLNDALSIRESTLGPDHPAVAATLNNLAVLYGKRGKYKEAEPLCQRALEIREKVLGTNHPDVAKQLNNLALLCQNQGKYEAVERYYQRALAIYEGQLGPDNPNVARTKNNLASCYLKQGKYAEAETLYKEILTRAHVQEFGSVDDDHKPIWMHAEEREEMSKSRHHEGGTPYAEYGGWYKACKVSSPTVNTTLRNLGALYRRQGKLEAAETLEECALRSRRQGTDPISQTKVAELLGESDGRRTSQEGPGDSVKFEGGEDASVAVEWSGDGSGTLQRSGSLGKIRDVLRRSSELLVRKLQGTEPRPSSSNMKRAASLNYLNQPSAAPLQVSRGLSASTMDLSSSS

SEQ ID NO: 872222 - protein, 603 aa, Homo sapiens
HEPARAAATPADCRPGKVPQARMSGLVLGQRDEPAGHRLSQEEILGSTRLVSQGLEALRSEHQAVLQSLSQTIECLQQGGHEEGLVHEKARQLRRSMENIELGLSEAQVMLALASHLSTVESEKQKLRAQVRRLCQENQWLRDELAGTQQRLQRSEQAVAQLEEEKKHLEFLGQLRQYDEDGHTSEEKEGDATKDSLDDLFPNEEEEDPSNGLSRGQGATAAQQGGYEIPARLRTLHNLVIQYAAQGRYEVAVPLCKQALEDLERTSGRGHPDVATMLNILALVYRDQNKYKEAAHLLNDALSIRESTLGPDHPAVAATLNNLAVLYGKRGKYKEAEPLCQRALEIREKVLGTNHPDVAKQLNNLALLCQNQGKYEAVERYYQRALAIYEGQLGPDNPNVARTKNNLASCYLKQGKYAEAETLYKEILTRAHVQEFGSVDDDHKPIWMHAEEREEMSKSRHHEGGTPYAEYGGWYKACKVSSPTVNTTLRNLGALYRRQGKLEAAETLEECALRSRRQGTDPISQTKQLTFNPAPRSAGSPHPHSPHSIPHCSWLFPTPRWDSEGEQFNQKIAAALRVSAPSSGIPLRKDPQDTLSAPCGPLE

SEQ ID NO: 872223 - protein, 641 aa, Homo sapiens
HEPARAAATPADCRPGKVPQARMSGLVLGQRDEPAGHRLSQEEILGSTRLVSQGLEALRSEHQAVLQSLSQTIECLQQGGHEEGLVHEKARQLRRSMENIELGLSEAQVMLALASHLSTVESEKQKLRAQVRRLCQENQWLRDELAGTQQRLQRSEQAVAQLEEEKKHLEFLGQLRQYDEDGHTSEEKEGDATKDSLDDLFPNEEEEDPSNGLSRGQGATAAQQGGYEIPARLRTLHNLVIQYAAQGRYEVAVPLCKQALEDLERTSGRGHPDVATMLNILALVYRDQNKYKEAAHLLNDALSIRESTLGPDHPAVAATLNNLAVLYGKRGKYKEAEPLCQRALEIREKVLGTNHPDVAKQLNNLALLCQNQGKYEAVERYYQRALAIYEGQLGPDNPNVARTKNNLASCYLKQGKYAEAETLYKEILTRAHVQEFGSVDDDHKPIWMHAEEREEMSKSRHHEGGTPYAEYGGWYKACKVSSPTVNTTLRNLGALYRRQGKLEAAETLEECALRSRRQGTDPISQTKVAELLGESDGRRTSQEGPGDSVKFEGGEDASVAVEWSGDGSGTLQRSGSLGKIRDVLRRSSELLVRKLQGTEPRPSSSNMKRAASLNYLNQPSAAPLQVSRGLSASTMDLSSSS

SEQ ID NO: 872224 - protein, 566 aa, Homo sapiens
HEPARAAATPADCRPGKVPQARMSGLVLGQRDEPAGHRLSQEEILGSTRLVSQGLEALRSEHQAVLQSLSQTIECLQQGGHEEGLVHEKARQLRRSMENIELGLSEAQVMLALASHLSTVESEKQKLRAQVRRLCQENQWLRDELAGTQQRLQRSEQAVAQLEEEKKHLEFLGQLRQYDEDGHTSEEKEGDATKDSLDDLFPNEEEEDPSNGLSRGQGATAAQQGGYEIPARLRTLHNLVIQYAAQGRYEVAVPLCKQALEDLERTSGRGHPDVATMLNILALVYRDQNKYKEAAHLLNDALSIRESTLGPDHPAVAATLNNLAVLYGKRGKYKEAEPLCQRALEIREKVLGTNHPDVAKQLNNLALLCQNQGKYEAVERYYQRALAIYEGQLGPDNPNVARTKNNLASCYLKQGKYAEAETLYKEILTRAHVQEFGSVDDDHKPIWMHAEEREEMSKSRHHEGGTPYAEYGGWYKACKVSSPTVNTTLRNLGALYRRQGKLLGPPTPTALTAFPIAPGSSPPLGGTVKGSSLTRRLLLPLGSQLPPQESLLGRTLRTPSLHPVVL

SEQ ID NO: 872225 - protein, 607 aa, Homo sapiens
HEPARAAATPADCRPGKVPQARMSGLVLGQRDEPAGHRLSQEEILGSTRLVSQGLEALRSEHQAVLQSLSQTIECLQQGGHEEGLVHEKARQLRRSMENIELGLSEAQVMLALASHLSTVESEKQKLRAQVRRLCQENQWLRDELAGTQQRLQRSEQAVAQLEEEKKHLEFLGQLRQYDEDGHTSEEKEGDATKDSLDDLFPNEEEEDPSNGLSRGQGATAAQQGGYEIPARLRTLHNLVIQYAAQGRYEVAVPLCKQALEDLERTSGRGHPDVATMLNILALVYRDQNKYKEAAHLLNDALSIRESTLGPDHPAVAATLNNLAVLYGKRGKYKEAEPLCQRALEIREKVLGTNHPDVAKQLNNLALLCQNQGKYEAVERYYQRALAIYEGQLGPDNPNVARTKNNLASCYLKQGKYAEAETLYKEILTRAHVQEFGSVDDDHKPIWMHAEEREEMSKSRHHEGGTPYAEYGGWYKACKVSSPTVNTTLRNLGALYRRQGKLEAAETLEECALRSRRQGTDPISQTKVAELLGESDGRRTSQEGPGDSVKFEGGEDASVAVEWSGDGSGTLQRSGSLGKIRDVLRRSRIPLRKDPQDTLSAPCGPLE

SEQ ID NO: 872226 - protein, 128 aa, Homo sapiens
MDLSSGTDPISQTKVAELLGESDGRRTSQEGPGDSVKFEGGEDASVAVEWSGDGSGTLQRSGSLGKIRDVLRRSSELLVRKLQGTEPRPSSSNMKRAASLNYLNQPSAAPLQVSRGLSASTMDLSSSS

SEQ ID NO: 872227 - protein, 641 aa, Homo sapiens; identical to SEQ ID NO: 872223

SEQ ID NO: 872228 - protein, 597 aa, Homo sapiens
MSGLVLGQRDEPAGHRLSQEEILGSTRLVSQGLEALRSEHQAVLQSLSQTIECLQQGGHEEGLVHEKARQLRRSMENIELGLSEAQVRRLCQENQWLRDELAGTQQRLQRSEQAVAQLEEEKKHLEFLGQLRQYDEDGHTSEEKEGDATKDSLDDLFPNEEEEDPSNGLSRGQGATAAQQGGYEIPARLRTLHNLVIQYAAQGRYEVAVPLCKQALEDLERTSGRGHPDVATMLNILALVYRDQNKYKEAAHLLNDALSIRESTLGPDHPAVAATLNNLAVLYGKRGKYKEAEPLCQRALEIREKVLGTNHPDVAKQLNNLALLCQNQGKYEAVERYYQRALAIYEGQLGPDNPNVARTKNNLASCYLKQGKYAEAETLYKEILTRAHVQEFGSVDDDHKPIWMHAEEREEMSKSRHHEGGTPYAEYGGWYKACKVSSPTVNTTLRNLGALYRRQGKLEAAETLEECALRSRRQGTDPISQTKVAELLGESDGRRTSQEGPGDSVKFEGGEDASVAVEWSGDGSGTLQRSGSLGKIRDVLRRSSELLVRKLQGTEPRPSSSNMKRAASLNYLNQPSAAPLQVSRGLSASTMDLSSSS

SEQ ID NO: 872229 - protein, 365 aa, Homo sapiens
MLNILALVYRDQNKYKEAAHLLNDALSIRESTLGPDHPAVAATLNNLAVLYGKRGKYKEAEPLCQRALEIREKVLGTNHPDVAKQLNNLALLCQNQGKYEAVERYYQRALAIYEGQLGPDNPNVARTKNNLASCYLKQGKYAEAETLYKEILTRAHVQEFGSVDDDHKPIWMHAEEREEMSKSRHHEGGTPYAEYGGWYKACKVSSPTVNTTLRNLGALYRRQGKLEAAETLEECALRSRRQGTDPISQTKVAELLGESDGRRTSQEGPGDSVKFEGGEDASVAVEWSGDGSGTLQRSGSLGKIRDVLRRSSELLVRKLQGTEPRPSSSNMKRAASLNYLNQPSAAPLQVSRGLSASTMDLSSSS

SEQ ID NO: 872230 - protein, 454 aa, Homo sapiens
MSGLVLGQRDEPAGHRLSQEEILGSTRLVSQGLEALRSEHQAVLQSLSQTIECLQQGAQGRYEVAVPLCKQALEDLERTSGRGHPDVATMLNILALVYRDQNKYKEAAHLLNDALSIRESTLGPDHPAVAATLNNLAVLYGKRGKYKEAEPLCQRALEIREKVLGTNHPDVAKQLNNLALLCQNQGKYEAVERYYQRALAIYEGQLGPDNPNVARTKNNLASCYLKQGKYAEAETLYKEILTRAHVQEFGSVDDDHKPIWMHAEEREEMSKSRHHEGGTPYAEYGGWYKACKVSSPTVNTTLRNLGALYRRQGKLEAAETLEECALRSRRQGTDPISQTKVAELLGESDGRRTSQEGPGDSVKFEGGEDASVAVEWSGDGSGTLQRSGSLGKIRDVLRRSSELLVRKLQGTEPRPSSSNMKRAASLNYLNQPSAAPLQVSRGLSASTMDLSSSS

SEQ ID NO: 872231 - protein, 641 aa, Homo sapiens; identical to SEQ ID NO: 872223

SEQ ID NO: 872232 - protein, 641 aa, Homo sapiens; identical to SEQ ID NO: 872223

SEQ ID NO: 872233 - protein, 482 aa, Homo sapiens
HEPARAAATPADCRPGKVPQARMSGLVLGQRDEPAGHRLSQEEILGSTRLVSQGLEALRSEHQAVLQSLSQTIECLQQGGHEEGLVHEKARQLRRSMENIELGLSEAQVMLALASHLSTVESEKQKLRAQVRRLCQENQWLRDELAGTQQRLQRSEQAVAQLEEEKKHLEFLGQLRQYDEDGHTSEEKEGDATKDSLDDLFPNEEEEDPSNGLSRGQGATAAQQGGYEIPARLRTLHNLVIQYAAQGRYEVAVPLCKQALEDLERTSGRGHPDVATMLNILALVYRDQNKYKEAAHLLNDALSIRESTLGPDHPAVAATLNNLAVLYGKRGKYKEAEPLCQRALEIREKVLGTNHPDVAKQLNNLALLCQNQGKYEAVERYYQRALAIYEGQLGPDNPNVARTKNNLASCYLKQGKYAEAETLYKEILTRAHVQEFGSVDDDHKPIWMHAEEREEMSKSRHHEGGTPYAEYGGWYKACKVSR

SEQ ID NO: 872234 - protein, 286 aa, Homo sapiens
HEPARAAATPADCRPGKVPQARMSGLVLGQRDEPAGHRLSQEEILGSTRLVSQGLEALRSEHQAVLQSLSQTIECLQQGGHEEGLVHEKARQLRRSMENIELGLSEAQVMLALASHLSTVESEKQKLRAQVRRLCQENQWLRDELAGTQQRLQRSEQAVAQLEEEKKHLEFLGQLRQYDEDGHTSEEKEGDATKDSLDDLFPNEEEEDPSNGLSRGQGATAAQQGGYEIPARLRTLHNLVIQYAAQGRYEVAVPLCKQALEDLERTSGRGHPDVATMLNILALVYR

SEQ ID NO: 872235 - protein, 155 aa, Homo sapiens
GRHRTCWATERRLWVDALDYWINHFNFPMNFILFIFIPGVFSLKSSTLKPTIEALPNVLPLNEDVNKQEEKNEDHTPNYAPANEKNGNYYKDIKQYVFTTQNPNGTESEISVRATTDLNFALKNDKTVNATTYEKSTIEEETTTSEPSHKNIQSI

SEQ ID NO: 872236 - protein, 322 aa, Homo sapiens
GRHRTCWATERRLWVDALDYWINHFNFPMNFILFIFIPGVFSLKSSTLKPTIEALPNVLPLNEDVNKQEEKNEDHTPNYAPANEKNGNYYKDIKQYVFTTQNPNGTESEISVRATTDLNFALKNDKTVNATTYEKSTIEEETTTSEPSHKNIQRSTPNVPAFWTMLAKAINGTAVVMDDKDQLFHPIPESDVNATQGENQPDLEDLKIKIMLGISLMTLLLFVVLLAFCSATLYKLRHLSYKSCESQYSVNPELATMSYFHPSEGVSDTSFSKSAESSTFLGTTSSDMRRSGTRTSESKIMTDIISIGSDNEMHENDESVTR

SEQ ID NO: 872237 - protein, 158 aa, Homo sapiens
MLAKAINGTAVVMDDKDQLFHPIPESDVNATQGENQPDLEDLKIKIMLGISLMTLLLFVVLLAFCSATLYKLRHLSYKSCESQYSVNPELATMSYFHPSEGVSDTSFSKSAESSTFLGTTSSDMRRSGTRTSESKIMTDIISIGSDNEMHENDESVTR

SEQ ID NO: 872238 - protein, 189 aa, Homo sapiens
MALSFSLLMAVLVLSYKSICSLGCDLPQTHSLGNRRALILLAQMGRISPFSCLKDRHDFGFPQEEFDGNQFQKAQAISVLHEMIQQTFNLFSTKDSSATWEQSLLEKFSTELNQQLNDLEACVIQEVGVEETPLMNVDSILAVKKYFQRITLYLTEKKYSPCAWEVVRAEIMRSFSLSKIFQERLRRKE

SEQ ID NO: 872239 - protein, 107 aa, Homo sapiens
MGQRVRMARPLEQAVAAIVCTFQEYAGRCGDKYKLCQAELKELLQKELATWTPTEFRECDYNKFMSVLDTNKDCEVDFVEYVRSLACLCLYCHEYFKDCPSEPPCSQ

SEQ ID NO: 872240 - protein, 175 aa, Homo sapiens
MNKASHVQFLQDGSSKVVPLDLKSCEEHSRCSQCLALLPRLECSGTISAHCNLRLLGSSDSPASASRVAGITVRMARPLEQAVAAIVCTFQEYAGRCGDKYKLCQAELKELLQKELATWTPTEFRECDYNKFMSVLDTNKDCEVDFVEYVRSLACLCLYCHEYFKDCPSEPPCSQ

SEQ ID NO: 872241 - protein, 44 aa, Homo sapiens
MSDKPGMAEIEKFDKSKLKKTETQEKNPLSSKETIEQERQAGES

SEQ ID NO: 872242 - protein, 290 aa, Homo sapiens
MALENPKMHNSEISKRLGADWKLLTDAEKRPFIDEAKRLRAVHMKEYPDYKYRPRRKTKTLLKKDKYSLPSGLLPPGAAAAAAAAAAAAAAASSPVGVGQRLDTYTHVNGWANGAYSLVQEQLGYAQPPSMSSPPPPPALPPMHRYDMAGLQYSPMMPPGAQSYMNVAAAAAAASGYGGMAPSATAAAAAAYGQQPATAAAAAAAAAAMSLGPMGSVVKSEPSSPPPAIASHSQRACLGDLRDMISMYLPPGGDAADAASPLPGGRLHGVHQHYQGAGTAVNGTVPLTHI

SEQ ID NO: 872243 - protein, 446 aa, Homo sapiens
MRPVRENSSGARSPRVPADLARSILISLPFPPDSLAHRPPSSAPTESQGLFTVAAPAPGAPSPPATLAHLLPAPAMYSLLETELKNPVGTPTQAAGTGGPAAPGGAGKSSANAAGGANSGGGSSGGASGGGGGTDQDRVKRPMNAFMVWSRGQRRKMALENPKMHNSEISKRLGADWKLLTDAEKRPFIDEAKRLRAVHMKEYPDYKYRPRRKTKTLLKKDKYSLPSGLLPPGAAAAAAAAAAAAAAASSPVGVGQRLDTYTHVNGWANGAYSLVQEQLGYAQPPSMSSPPPPPALPPMHRYDMAGLQYSPMMPPGAQSYMNVAAAAAAASGYGGMAPSATAAAAAAYGQQPATAAAAAAAAAAMSLGPMGSVVKSEPSSPPPAIASHSQRACLGDLRDMISMYLPPGGDAADAASPLPGGRLHGVHQHYQGAGTAVNGTVPLTHI

SEQ ID NO: 872244 - protein, 387 aa, Homo sapiens
PPPPPQRYGRGCAGYSPAGAERATRGLQILSTMARRPRNSRAWHFVLSAARRDADARAVALAGSTNWGYDSDGQHSDSDSDPEYSTLPPSIPSAVPVTGESFCDCAGQSEASFCSSLHSAHRGRDCRCGEEDEYFDWVWDDLNKSSATLLSCDNRKVSFHMEYSCGTAAIRGTKELGEGQHFWEIKMTSPVYGTDMMVGIGTSDVDLDKYRHTFCSLLGRDEDSWGLSYTGLLHHKGDKTSFSSRFGQGSIIGVHLDTWHGTLTFFKNRKCIGVAATKLQNKRFYPMVCSTAARSSMKVTRSCASATSLQYLCCHRLRQLRPDSGDTLEGLPLPPGLKQVLHNKLGWVLSMSCSRRKAPVSDPQAATSAHPSSREPRPCQRKRCRRT

SEQ ID NO: 872245 - protein, 262 aa, Homo sapiens
TRGSTHASSRAWHFVLSAARRDADARAVALAGSTNWGYDSDGQHSDSDSDPEYSTLPPSIPSAVPVTGESFCDCAGQSEASFCSSLHSAHRGRDCRCGEEDEYFDWVWDDLNKSSATLLSCDNRKVSFHMEYSCGTAAIRGTKELGEGQHFWEIKMTSPVYGTDMMVGIGTSDVDLDKYRHTFCSLLGRDEDSWGLSYTGLLHHKGDKTSFSSRFGQGSIIGVHLDTWHGTLTFFKNRKCIGGGSHQAGDKRLTDCLLSPQR

SEQ ID NO: 872246 - protein, 227 aa, Homo sapiens
MEYSCGTAAIRGTKELGEGQHFWEIKMTSPVYGTDMMVGIGTSDVDLDKYRHTFCSLLGRDEDSWGLSYTGLLHHKGDKTSFSSRFGQGSIIGVHLDTWHGTLTFFKNRKCIGVAATKLQNKRFYPMVCSTAARSSMKVTRSCASATSLQYLCCHRLRQLRPDSGDTLEGLPLPPGLKQVLHNKLGWVLSMSCSRRKAPVSDPQAATSAHPSSREPRPCQRKRCRRT

SEQ ID NO: 872247 - protein, 384 aa, Homo sapiens
GLFTSRSGAESGSGPGRRSAQRGLQILSTMARRPRNSRAWHFVLSAARRDADARAVALAGSTNWGYDSDGQHSDSDSDPEYSTLPPSIPSAVPVTGESFCDCAGQSEASFCSSLHSAHRGRDCRCGEEDEYFDWVWDDLNKSSATLLSCDNRKVSFHMEYSCGTAAIRGTKELGEGQHFWEIKMTSPVYGTDMMVGIGTSDVDLDKYRHTFCSLLGRDEDSWGLSYTGLLHHKGDKTSFSSRFGQGSIIGVHLDTWHGTLTFFKNRKCIGVAATKLQNKRFYPMVCSTAARSSMKVTRSCASATSLQYLCCHRLRQLRPDSGDTLEGLPLPPGLKQVLHNKLGWVLSMSCSRRKAPVSDPQAATSAHPSSREPRPCQRKRCRRT

SEQ ID NO: 872248 - protein, 227 aa, Homo sapiens; identical to SEQ ID NO: 872246

SEQ ID NO: 872249 - protein, 191 aa, Homo sapiens
MVGIGTSDVDLDKYRHTFCSLLGRDEDSWGLSYTGLLHHKGDKTSFSSRFGQGSIIGVHLDTWHGTLTFFKNRKCIGVAATKLQNKRFYPMVCSTAARSSMKVTRSCASATSLQYLCCHRLRQLRPDSGDTLEGLPLPPGLKQVLHNKLGWVLSMSCSRRKAPVSDPQAATSAHPSSREPRPCQRKRCRRT

SEQ ID NO: 872250 - protein, 379 aa, Homo sapiens
MARRPRNSRAWHFVLSAARRDADARAVALAGSTNWGYDSDGQHSDSDSDPEYSTLPPSIPSAVPVTGESFCDCAGQSEASFCSSLHSAHRGRDCRCGEEDEYFDWVWDDLNKSSATLLSCDNRKVSFHMEYSCGTAAIRGTKELGEGQHFWEIKMTSPVYGTDMMVGIGTSDVDLDKYRHTFCSLLGRDEDSWGLSYTGAEAQGGAGPSLELPGSLRPWLPPGLLHHKGDKTSFSSRFGQGSIIGVHLDTWHGTLTFFKNRKCIGVAATKLQNKRFYPMVCSTAARSSMKVTRSCASATSLQYLCCHRLRQLRPDSGDTLEGLPLPPGLKQVLHNKLGWVLSMSCSRRKAPVSDPQAATSAHPSSREPRPCQRKRCRRT

SEQ ID NO: 872251 - protein, 322 aa, Homo sapiens
GLFTSRSGAESGSGPGRRSAQRGLQILSTMARRPRNSRAWHFVLSAARRDADARAVALAGSTNWGYDSDGQHSDSDSDPEYSTLPPSIPSAVPVTGESFCDCAGQSEASFCSSLHSAHRGRDCRCGEEDEYFDWVWDDLNKSSATLLSCDNRKVSFHMEYSCGTAAIRGTKELGEGQHFWEIKMTSPVYGTDMMVGIGTSDVDLDKYRHTFCSLLGRDEDSWGLSYTGLLHHKGDKTSFSSRFGQGSIIGVHLDTWHGTLTFFKNRKCIGVAATKLQNKRFYPRSCGRLRGREPGWSPRCCSHRASVFPNLLCMLSAAAPPS

SEQ ID NO: 872252 - protein, 166 aa, Homo sapiens [sequence omitted]

SEQ ID NO: 872253 - protein, 42 aa, Homo sapiens
DKTSFSSRFGQGSIIGVHLDTWHGTLTFFKNRKCIGEAVTGL

SEQ ID NO: 872254 - protein, 217 aa, Homo sapiens
MARRPRNSRAWHFVLSAARRDADARAVALAGSTNWGYDSDGQHSDSDSDPEYSTLPPSIPSAVPVTGESFCDCAGQSEASFCSSLHSAHRGRDCRCGEEDEYFDWVWDDLNKSSATLLSCDNRKVSFHMEYSCGTAAIRGTKELGEGQHFWEIKMTSPVYGTDMVSCFGPGCFWGTWLRQPSPAPSAWPLFLDGGHRDVGCGPGQIPPHVLQPAGQG

SEQ ID NO: 872255 - protein, 384 aa, Homo sapiens; identical to SEQ ID NO: 872247

SEQ ID NO: 872256 - protein, 355 aa, Homo sapiens
MARRPRNSRAWHFVLSAARRDADARAVALAGSTNWGYDSDGQHSDSDSDPEYSTLPPSIPSAVPVTGESFCDCAGQSEASFCSSLHSAHRGRDCRCGEEDEYFDWVWDDLNKSSATLLSCDNRKVSFHMEYSCGTAAIRGTKELGEGQHFWEIKMTSPVYGTDMMVGIGTSDVDLDKYRHTFCSLLGRDEDSWGLSYTGLLHHKGDKTSFSSRFGQGSIIGVHLDTWHGTLTFFKNRKCIGVAATKLQNKRFYPMVCSTAARSSMKVTRSCASATSLQYLCCHRLRQLRPDSGDTLEGLPLPPGLKQVLHNKLGWVLSMSCSRRKAPVSDPQAATSAHPSSREPRPCQRKRCRRT

SEQ ID NO: 872257 - protein, 355 aa, Homo sapiens; identical to SEQ ID NO: 872256

SEQ ID NO: 872258 - protein, 372 aa, Homo sapiens
GLFTSRSGAESGSGPGRRSAQRGLQILSTMARRPRNSRAWHFVLSAARRDADARAVALAGSTNWGYDSDGQHSDSDSDPEYSTLPPSIPSAVPVTGESFCDCAGQSEASFCSSLHSAHRGRDCRCGEEDEYFDWVWDDLNKSSATLLSCDNRKVSFHMEYSCGTAAIRGTKELGEGQHFWEIKMTSPVYGTDMMVGIGTSDVDLDKYRHTFCSLLGRDEDSWGLSYTGLLHHKGDKTSFSSRFGQGSIIGVHLDTWHGTLTFFKNRKCIGVAATKLQNKRFYPMVCSTAARSSMKVTRSCASATSLQYLCCHRLRQLRPDSGDTLEGLPLPPGLKQVLHNKLGWVLSMSCTPFLCPFFLCPFLPATLQGGVG

SEQ ID NO: 872259 - protein, 391 aa, Homo sapiens
SGVQRGLQILSTMARRPRNSRAWHFVLSAARRDADARAVALAGSTNWGYDSDGQHSDSDSDPEYSTLPPSIPSAVPVTGESFCDCAGQSEASFCSSLHSAHRGRDCRCGEEDEYFDWVWDDLNKSSATLLSCDNRKVSFHMEYSCGTAAIRGTKELGEGQHFWEIKMTSPVYGTDMMVGIGTSDVDLDKYRHTFCSLLGRDEDSWGLSYTGAEAQGGAGPSLELPGSLRPWLPPGLLHHKGDKTSFSSRFGQGSIIGVHLDTWHGTLTFFKNRKCIGVAATKLQNKRFYPMVCSTAARSSMKVTRSCASATSLQYLCCHRLRQLRPDSGDTLEGLPLPPGLKQVLHNKLGWVLSMSCSRRKAPVSDPQAATSAHPSSREPRPCQRKRCRRT

SEQ ID NO: 872260 - protein, 290 aa, Homo sapiens
GLFTSRSGAESGSGPGRRSAQRGLQILSTMARRPRNSRAWHFVLSAARRDADARAVALAGSTNWGYDSDGQHSDSDSDPEYSTLPPSIPSAVPVTGESFCDCAGQSEASFCSSLHSAHRGRDCRCGEEDEYFDWVWDDLNKSSATLLSCDNRKVSFHMEYSCGTAAIRGTKELGEGQHFWEIKMTSPVYGTDMMVGIGTSDVDLDKYRHTFCSLLGRDEDSWGLSYTGLLHHKGDKTSFSSRFGQGSIIGVHLDTWHGTLTFFKNRKCIGGGSHQAGDKRLTDCLLSPQR

SEQ ID NO: 872261 - protein, 147 aa, Homo sapiens [sequence omitted]

SEQ ID NO: 872262 - protein, 184 aa, Homo sapiens
SSSTSGCGGGAPPRSGSPVSALPSLSGALQGLPVGTMRGSELPLVLLALVLCLAPRGRAVPLPAGGGTVLTKMYPRGNHWAVGHLMGKKSTGESSSVSERGSLKQQLREYIRWEEAARNLLGLIEAKENRNHQPPQPKALGNQQPSWDSEDSSNFKDVGSKGKVGRLSAPGSQREGRNPQLNQQ

SEQ ID NO: 872263 - protein, 100 aa, Homo sapiens
AAANHWAVGHLMGKKSTGESSSVSERGSLKQQLREYIRWEEAARNLLGLIEAKENRNHQPPQPKALGNQQPSWDSEDSSNFKDLVDSLLQVLNVKEGTPS

SEQ ID NO: 872264 - protein, 373 aa, Homo sapiens
IQHAPRPLQSAGEGVTHVLILLESPARPVAAVTQVQRRRYHRLSDMSMLAERRRKQKWAVDPQNTAWSNDDSKFGQRMLEKMGWSKGKGLGAQEQGATDHIKVQVKNNHLGLGATINNEDNWIAHQDDFNQLLAELNTCHGQETTDSSDKKEKKSFSLEEKSKISKNRVHYMKFTKGKDLSSRSKTDLDCIFGKRQSKKTPEGDASPSTPEENETTTTSAFTIQEYFAKRMAALKNKPQVPVPGSDISETQVERKRGKKRNKEATGKDVESYLQPKAKRHTEGKPERAEAQERVAKKKSAPAEEQLRGPCWDQSSKASAQDAGDHVQPPEGRDFTLKPKKRRGKKKLQKPVEIAEDATLEETLVKKKKKKDSK

SEQ ID NO: 872265 - protein, 219 aa, Homo sapiens
IQHAPRPLQSAGEGVTHVLILLESPARPVAAVTQVQRRRYHRLSDMSMLAERRRKQKWAVDPQNTAWSNDDSKFGQRMLEKMGWSKGKGLGAQEQGATDHIKVQVKNNHLGLGATINNEDNWIAHQDDFNQLLAELNTCHGQETTDSSDKKEKKSFSLEEKSKISKNRVHYMKFTKGRCQSLHSRGERNHDNQRLHHPGVLCQADGSTEEQAPGSSSRV

SEQ ID NO: 872266 - protein, 77 aa, Homo sapiens
GLQGEVPALRRLHMVPCILSEEREEKAAKTSRDSRGRYTRRNASEKEEEERFQMNPSQPGPSDHSAVRALRGQTPLA

SEQ ID NO: 872267 - protein, 373 aa, Homo sapiens; identical to SEQ ID NO: 872264

SEQ ID NO: 872268 - protein, 197 aa, Homo sapiens
IQHAPRPLQSAGEGVTHVLILLESPARPVAAVTQVQRRRYHRLSDMSMLAERRRKQKWAVDPQNTAWSNDDSKFGQRMLEKMGWSKGKGLGAQEQGATDHIKVQVKNNHLGLGATINNEDNWIAHQDDFNQLLAELNTCHGQETTDSSDKKEKKSFSLEEKSKISKNRVHYMKFTKDQIQSKACNNPGFYIYLSELC

SEQ ID NO: 872269 - protein, 260 aa, Homo sapiens
  misc_feature (5)..(6): Xaa can be any naturally occurring amino acid
  misc_feature (8)..(8): Xaa can be any naturally occurring amino acid
HVCYXXEXWDIVEPGLEEGRKPLTIRTQKFKAMLWMCEEFPLSLVEQVIPIIDLMARTSAHFARLRDFIKLEFPPGFPVKIEIPLFHVLNARITFGNVNGCSTAEESVSQNVEGTQADSASHITNFEVDQSVFEIPESYYVQDNGRNVHLQDEDYEIMQFAIQQSLLESSRSQELSGPASNGGISQTNTYDAQYERAIQESLLTSTEGLCPSALSETSRFDNDLQLAMELSAKELEEWELRLQEEEAELQQVLQLSLTDK

SEQ ID NO: 872270 - protein, 552 aa, Homo sapiens
MSSACDAGDHYPLHLLVWKNDYRQLEKELQGQNVEAVDPRGRTLLHLAVSLGHLESARVLLRHKADVTKENRQGWTVLHEAVSTGDPEMVYTVLQHRDYHNTSMALEGVPELLQKILEAPDFYVQMKWEFTSWVPLVSRICPNDVCRIWKSGAKLRVDITLLGFENMSWIRGRRSFIFKGEDNWAELMEVNHDDKVVTTERFDLSQEMERLTLDLMKPKSREVERRLTSPVINTSLDTKNIAFERTKSGFWGWRTDKAEVVNGYEAKVYTVNNVNVITKIRTEHLTEEEKKRYKQTGTRWNLCWELWNTNLVHKGDLTTECATANNPTAITPDEYFNEEFDLKDRDIGRPKELTIRTQKFKAMLWMCEEFPLSLVEQVIPIIDLMARTSAHFARLRDFIKLEFPPGFPVKIASHITNFEVDQSVFEIPESYYVQDNGRNVHLQDEDYEIMQFAIQQSLLESSRSQELSGPASNGGISQTNTYDAQYERAIQESLLTSTEGLCPSALSETSRFDNDLQLAMELSAKELEEWELRLQEEEAELQQVLQLSLTDK

SEQ ID NO: 872271 - protein, 556 aa, Homo sapiens
SWGQVDGTFRVEIFGQENEPQLCSVGCTEFLGVELENVEAVDPRGRTLLHLAVSLGHLESARVLLRHKADVTKENRQGWTVLHEAVSTGDPEMVYTVLQHRDYHNTSMALEGVPELLQKILEAPDFYVQMKWEFTSWVPLVSRICPNDVCRIWKSGAKLRVDITLLGFENMSWIRGRRSFIFKGEDNWAELMEVNHDDKVVTTERFDLSQEMERLTLDLMKPKSREVERRLTSPVINTSLDTKNIAFERTKSGFWGWRTDKAEVVNGYEAKVYTVNNVNVITKIRTEHLTEEEKKRYKQTGTRWNLCWELWNTNLVHKGDLTTECATANNPTAITPDEYFNEEFDLKDRDIGRPKELTIRTQKFKAMLWMCEEFPLSLVEQVIPIIDLMARTSAHFARLRDFIKLEFPPGFPVKIASHITNFEVDQSVFEIPESYYVQDNGRNVHLQDEDYEIMQFAIQQSLLESSRSQELSGPASNGGISQTNTYDAQYERAIQESLLTSTEGLCPSALSETSRFDNDLQLAMELSAKELEEWELRLQEEEAELQQVLQLSLTDK

SEQ ID NO: 872272 - protein, 503 aa, Homo sapiens
MSSACDAGDHYPLHLLVWKNDYRQLEKELQGQNVEAVDPRGRTLLHLAVSLGHLESARVLLRHKADVTKENRQGWTVLHEAVSTGDPEMVYTVLQHRDYHNTSMALEGVPELLQKILEAPDFYVQMKWEFTSWVPLVSRICPNDVCRIWKSGAKLRVDITLLGFENMSWIRGRRSFIFKGEDNWAELMEVNHDDKVVTTERFDLSQEMERLTLDLMKPKSREVERRLTSPVINTSLDTKNIAFERTKSGFWGWRTDKAEVVNGYEAKVYTVNNVNVITKIRTEHLTEEEKKRYKQTGTRWNLCWELWNTNLVHKGDLTTECATANNPTAITPDEYFNEEFDLKDRDIGRPKELTIRTQKFKAMLWMCEEFPLSLVEQVIPIIDLMARTSAHFARLRDFIKLEFPPGFPVKIEIPLFHVLNARITFGNVNGCSTAEESVSQNVEGTQADSASHITNFEVDQSVFEIPESYYVQDNGRNVHLQDEDYEIMQFAIQQILQLSLTDK

SEQ ID NO: 872273 - protein, 190 aa, Homo sapiens
MLWMCEEFPLSLVEQVIPIIDLMARTSAHFARLRDFIKLEFPPGFPVKIASHITNFEVDQSVFEIPESYYVQDNGRNVHLQDEDYEIMQFAIQQSLLESSRSQELSGPASNGGISQTNTYDAQYERAIQESLLTSTEGLCPSALSETSRFDNDLQLAMELSAKELEEWELRLQEEEAELQQVLQLSLTDK

SEQ ID NO: 872274 - protein, 590 aa, Homo sapiens
MSSACDAGDHYPLHLLVWKNDYRQLEKELQGQNVEAVDPRGRTLLHLAVSLGHLESARVLLRHKADVTKENRQGWTVLHEAVSTGDPEMVYTVLQHRDYHNTSMALEGVPELLQKILEAPDFYVQMKWEFTSWVPLVSRICPNDVCRIWKSGAKLRVDITLLGFENMSWIRGRRSFIFKGEDNWAELMEVNHDDKVVTTERFDLSQEMERLTLDLMKPKSREVERRLTSPVINTSLDTKNIAFERTKSGFWGWRTDKAEVVNGYEAKVYTVNNVNVITKIRTEHLTEEEKKRYKQTGTRWNLCWELWNTNLVHKGDLTTECATANNPTAITPDEYFNEEFDLKDRDIGRPKELTIRTQKFKAMLWMCEEFPLSLVEQVIPIIDLMARTSAHFARLRDFIKLEFPPGFPVKIEIPLFHVLNARITFGNVNGCSTAEESVSQNVEGTQADSASHITNFEVDQSVFEIPESYYVQDNGRNVHLQDEDYEIMQFAIQQSLLESSRSQELSGPASNGGISQTNTYDAQYERAIQESLLTSTEGLCPSALSETSRFDNDLQLAMELSAKELEEWELRLQEEEAELQQVLQLSLTDK

SEQ ID NO: 872275 - protein, 317 aa, Homo sapiens [sequence omitted]

SEQ ID NO: 872276 - protein, 250 aa, Homo sapiens
MSSACDAGDHYPLHLLVWKNDYRQLEKELQGQNVEAVDPRGRTLLHLAVSLGHLESARVLLRHKADVTKENRQGWTVLHEAVSTGDPEMVYTVLQHRDYHNTSMALEGVPELLQKILEAPDFYVQMKWEFTSWVPLVSRICPNDVCRIWKSGAKLRVDITLLGFENMSWIRGRRSFIFKGEDNWAELMEVNHDDKVVTTERFDLSQEMERLTLDLMKPKSREVERRLTSPVINTSLDTKNIAFERYKFRL

SEQ ID NO: 872277 - protein, 261 aa, Homo sapiens [sequence omitted]

SEQ ID NO: 872278 - protein, 128 aa, Homo sapiens
MSSACDAGDHYPLHLLVWKNDYRQLEKELQGQNVEAVDPRGRTLLHLAVSLGHLESARVLLRHKADVTKENRQGWTVLHEAVSTGDPEMVYTVLQHRDYHNTSMGHPGEPPHQHRRPVPQRPERDKPF

SEQ ID NO: 872279 - protein, 590 aa, Homo sapiens; identical to SEQ ID NO: 872274

SEQ ID NO: 872280 - protein, 365 aa, Homo sapiens
MEVNHDDKVVTTERFDLSQEMERLTLDLMKPKSREVERRLTSPVINTSLDTKNIAFERTKSGFWGWRTDKAEVVNGYEAKVYTVNNVNVITKIRTEHLTEEEKKRYKADRNPLESLLGTVEHQFGAQGGPHHGMCYCKHPTAITPDEYFNEEFDLKDRDIGRPKELTIRTQKFKAMLWMCEEFPLSLVEQVIPIIDLMARTSAHFARLRDFIKLEFPPGFPVKIASHITNFEVDQSVFEIPESYYVQDNGRNVHLQDEDYEIMQFAIQQSLLESSRSQELSGPASNGGISQTNTYDAQYERAIQESLLTSTEGLCPSALSETSRFDNDLQLAMELSAKELEEWELRLQEEEAELQQVLQLSLTDK

SEQ ID NO: 872281 - protein, 590 aa, Homo sapiens; identical to SEQ ID NO: 872274

SEQ ID NO: 872282 - protein, 590 aa, Homo sapiens; identical to SEQ ID NO: 872274

SEQ ID NO: 872283 - protein, 332 aa, Homo sapiens
MSSACDAGDHYPLHLLVWKNDYRQLEKELQGQNVEAVDPRGRTLLHLAVSLGHLESARVLLRHKADVTKENRQGWTVLHEAVSTGDPEMVYTVLQHRDYHNTSMALEGVPELLQKILEAPDFYVQMKWEFTSWVPLVSRICPNDVCRIWKSGAKLRVDITLLGFENMSWIRGRRSFIFKGEDNWAELMEVNHDDKVVTTERFDLSQEMERLTLDLMKPKSREVERRLTSPVINTSLDTKNIAFERTKSGFWGWRTDKAEVVNGYEAKVYTVNNVNVITKIRTEHLTEEEKKRYKADRNPLESLLGTVEHQFGAQGGPHHGMCYCKQPHSHHA

SEQ ID NO: 872284 - protein, 272 aa, Homo sapiens [sequence omitted]

SEQ ID NO: 872285 - protein, 183 aa, Homo sapiens
MSSACDAGDHYPLHLLVWKNDYRQLEKELQGQNVEAVDPRGRTLLHLAVSLGHLESARVLLRHKADVTKENRQGWTVLHEAVSTGDPEMVYTVLQHRDYHNTSMALEGVPELLQKILEAPDFYVQMKWEFTSWVPLVSRICPNDVCRIWKSGAKLRVDITLLGFENMSWIRGRRSFIFKGEGE

SEQ ID NO: 872286 - protein, 147 aa, Homo sapiens
SRQQTADSLTSKHRGLGVAHRTPERRPPSRSPVNVPKTTAGSKSTGRTAPLTQAAHPPGGGSASVLRSPPPAPGGRPPGQVRRRPPPRRLPELRRTDSLLLRAANATLEAPSRSAFRRRRVLSSFYSLNIYRGLERWFKPVIPALWE

SEQ ID NO: 872287 - protein, 1402 aa, Homo sapiens
GCRQPKFMYPICTVVVDGLPSESSSSSYPGPVSVSEMSLLHALGPVQTWLGQELEKCGIDAMIYTRYVLSLLLHDSYDYDLQEQENDIFLGWEKGAYKKWGKSKKKCSDLTLEEMKKQNAVQCLRSASDESSGIETLVEELCSRLKDLQSKQEEKIHKKLEGSPSPEAELSPPAKDQVEMYYEAFPPLSEKPVCLQEIMTVWNKSKVCSYSSSSSSSTAPPASTDTSSPKDCNSESEVTKERSSEVPTTVHEKTQSKSKNEKENKFSNGTIEEKPALYKKQIRHKPEGKIRPRSWSSGSSEAGSSSSGNQGELKASMKYVKVRHKAREIRNKKGRNGQSRLSLKHGEKAERNIHTGSSSSSSSGSVKQLCKRGKRPLKEIGRKDPGSTEGKDLYMENRKDTEYKEEPLWYTEPIAEYFVPLSRKSKLETTYRNRQDTSDLTSEAVEELSESVHGLCISNNNLHKTYLAAGTFIDGHFVEMPAVINEDIDLTGTSLCSLPEDNKYLDDIHLSELTHFYEVDIDQSMLDPGASETMQGESRILNMIRQKSKENTDFEAECCIVLDGMELQGERAIWTDSTSSVGAEGLFLQDLGNLAQFWECCSSSSGDADGESFGGDSPVRLSPILDSTVLNSHLLAGNQELFSDINEGSGINSCFSVFEVQCSNSVLPFSFETLNLGNENTDSSANMLGKTQSRLLIWTKNSAFEENEHCSNLSTRTCSPWSHSEETRSDNETLNIQFEESTQFNAEDINYVVPRVSSNYVDEELLDFLQDETCQQNSRTLGEIPTLVFKKTSKLESVCGIQLEQKTENKNFETTQVCNESPHGDGYSSGVIKDIWTKMADTNSVATVEIERTDAELFSADVNNYCCCLDAEAELETLQEPDKAVRRSEYHLWEGQKESLEKRAFASSELSNVDGGDYTTPSKPWDVAQDKENTFILGGVYGELKTFNSDGEWAVVPPSHTKGSLLQCAASDVVTIAGTDVFMTPGNSFAPGHRQLWKPFVSFEQNDQPKSGENGLNKGFSFIFHEDLLGACGNFQVEDPGLEYSFSSFDLSNPFSQVLHVECSFEPEGIASFSPSFKPKSILCSDSDSEVFHPRICGVDRTQYRAIRISPRTHFRPISASELSPGGGSESEFESEKDEANIPIPSQVDIFEDPQADLKPLEEDAEKEGHYYGKSELESGKFLPRLKKSGMEKSAQTSLDSQEESTGILSVGKQNQCLECSMNESLEIDLESSEANCKIMAQCEEEINNFCGCKAGCQFPAYEDNPVSSGQLEEFPVLNTDIQGMNRSQEKQTWWEKALYSPLFPASECEECYTNAKGESGLEEYPDAKETPSNEERLLDFNRVSSVYEARCTGERDSGAKSDGFRGKMCSSASSTSEETGSEGGGEWVGPSEEELFSRTHL

SEQ ID NO: 872288 - protein, 687 aa, Homo sapiens
LGTLMAFRPEETRSDNETLNIQFEESTQFNAEDINYVVPRVSSNYVDEELLDFLQDETCQQNSRTLGEIPTLVFKKTSKLESVCGIQLEQKTENKNFETTQVCNESPHGDGYSSGVIKDIWTKMADTNSVATVEIERTDAELFSADVNNYCCCLDAEAELETLQEPDKAVRRSEYHLWEGQKESLEKRAFASSELSNVDGGDYTTPSKPWDVAQDKENTFILGGVYGELKTFNSDGEWAVVPPSHTKGSLLQCAASDVVTIAGTDVFMTPGNSFAPGHRQLWKPFVSFEQNDQPKSGENGLNKGFSFIFHEDLLGACGNFQVEDPGLEYSFSSFDLSNPFSQVLHVECSFEPEGIASFSPSFKPKSILCSDSDSEVFHPRICGVDRTQYRAIRISPRTHFRPISASELSPGGGSESEFESEKDEANIPIPSQVDIFEDPQADLKPLEEDAEKEGHYYGKSELESGKFLPRLKKSGMEKSAQTSLDSQEESTGILSVGKQNQCLECSMNESLEIDLESSEANCKIMAQCEEEINNFCGCKAGCQFPAYEDNPVSSGQLEEFPVLNTDIQGMNRSQEKQTWWEKALYSPLFPASECEECYTNAKGESGLEEYPDAKETPSNEERLLDFNRVSSVYEARCTGERDSGAKSDGFRGKMCSSASSTSEETGSEGGGEWVGPSEEELFSRTHL

SEQ ID NO: 872289 - protein, 580 aa, Homo sapiens
GCRQPKFMYPICTVVVDGLPSESSSSSYPGPVSVSEMSLLHALGPVQTWLGQELEKCGIDAMIYTRYVLSLLLHDSYDYDLQEQENDIFLGWEKGAYKKWGKSKKKCSDLTLEEMKKQNAVQCLRSASDESSGIETLVEELCSRLKDLQSKQEEKIHKKLEGSPSPEAELSPPAKDQVEMYYEAFPPLSEKPVCLQEIMTVWNKSKVCSYSSSSSSSTAPPASTDTSSPKDCNSESEVTKERSSEVPTTVHEKTQSKSKNEKENKFSNGTIEEKPALYKKQIRHKPEGKIRPRSWSSGSSEAGSSSSGNQGELKASMKYVKVRHKAREIRNKKGRNGQSRLSLKHGEKAERNIHTGSSSSSSSGSVKQLCKRGKRPLKEIGRKDPGSTEGKDLYMENRKDTEYKEEPLWYTEPIAEYFVPLSRKSKLETTYRNRQDTSDLTSEAVEELSESVHGLCISNNNLHKTYLAAGTFIDGHFVEMPAVINEDIDLTGTSLCSLPEDNKYLDDIHLSELTHFYEVDIDQSMLDPGASETMQGESRILNMIRQKSKENTDFEAECCIVLGLPGQVDLTQGASSSPSS

SEQ ID NO: 872290 - protein, 1257 aa, Homo sapiens
IPRTSKQEEKIHKKLEGSPSPEAELSPPAKDQVEMYYEAFPPLSEKPVCLQEIMTVWNKSKVCSYSSSSSSSTAPPASTDTSSPKDCNSESEVTKERSSEVPTTVHEKTQSKSKNEKENKFSNGTIEEKPALYKKQIRHKPEGKIRPRSWSSGSSEAGSSSSGNQGELKASMKYVKVRHKAREIRNKKGRNGQSRLSLKHGEKAERNIHTGSSSSSSSGSVKQLCKRGKRPLKEIGRKDPGSTEGKDLYMENRKDTEYKEEPLWYTEPIAEYFVPLSRKSKLETTYRNRQDTSDLTSEAVEELSESVHGLCISNNNLHKTYLAAGTFIDGHFVEMPAVINEDIDLTGTSLCSLPEDNKYLDDIHLSELTHFYEVDIDQSMLDPGASETMQGESRILNMIRQKSKENTDFEAECCIVLDGMELQGERAIWTDSTSSVGAEGLFLQDLGNLAQFWECCSSSSGDADGESFGGDSPVRLSPILDSTVLNSHLLAGNQELFSDINEGSGINSCFSVFEVQCSNSVLPFSFETLNLGNENTDSSANMLGKTQSRLLIWTKNSAFEENEHCSNLSTRTCSPWSHSEETRSDNETLNIQFEESTQFNAEDINYVVPRVSSNYVDEELLDFLQDETCQQNSRTLGEIPTLVFKKTSKLESVCGIQLEQKTENKNFETTQVCNESPHGDGYSSGVIKDIWTKMADTNSVATVEIERTDAELFSADVNNYCCCLDAEAELETLQEPDKAVRRSEYHLWEGQKESLEKRAFASSELSNVDGGDYTTPSKPWDVAQDKENTFILGGVYGELKTFNSDGEWAVVPPSHTKGSLLQCAASDVVTIAGTDVFMTPGNSFAPGHRQLWKPFVSFEQNDQPKSGENGLNKGFSFIFHEDLLGACGNFQVEDPGLEYSFSSFDLSNPFSQVLHVECSFEPEGIASFSPSFKPKSILCSDSDSEVFHPRICGVDRTQYRAIRISPRTHFRPISASELSPGGGSESEFESEKDEANIPIPSQVDIFEDPQADLKPLEEDAEKEGHYYGKSELESGKFLPRLKKSGMEKSAQTSLDSQEESTGILSVGKQNQCLECSMNESLEIDLESSEANCKIMAQCEEEINNFCGCKAGCQFPAYEDNPVSSGQLEEFPVLNTDIQGMNRSQEKQTWWEKALYSPLFPASECEECYTNAKGESGLEEYPDAKETPSNEERLLDFNRVSSVYEARCTGERDSGAKSDGFRGKMCSSASSTSEETGSEGGGEWVGPSEEELFSRTHL

SEQ ID NO: 872291 - protein, 180 aa, Homo sapiens
GCRQPKFMYPICTVVVDGLPSESSSSSYPGPVSVSEMSLLHALGPVQTWLGQELEKCGIDAMIYTRYVLSLLLHDSYDYDLQEQENDIFLGWEKGAYKKWGKSKKKCSDLTLEEMKKQNAVQCLRSASDESSGIETLVEELCSRLKDLQSKQEEKIHKKLEGSPSPEAEAGSASCFCHQE

SEQ ID NO: 872292 - protein, 756 aa, Homo sapiens
MAEAHQAVAFQFTVTPDGIDLRLSHEALRQIYLSGLHSWKKKFIRFKNGIITGVYPASPSSWLIVVVGVMTTMYAKIDPSLGIIAKINRTLETANCMSSQTKNVVSGVLFGTGLWVALIVTMRYSLKVLLSYHGWMFTEHGKMSRATKIWMGMVKIFSGRKPMLYSFQTSLPRLPVPAVKDTVNRYLQSVRPLMKEEDFKRMTALAQDFAVGLGPRLQWYLKLKSWWATNYVSDWWEEYIYLRGRGPLMVNSNYYAMDLLYILPTHIQAARAGNAIHAILLYRRKLDREEIKPIRLLGSTIPLCSAQWERMFNTSRIPGEETDTIQHMRDSKHIVVYHRGRYFKVWLYHDGRLLKPREMEQQMQRILDNTSEPQPGEARLAALTAGDRVPWARCRQAYFGRGKNKQSLDAVEKAAFFVTLDETEEGYRSEDPDTSMDSYAKSLLHGRCYDRWFDKSFTFVVFKNGKMGLNAEHSWADAPIVAHLWEYVMSIDSLQLGYAEDGHCKGDINPNIPYPTRLQWDIPGECQEVIETSLNTANLLANDVDFHSFPFVAFGKGIIKKCRTSPDAFVQLALQLAHYKDMGKFCLTYEASMTRLFREGRTETVRSCTTESCDFVRAMVDPAQTVEQRLKLFKLASEKHQHMYRLAMTGSGIDRHLFCLYVVSKYLAVESPFLKEVLSEPWRLSTSQTPQQQVELFDLENNPEYVSSGGGFGPVADDGYGVSYILVGENLINFHISSKFSCPETGIISQGPSSDT

SEQ ID NO: 872293 - protein, 773 aa, Homo sapiens
MAEAHQAVAFQFTVTPDGIDLRLSHEALRQIYLSGLHSWKKKFIRFKNGIITGVYPASPSSWLIVVVGVMTTMYAKIDPSLGIIAKINRTLETANCMSSQTKNVVSGVLFGTGLWVALIVTMRYSLKVLLSYHGWMFTEHGKMSRATKIWMGMVKIFSGRKPMLYSFQTSLPRLPVPAVKDTVNRYLQSVRPLMKEEDFKRMTALAQDFAVGLGPRLQWYLKLKSWWATNYVSDWWEEYIYLRGRGPLMVNSNYYAMDLLYILPTHIQAARAGNAIHAILLYRRKLDREEIKPIRLLGSTIPLCSAQWERMFNTSRIPGEETDTIQHMRDSKHIVVYHRGRYFKVWLYHDGRLLKPREMEQQMQRILDNTSEPQPGEARLAALTAGDRVPWARCRQAYFGRGKNKQSLDAVEKAAFFVTLDETEEGYRSEDPDTSMDSYAKSLLHGRCYDRWFDKSFTFVVFKNGKMGLNAEHSWADAPIVAHLWEYVMSIDSLQLGYAEDGHCKGDINPNIPYPTRLQWDIPGECQEVIETSLNTANLLANDVDFHSFPFVAFGKGIIKKCRTSPDAFVQLALQLAHYKDMGKFCLTYEASMTRLFREGRTETVRSCTTESCDFVRAMVDPAQTVEQRLKLFKLASEKHQHMYRLAMTGSGIDRHLFCLYVVSKYLAVESPFLKEVLSEPWRLSTSQTPQQQVELFDLENNPEYVSSGGGFGPVADDGYGVSYILVGENLINFHISSKFSCPETDSHRFGRHLKEAMTDIITLFGLSSNSKK

SEQ ID NO: 872294 - protein, 517 aa, Homo sapiens
MDLLYILPTHIQAARAGNAIHAILLYRRKLDREEIKPIRLLGSTIPLCSAQWERMFNTSRIPGEETDTIQHMRDSKHIVVYHRGRYFKVWLYHDGRLLKPREMEQQMQRILDNTSEPQPGEARLAALTAGDRVPWARCRQAYFGRGKNKQSLDAVEKAAFFVTLDETEEGYRSEDPDTSMDSYAKSLLHGRCYDRWFDKSFTFVVFKNGKMGLNAEHSWADAPIVAHLWEYVMSIDSLQLGYAEDGHCKGDINPNIPYPTRLQWDIPGECQEVIETSLNTANLLANDVDFHSFPFVAFGKGIIKKCRTSPDAFVQLALQLAHYKDMGKFCLTYEASMTRLFREGRTETVRSCTTESCDFVRAMVDPAQTVEQRLKLFKLASEKHQHMYRLAMTGSGIDRHLFCLYVVSKYLAVESPFLKEVLSEPWRLSTSQTPQQQVELFDLENNPEYVSSGGGFGPVADDGYGVSYILVGENLINFHISSKFSCPETDSHRFGRHLKEAMTDIITLFGLSSNSKK

SEQ ID NO: 872295 - protein, 370 aa, Homo sapiens
MAEAHQAVAFQFTVTPDGIDLRLSHEALRQIYLSGLHSWKKKFIRFKNGIITGVYPASPSSWLIVVVGVMTTMYAKIDPSLGIIAKINRTLETANCMSSQTKNVVSGVLFGTGLWVALIVTMRYSLKVLLSYHGWMFTEHGKMSRATKIWMGMVKIFSGRKPMLYSFQTSLPRLPVPAVKDTVNRYLQSVRPLMKEEDFKRMTALAQDFAVGLGPRLQWYLKLKSWWATNYVSDWWEEYIYLRGRGPLMVNSNYYAMDLLYILPTHIQAARAGNAIHAILLYRRKLDREEIKPIRLLGSTIPLCSAQWERMFNTSRIPGEETVHSSLGDRARLRLKKKAKTNQQQKPLTVRQAGSGDVALSALGKNSTSR

SEQ ID NO: 872296 - protein, 753 aa, Homo sapiens
MAEAHQAVAFQFTVTPDGIDLRLSHEALRQIYLSGLHSWKKKFIRFKNGIITGVYPASPSSWLIVVVGVMTTMYAKIDPSLGIIAKINRTLETANCMSSQTKNVVSGVLFGTGLWVALIVTMRYSLKVLLSYHGWMFTEHGKMSRATKIWMGMVKIFSGRKPMLYSFQTSLPRLPVPAVKDTVNRYLQSVRPLMKEEDFKRMTALAQDFAVGLGPRLQWYLKLKSWWATNYVSDWWEEYIYLRGRGPLMVNSNYYAMDLLYILPTHIQAARAGNAIHAILLYRRKLDREEIKPIRLLGSTIPLCSAQWERMFNTSRIPGEETDTIQHMRDSKHIVVYHRGRYFKVWLYHDGRLLKPREMEQQMQRILDNTSEPQPGEARLAALTAGDRVPWARCRQAYFGRGKNKQSLDAVEKAAFFVTLDETEEGYRSEDPDTSMDSYAKSLLHGRCYDRWFDKSFTFVVFKNGKMGLNAEHSWADAPIVAHLWEYVMSIDSLQLGYAEDGHCKGDINPNIPYPTRLQWDIPGECQEVIETSLNTANLLANDVDFHSFPFVAFGKGIIKKCRTSPDAFVQLALQLAHYKDMGKFCLTYEASMTRLFREGRTETVRSCTTESCDFVRAMVDPAQTVEQRLKLFKLASEKHQHMYRLAMTGSGIDRHLFCLYVVSKYLAVESPFLKEVLSEPWRLSTSQTPQQQVELFDLENNPEYVSSGGGFGPVADDGYGVSYILVGENLINFHISSKFSCPETTPIRYPNG

SEQ ID NO: 872297 - protein, 326 aa, Homo sapiens
MAEAHQAVAFQFTVTPDGIDLRLSHEALRQIYLSGLHSWKKKFIRFKNGIITGVYPASPSSWLIVVVGVMTTMYAKIDPSLGIIAKINRTLETANCMSSQTKNVVSGVLFGTGLWVALIVTMRYSLKVLLSYHGWMFTEHGKMSRATKIWMGMVKIFSGRKPMLYSFQTSLPRLPVPAVKDTVNRYLQSVRPLMKEEDFKRMTALAQDFAVGLGPRLQWYLKLKSWWATNYVSDWWEEYIYLRGRGPLMVNSNYYAMDLLYILPTHIQAARAGNAIHAILLYRRKLDREEIKPIRLLGSTIPLCSAQWERMFNTSRIPGEETDDLP

SEQ ID NO: 872298 - protein, 773 aa, Homo sapiens; identical to SEQ ID NO: 872293

SEQ ID NO: 872299 - protein, 640 aa, Homo sapiens
NVRLVRAGGESAEAKIWMGMVKIFSGRKPMLYSFQTSLPRLPVPAVKDTVNRYLQSVRPLMKEEDFKRMTALAQDFAVGLGPRLQWYLKLKSWWATNYVSDWWEEYIYLRGRGPLMVNSNYYAMDLLYILPTHIQAARAGNAIHAILLYRRKLDREEIKPIRLLGSTIPLCSAQWERMFNTSRIPGEETDTIQHMRDSKHIVVYHRGRYFKVWLYHDGRLLKPREMEQQMQRILDNTSEPQPGEARLAALTAGDRVPWARCRQAYFGRGKNKQSLDAVEKAAFFVTLDETEEGYRSEDPDTSMDSYAKSLLHGRCYDRWFDKSFTFVVFKNGKMGLNAEHSWADAPIVAHLWEYVMSIDSLQLGYAEDGHCKGDINPNIPYPTRLQWDIPGECQEVIETSLNTANLLANDVDFHSFPFVAFGKGIIKKCRTSPDAFVQLALQLAHYKDMGKFCLTYEASMTRLFREGRTETVRSCTTESCDFVRAMVDPAQTVEQRLKLFKLASEKHQHMYRLAMTGSGIDRHLFCLYVVSKYLAVESPFLKEVLSEPWRLSTSQTPQQQVELFDLENNPEYVSSGGGFGPVADDGYGVSYILVGENLINFHISSKFSCPETDSHRFGRHLKEAMTDIITLFGLSSNSKK

SEQ ID NO: 872300 - protein, 433 aa, Homo sapiens
MEVVDPQQLGMFTEGELMSVGMDTFIHRIDSTEVIYQPRRKRAKLIGKYLMGDLLGEGSYGKVKEVLDSETLCRRAVKILKKKKLRRIPNGEANVKKEIQLLRRLRHKNVIQLVDVLYNEEKQKMYMVMEYCVCGMQEMLDSVPEKRFPVCQAHGYFCQLIDGLEYLHSQGIVHKDIKPGNLLLTTGGTLKISDLGVAEALHPFAADDTCRTSQGSPAFQPPEIANGLDTFSGFKVDIWSAGVTLYNITTGLYPFEGDNIYKLFENIGKGSYAIPGDCGPPLSDLLKGMLEYEPAKRFSIRQIRQHSWFRKKHPPAEAPVPIPPSPDTKDRWRSMTVVPYLEDLHGADEDEDLFDIEDDIIYTQDFTVPGQVPEEEASHNGQRRGLPKAVCMNGTEAAQLSTKSRAEGRAPNPARKACSASSKIRRLSACKQQ

SEQ ID NO: 872301 - protein, 461 aa, Homo sapiens
MEVVDPQQLGMFTEGELMSVGMDTFIHRIDSTEVIYQPRRKRAKLIGKYLMGDLLGEGSYGKVKEVLDSETLCRRAVKILKKKKLRRIPNGEANVKKEIQLLRRLRHKNVIQLVDVLYNEEKQKMYMVMEYCVCGMQEMLDSVPEKRFPVCQAHGYFCQLIDGLEYLHSQGIVHKDIKPGNLLLTTGGTLKISDLGVAEVGTCWGGPGAPPPGHSLRAARHRHSTAPALHPFAADDTCRTSQGSPAFQPPEIANGLDTFSGFKVDIWSAGVTLYNITTGLYPFEGDNIYKLFENIGKGSYAIPGDCGPPLSDLLKGMLEYEPAKRFSIRQIRQHSWFRKKHPPAEAPVPIPPSPDTKDRWRSMTVVPYLEDLHGADEDEDLFDIEDDIIYTQDFTVPGQVPEEEASHNGQRRGLPKAVCMNGTEAAQLSTKSRAEGRAPNPARKACSASSKIRRLSACKQQ

SEQ ID NO: 872302 - protein, 305 aa, Homo sapiens
MVKEIKDLVALRCCADEACPTCARPHGYFCQLIDGLEYLHSQGIVHKDIKPGNLLLTTGGTLKISDLGVAEALHPFAADDTCRTSQGSPAFQPPEIANGLDTFSGFKVDIWSAGVTLYNITTGLYPFEGDNIYKLFENIGKGSYAIPGDCGPPLSDLLKGMLEYEPAKRFSIRQIRQHSWFRKKHPPAEAPVPIPPSPDTKDRWRSMTVVPYLEDLHGADEDEDLFDIEDDIIYTQDFTVPGQVPEEEASHNGQRRGLPKAVCMNGTEAAQLSTKSRAEGRAPNPARKACSASSKIRRLSACKQQ

SEQ ID NO: 872303 - protein, 433 aa, Homo sapiens; identical to SEQ ID NO: 872300

SEQ ID NO: 872304 - protein, 520 aa, Homo sapiens
MEVVDPQQLGMFTEGELMSVGMDTFIHRIDSTEVIYQPRRKRAKLIGKYLMGDLLGEGSYGKVKEVLDSETLCRRAVKILKKKKLRRIPNGEANVKKEIQLLRRLRHKNVIQLVDVLYNEEKQKMYMVMEYCVCGMQEMLDSVPEKRFPVCQAHGYFCQLIDGLEYLHSQGIVHKDIKPGNLLLTTGGTLKISDLGVAEALHPFAADDTCRTSQGSPAFQPPEIANGLDTFSGFKVDIWSAGVTLYNITTGLYPFEGDNIYKLFENIGKGSYAIPGDCGPPLSDLLKGMLEYEPAKRFSIRQIRQHSWFRKKHPPAEAPVPIPPSPDTKDRWRSMTVVPYLEDLHGADEDEDLFDIEDDIIYTQDFTVPGQVPEEEASHNGQRRGLPKAVCMNGTEAAQLSTKSRAEGRAPNPARKACSASSKIRRLTPQDLRSALQGRAGGQQGPGAALPPRPPGSARGLLTSQPRAEPSRAGVGGGRRPPCTLCGDYWPRPWPRAPQGAQRRPAAPPQTSWRVWRPGS

SEQ ID NO: 872305 - protein, 415 aa, Homo sapiens
MEVVDPQQLGMFTEGELMSVGMDTFIHRIDSTEVIYQPRRKRAKLIGKYLMGDLLGEGSYGKVKEVLDSETLCRRAVKILKKKKLRRIPNGEANVKKEIQLLRRLRHKNVIQLVDVLYNEEKQKMYMVMEYCVCGMQEMLDSVPEKRFPVCQAHGYFCQLIDGLEYLHSQGIVHKDIKPGNLLLTTGGTLKISDLGVAEALHPFAADDTCRTSQGSPAFQPPEIANGLDTFSGFKVDIWSAGVTLYNITTGLYPFEGDNIYKLFENIGKGSYAIPGDCGPPLSDLLKGMLEYEPAKRFSIRQIRQHSWFRKKHPPAEAPVPIPPSPDTKDRWRSMTVVPYLEDLHGADEDEDLFDIEDDIIYTQDFTVPGGEEASEAGLRAERGLQKSEGSDLSGEEALSAGAAVVPEEELRALA

SEQ ID NO: 872306 - protein, 294 aa, Homo sapiens
MEVVDPQQLGMFTEGELMSVGMDTFIHRIDSTEVIYQPRRKRAKLIGKYLMGDLLGEGSYGKVKEVLDSETLCRRAVKILKKKKLRRIPNGEANVKKEIQLLRRLRHKNVIQLVDVLYNEEKQKMYMVMEYCVCGMQEMLDSVPEKRFPVCQAHGYFCQLIDGLEYLHSQGIVHKDIKPGNLLLTTGGTLKISDLGVAEALHPFAADDTCQGRAGGQQGPGAALPPRPPGSARGLLTSQPRAEPSRAGVGGGRRPPCTLCGDYWPRPWPRAPQGAQRRPAAPPQTSWRVWRPGS

SEQ ID NO: 872307 - protein, 203 aa, Homo sapiens [sequence omitted]

SEQ ID NO: 872308 - protein, 113 aa, Homo sapiens
MEVVDPQQLGMFTEGELMSVGMDTFIHRIDSTEVIYQPRRKRAKLIGKYLMGDLLGEGSYGKVKEVLDSETLCRRAVKILKKKKLRRIPNGEANVKKEVWLAGVGAGPGQSRC

SEQ ID NO: 872309 - protein, 433 aa, Homo sapiens; identical to SEQ ID NO: 872300

SEQ ID NO: 872310 - protein, 433 aa, Homo sapiens; identical to SEQ ID NO: 872300

SEQ ID NO: 872311 - protein, 433 aa, Homo sapiens; identical to SEQ ID NO: 872300

SEQ ID NO: 872312 - protein, 375 aa, Homo sapiens
MEVVDPQQLGMFTEGELMSVGMDTFIHRIDSTEVIYQPRRKRAKLIGKYLMGDLLGEGSYGKVKEVLDSETLCRRAVKILKKKKLRRIPNGEANVKKYFCQLIDGLEYLHSQGIVHKDIKPGNLLLTTGGTLKISDLGVAEALHPFAADDTCRTSQGSPAFQPPEIANGLDTFSGFKVDIWSAGVTLYNITTGLYPFEGDNIYKLFENIGKGSYAIPGDCGPPLSDLLKGMLEYEPAKRFSIRQIRQHSWFRKKHPPAEAPVPIPPSPDTKDRWRSMTVVPYLEDLHGADEDEDLFDIEDDIIYTQDFTVPGQVPEEEASHNGQRRGLPKAVCMNGTEAAQLSTKSRAEGRAPNPARKACSASSKIRRLSACKQQ

SEQ ID NO: 872313 - protein, 309 aa, Homo sapiens
MYMVMEYCVCGMQEMLDSVPEKRFPVCQAHGYFCQLIDGLEYLHSQGIVHKDIKPGNLLLTTGGTLKISDLGVAEALHPFAADDTCRTSQGSPAFQPPEIANGLDTFSGFKVDIWSAGVTLYNITTGLYPFEGDNIYKLFENIGKGSYAIPGDCGPPLSDLLKGMLEYEPAKRFSIRQIRQHSWFRKKHPPAEAPVPIPPSPDTKDRWRSMTVVPYLEDLHGADEDEDLFDIEDDIIYTQDFTVPGQVPEEEASHNGQRRGLPKAVCMNGTEAAQLSTKSRAEGRAPNPARKACSASSKIRRLSACKQQ

SEQ ID NO: 872314 - protein, 433 aa, Homo sapiens; identical to SEQ ID NO: 872300

SEQ ID NO: 872315 - protein, 148 aa, Homo sapiens
MAGATDVVEGTLLPRPSAGGSAPGGASQSCWGAAFQAGYTWACPGGGHGLGSSCKCVPVVGASQVPVALGLRPSAQATLAVSLPGQVPEEEASHNGQRRGLPKAVCMNGTEAAQLSTKSRAEGRAPNPARKACSASSKIRRLSACKQQ

SEQ ID NO: 872316 - protein, 283 aa, Homo sapiens
MEVVDPQQLGMFTEGELMSVGMDTFIHRIDSTEVIYQPRRKRAKLIGKYLMGDLLGEGSYGKVKEVLDSETLCRRAVKILKKKKLRRIPNGEANVKKEIQLLRRLRHKNVIQLVDVLYNEEKQKMYMVMEYCVCGMQEMLDSVPEKRFPVCQAHGCVRGAGALPERWPPCFCADHAPGPPERPAGPGRGTAGTGRSPPPSAARQCTRLVDFAAPGGAFPGGRGRREAASMHFMWRLLAPPVASCSAGRPAPSGGPAADQLAGVETRLLTPPCMQRHLEAARPL

SEQ ID NO: 872317 - protein, 129 aa, Homo sapiens
MEVVDPQQLGMFTEGELMSVGMDTFIHRIDSTEVIYQPRRKRAKLIGKYLMGDLLGEGSYGKVKEVLDSETLCRRAVKILKKKKLRRIPNGEANVKKKYGLLGSGPGRASHGADGSVFLPSFSFFRKKE

SEQ ID NO: 872318 - protein, 104 aa, Homo sapiens
SRVGAEHPSLQVKLLELQELVLPLVGNHEGHGKFLIAAQNPADEPTPGAPAPQELGAAGEQDVFYEVSLDNNVEPAPGAAREGSPHDNPTVQQIVQLSPVMQDT

SEQ ID NO: 872319 - protein, 107 aa, Homo sapiens
WPFETLNYNCDSPVSTWLGRPQNHGRRQKAFLTWWRQEKNEVEAKVETPDKPISDLVRLTIMRITWERLVPMIQLPPPGSHLQHVGILGDRIQVEIWVRTQRNHVRG

SEQ ID NO: 872320 - protein, 404 aa, Homo sapiens
MYTVGYSISFGSLAVAILIIGYFRRLHCTRNYIHMHLFVSFMLRATSIFVKDRVVHAHIGVKELESLIMQDDPQNSIEATSVDKSQYIGCKIAVVMFIYFLATNYYWILVEGLYLHNLIFVAFFSDTKYLWGFILIGWGFPAAFVAAWAVARATLADARCWELSAGDIKWIYQAPILAAIGLNFILFLNTVRVLATKIWETNAVGHDTRKQYRKLAKSTLVLVLVFGVHYIVFVCLPHSFTGLGWEIRMHCELFFNSFQGFFVSIIYCYCNGEVQAEVKKMWSRWNLSVDWKRTPPCGSRRCGSVLTTVTHSTSSQSQVAASTRMVLISGKAAKIASRQPDSHITLPGYVWSNSEQDCLPHSFHEETKEDSGRQGDDILMEKPSRPMESNPDTEGCQGETEDVL

SEQ ID NO: 872321 - protein, 597 aa, Homo sapiens
AGGPGPTTPAARRYWPQVCSGPAKLATWKLLPGSGGGSLLLPTAVPGMAGLGASLHVWGWLMLGSCLLARAQLDSDGTITIEEQIVLVLKAKVQCELNITAQLQEGEGNCFPEWDGLICWPRGTVGKISAVPCPPYIYDFNHKGVAFRHCNPNGTWDFMHSLNKTWANYSDCLRFLQPDISIGKQEFFERLYVMYTVGYSISFGSLAVAILIIGYFRRLHCTRNYIHMHLFVSFMLRATSIFVKDRVVHAHIGVKELESLIMQDDPQNSIEATSVDKSQYIGCKIAVVMFIYFLATNYYWILVEGLYLHNLIFVAFFSDTKYLWGFILIGWGFPAAFVAAWAVARATLADARCWELSAGDIKWIYQAPILAAIGLNFILFLNTVRVLATKIWETNAVGHDTRKQYRKLAKSTLVLVLVFGVHYIVFVCLPHSFTGLGWEIRMHCELFFNSFQGFFVSIIYCYCNGEVQAEVKKMWSRWNLSVDWKRTPPCGSRRCGSVLTTVTHSTSSQSQVAASTRMVLISGKAAKIASRQPDSHITLPGYVWSNSEQDCLPHSFHEETKEDSGRQGDDILMEKPSRPMESNPDTEGCQGETEDVL

SEQ ID NO: 872322 - protein, 199 aa, Homo sapiens [sequence omitted]

SEQ ID NO: 872323 - protein, 131 aa, Homo sapiens
RRGRQEGGGDVKRPSQPSPPATPTPTRQPSRDAWSGRWGEKARLLWVLPIASSSFSLSRQLRRRGARPGSASGRSRDPQPGARARAMQAPRAAPAAPLSYDRRLRGSSAGPSSLGSHSRCSRGSLRCCRLL

SEQ ID NO: 872324 - protein, 141 aa, Homo sapiens
MWVLGIAATFCGLFLLPGFALQIQCYQCEEFQLNNDCSSPEFIVNCTVNVQDMCQKEVMEQSAGIMYRKSCASSAACLIASAGYQSFCSPGKLNSVCISCCNTPLCNGPRPKKRGSSASALRPGLRTTILFLKLALFSAHC

SEQ ID NO: 872325 - protein, 227 aa, Homo sapiens
SHLSPFTDQLCWEDAEINDQRPGVRELPPEVAGGEKGEEELKLRRRFPRKWMLPKDVRKGDGNVRIGGGGTNALRRASGLPHHLLQGSGRKAKIAPGHPRESASFALQIQCYQCEEFQLNNDCSSPEFIVNCTVNVQDMCQKEVMEQSAGIMYRKSCASSAACLIASAGYQSFCSPGKLNSVCISCCNTPLCNGPRPKKRGSSASALRPGLRTTILFLKLALFSAHC

SEQ ID NO: 872326 - protein, 112 aa, Homo sapiens
MYAQALLVVGVLQRQAAAQHLHEHPPKLLRGHRVQERVDDRAEVEKRLREGEEDHVRPEVGPRPVVLGFGRSHDPPNLVGHPAYGQCHNNQPWADTSRRERQRKEKHSMRTQ

SEQ ID NO: 872327 - protein, 112 aa, Homo sapiens; identical to SEQ ID NO: 872326

SEQ ID NO: 872328 - protein, 112 aa, Homo sapiens; identical to SEQ ID NO: 872326

SEQ ID NO: 872329 - protein, 141 aa, Homo sapiens; identical to SEQ ID NO: 872324

SEQ ID NO: 872330 - protein, 141 aa, Homo sapiens; identical to SEQ ID NO: 872324

SEQ ID NO: 872331 - protein, 131 aa, Homo sapiens; identical to SEQ ID NO: 872323

SEQ ID NO: 872332 - protein, 141 aa, Homo sapiens; identical to SEQ ID NO: 872324

SEQ ID NO: 872333 - protein, 159 aa, Homo sapiens
MPPPPALFFQPSPPTPHLPDSPCRGLAPGREEQRALHKAGAVGGGVRMYAQALLVVGVLQRQAAAQHLHEHPPKLLRGHRVQERVDDRAEVEKRLREGEEDHVRPEVGPRPVVLGFGRSHDPPNLVGHPAYGQCHNNQPWADTSRRERQRKEKHSMRTQ

SEQ ID NO: 872334 - protein, 131 aa, Homo sapiens; identical to SEQ ID NO: 872323

SEQ ID NO: 872335 - protein, 222 aa, Homo sapiens
GSANFLALSAGAFSKAPQSSTSWGGSCRIKPAETPFLLTVPATAASASASQPLSEGKDKMKWKALFTAAILQAQLPITEAQSFGLLDPKLCYLLDGILFIYGVILTALFLRVKFSRSADAPAYQQGQNQLYNELNLGRREEYDVLDKRRGRDPEMGGKPRRKNPQEGLYNELQKDKMAEAYSEIGMKGERRRGKGHDGLYQGLSTATKDTYDALHMQALPPR

SEQ ID NO: 872336 - protein, 222 aa, Homo sapiens; identical to SEQ ID NO: 872335

SEQ ID NO: 872337 - protein, 153 aa, Homo sapiens [sequence omitted]

SEQ ID NO: 872338 - protein, 296 aa, Homo sapiens
RLRLVLLTGCAPCPQHRRGLGNGPRAAEPTYWCHGSPKDSSCGAVGGSGGPGTNSTRFLVFNSKTAELLSHHKVELTQEFPKEGWVEQDPKEILQSVYECIARTCEKLDELNIDISNIKAVGVSNQRETTVIWDKLTGEPLYNAVVWLDLRTQTTVEDLSKKIPGNSNFVKSKTGLPLSTYFSAVKLRWMLDNVRNVQKAVEEGRALFGTIDSWLIWSLTGGVNGGVHCTDVTNASRTMLFNIHSLEWDKELCDFFEIPMDLLPNVFSSSEIYGLIKTGALEGVPISGCWGTNVLH

SEQ ID NO: 872339 - protein, 658 aa, Homo sapiens
MRLKNLTFIIILIISGELYAEEKPCGFPHVENGRIAQYYYTFKSFYFPMSIDKKLSFFCLAGYTTESGRQEEQTTCTTEGWSPEPRCFKKCTKPDLSNGYISDVKLLYKIQENMHYGCASGYSSQPTCRKEHETCLAPELYNGNYSTTQKTFKVKDKVQYECATGYYTAGGKKTEEVECLTYGWSLTPKCTKLKCSSLRLIENGYFHPVKQTYEEGDVVQFFCHENYYLSGSDLIQCYNFGWYPESPVCEGRRNRCPPPPLPINSKIQTHSTTYRHGEIVHIECELNFEIHGSAEIRCEDGKWTEPPKCIEGQEKVACEEPPFIENGAANLHSKIYYNGDKVTYACKSGYLLHGSNEITCNRGKWTLPPECVENNENCKHPPVVMNGAVADGILASYATGSSVEYRCNEYYLLRGSKISRCEQGKWSSPPVCLEPCTVNVDYMNRNNIEMKWKYEGKVLHGDLIDFVCKQGYDLSPLTPLSELSVQCNRGEVKYPLCTRKESKGMCTSPPLIKHGVIISSTVDTYENGSSVEYRCFDHHFLEGSREAYCLDGMWTTPPLCLEPCTLSFTEMEKNNLLLKWDFDNRPHILHGEYIEFICRGDTYPAELYITGSILRMQCDRGQLKYPRCIPRQSKQTTGSGNQFNRPSELSEVKATFAI

SEQ ID NO: 872340 - protein, 661 aa, Homo sapiens
MRLKNLTFIIILIISGELYAEEKPCGFPHVENGRIAQYYYTFKSFYFPMSIDKKLSFFCLAGYTTESGRQEEQTTCTTEGWSPEPRCFKKCTKPDLSNGYISDVKLLYKIQENMHYGCASGYKTTGGKDEEVVQCLSDGWSSQPTCRKEHETCLAPELYNGNYSTTQKTFKVKDKVQYECATGYYTAGGKKTEEVECLTYGWSLTPKCTKLKCSSLRLIENGYFHPVKQTYEEGDVVQFFCHENYYLSGSDLIQCYNFGWYPESPVCEGRRNRCPPPPLPINSKIQTHSTTYRHGEIVHIECELNFEIHGSAEIRCEDGKWTEPPKCIEGQEKVACEEPPFIENGAANLHSKIYYNGDKVTYACKSGYLLHGSNEITCNRGKWTLPPECVENNENCKHPPVVMNGAVADGILASYATGSSVEYRCNEYYLLRGSKISRCEQGKWSSPPVCLEPCTVNVDYMNRNNIEMKWKYEGKVLHGDLIDFVCKQGYDLSPLTPLSELSVQCNRGEVKYPLCTRKESKGMCTSPPLIKHGVIISSTVDTYENGSSVEYRCFDHHFLEGSREAYCLDGMWTTPPLCLEPCTLSFTEMEKNNLLLKWDFDNRPHILHGEYIEFICRGDTYPAELYITGSILRMQCDRGQLKYPRCIPRQSTLSYQEPLRT

SEQ ID NO: 872341 - protein, 173 aa, Homo sapiens
MFGWNMKLTSEYHRNVTFLSCQFVSVMRMDYMVYFSFLTWIFIPLVVMCAIYLDIFYIIRNKLSLNLSNSKETGAFYGREFKTAKSLFLVLFLFALSWLPLSIINCIIYFNGEVPQLVLYMGILLSHANSMMNPIVYAYKIKKFKETYLLILKACVVCHPSDSLDTSIEKNSE

SEQ ID NO: 872342 - protein, 318 aa, Homo sapiens
MPNNSTALSLANVTYITMEIFIGLCAIVGNVLVICVVKLNPSLQTTTFYFIVSLALADIAVGVLVMPLAIVVSLGITIHFYSCLFMTCLLLIFTHASIMSLLAIAVDRYLRVKLTVRYKRVTTHRRIWLALGLCWLVSFLVGLTPMFGWNMKLTSEYHRNVTFLSCQFVSVMRMDYMVYFSFLTWIFIPLVVMCAIYLDIFYIIRNKLSLNLSNSKETGAFYGREFKTAKSLFLVLFLFALSWLPLSIINCIIYFNGEVPQLVLYMGILLSHANSMMNPIVYAYKIKKFKETYLLILKACVVCHPSDSLDTSIEKNSE

SEQ ID NO: 872343 - protein, 111 aa, Homo sapiens [sequence omitted]

SEQ ID NO: 872344 - protein, 135 aa, Homo sapiens
WAGEGWRELGTLQMAGWVLSAMGLPPSSKCGPEGRSCSPSIARRNQFLVPGSAQEVYIGGHECRAAQLASDPLSTEPSGWGWGCPPQQSSLPEMRWWRRGQSLEFLFGDFPEACSDIKSQQQQSVFKQRDFSGHL

SEQ ID NO: 872345 - protein, 62 aa, Homo sapiens
MTYQSFFPSRDEKNQSIIVSGESGAGKTVSAKYAMRYFATVGGSASETNIEEKVLASSPIME

SEQ ID NO: 872346 - protein, 157 aa, Homo sapiens
VCHPLHYTVIMNPQLCGLLVLGSWCISVMGSLLETLTVLRLSFCTEMEIPHFFCDLLEVLKLACSDTFINNVVIYFATGVLGVISFTGIFFSYYKIVFSILRISSAGRKHKAFSTCGSHLSVVTLFYGTGFGVYLSSAATPSSRTSLVASVMYTMVT

SEQ ID NO: 872347 - protein, 261 aa, Homo sapiens
MELQGCASTQVESENNQEEQKQVRLPESRLTPWEVWFIGKEKEERDRLQLKALEELNQQLEKRKEMEEREKRKIIAEEKHKEWVQKKNEQKRKEREQKINKEMEEKAAKELEKEYLQEKAKEKYQEWLKKKNAEECERKKKEKEKEKQQQAEIQEKKEIAEKKFQEWLENAKHKPRPAAKSYGYANGKLTGFYSGNSYPEPAFYNPIPWKPIHMPPPKEAKDLSGRKSKRPVISQPHKSSSLVIHKARSNLCLGTLCRIQR

SEQ ID NO: 872348 - protein, 387 aa, Homo sapiens
LWVISRIPRIDGFSADCRPRSRPSSDSCSVPMTGARGQGLEVVRSPSPPLPLSCSNSTRSLLSPLGHQSFQFDEDDGDGEDEEDVDDEEDVDEDAHDSEAKVASLRGMELQGCASTQVESENNQEEQKQVRLPESRLTPWEVWFIGKEKEERDRLQLKALENEINNKKKEERDRLQLKAQELNQQLEKRKEMEEREKRKIIAEEKHKEWVQKKNEQKRKEREQKINKEMEEKAAKELEKEYLQEKAKEKYQEWLKKKNAEECERKKKEKEKEKQQQAEIQEKKEIAEKKFQEWLENAKHKPRPAAKSYGYANGKLTGFYSGNSYPEPAFYNPIPWKPIHMPPPKEAKDLSGRKSKRPVISQPHKSSSLVIHKARSNLCLGTLCRIQR

SEQ ID NO: 872349 - protein, 188 aa, Homo sapiens
MSIITGITIKLYLFLFKKRKEREQKINKEMEEKAAKELEKEYLQEKAKEKYQEWLKKKNAEECERKKKEKEKEKQQQAEIQEKKEIAEKKFQEWLENAKHKPRPAAKSYGYANGKLTGFYSGNSYPEPAFYNPIPWKPIHMPPPKEAKDLSGRKSKRPVISQPHKSSSLVIHKARSNLCLGTLCRIQR

SEQ ID NO: 872350 - protein, 229 aa, Homo sapiens
MWAAGRWGPTFPSSYAGFSADCRPRSRPSSDSCSVPMTGARGQGLEVVRSPSPPLPLSCSNSTRSLLSPLGHQSFQFDEDDGDGEDEEDVDDEEDVDEDAHDSEAKVASLRGMELQGCASTQVESENNQEEQKQVRLPESRLTPWEVWFIGKEKEERDRLQLKALEELNQQLEKRKEMEEREKRKIIAEEKHKEWVQKKNEQVRRGKWIHTLTSLLQNISSYYTSLPRF

SEQ ID NO: 872351 - protein, 373 aa, Homo sapiens
MWAAGRWGPTFPSSYAGFSADCRPRSRPSSDSCSVPMTGARGQGLEVVRSPSPPLPLSCSNSTRSLLSPLGHQSFQFDEDDGDGEDEEDVDDEEDVDEDAHDSEAKVASLRGMELQGCASTQVESENNQEEQKQVRLPESRLTPWEVWFIGKEKEERDRLQLKALEELNQQLEKRKEMEEREKRKIIAEEKHKEWVQKKNEQKRKEREQKINKEMEEKAAKELEKEYLQEKAKEKYQEWLKKKNAEECERKKKEKEKEKQQQAEIQEKKEIAEKKFQEWLENAKHKPRPAAKSYGYANGKLTGFYSGNSYPEPAFYNPIPWKPIHMPPPKEAKDLSGRKSKRPVISQPHKSSSLVIHKARSNLCLGTLCRIQR

SEQ ID NO: 872352 - protein, 368 aa, Homo sapiens
LWVISRIPRIDGFSADCRPRSRPSSDSCSVPMTGARGQGLEVVRSPSPPLPLSCSNSTRSLLSPLGHQSFQFDEDDGDGEDEEDVDDEEDVDEDAHDSEAKVASLRGMELQGCASTQVESENNQEEQKQVRLPESRLTPWEVWFIGKEKEERDRLQLKALEELNQQLEKRKEMEEREKRKIIAEEKHKEWVQKKNEQKRKEREQKINKEMEEKAAKELEKEYLQEKAKEKYQEWLKKKNAEECERKKKEKEKEKQQQAEIQEKKEIAEKKFQEWLENAKHKPRPAAKSYGYANGKLTGFYSGNSYPEPAFYNPIPWKPIHMPPPKEAKDLSGRKSKRPVISQPHKSSSLVIHKARSNLCLGTLCRIQR

SEQ ID NO: 872353 - protein, 306 aa, Homo sapiens
LPVTVVLVKLEALVCQGEDEEDVDDEEDVDEDAHDSEAKVASLRGMELQGCASTQVESENNQEEQKQVRLPESRLTPWEVWFIGKEKEERDRLQLKALEELNQQLEKRKEMEEREKRKIIAEEKHKEWVQKKNEQKRKEREQKINKEMEEKAAKELEKEYLQEKAKEKYQEWLKKKNAEECERKKKEKEKEKQQQAEIQEKKEIAEKKFQEWLENAKHKPRPAAKSYGYANGKLTGFYSGNSYPEPAFYNPIPWKPIHMPPPKEAKDLSGRKSKRPVISQPHKSSSLVIHKARSNLCLGTLCRIQR

SEQ ID NO: 872354 - protein, 265 aa, Homo sapiens
MGVRLRSLDFILTQVESENNQEEQKQVRLPESRLTPWEVWFIGKEKEERDRLQLKALEELNQQLEKRKEMEEREKRKIIAEEKHKEWVQKKNEQKRKEREQKINKEMEEKAAKELEKEYLQEKAKEKYQEWLKKKNAEECERKKKEKEKEKQQQAEIQEKKEIAEKKFQEWLENAKHKPRPAAKSYGYANGKLTGFYSGNSYPEPAFYNPIPWKPIHMPPPKEAKDLSGRKSKRPVISQPHKSSSLVIHKARSNLCLGTLCRIQR

SEQ ID NO: 872355 - protein, 465 aa, Homo sapiens [sequence omitted]

SEQ ID NO: 872356 - protein, 464 aa, Homo sapiens
MPRPRSQLPQPNSQVEQILAEFQLQEEDLKKVMRRMQKEMDRGLRLETHEEASVKMLPTYVRSTPEGSEVGDFLSLDLGGTNFRVMLVKVGEGEEGQWSVKTKHQMYSIPEDAMTGTAEMLFDYISECISDFLDKHQMKHKKLPLGFTFSFPVRHEDIDKGILLNWTKGFKASGAEGNNVVGLLRDAIKRRGDFEMDVVAMVNDTVATMISCYYEDHQCEVGMIVGTGCNACYMEEMQNVELVEGDEGRMCVNTEWGAFGDSGELDEFLLEYDRLVDESSANPGQQLYEKLIGGKYMGELVRLVLLRLVDENLLFHGEASEQLRTRGAFETRFVSQVESDTGDRKQIYNILSTLGLRPSTTDCDIVRRACESVSTRAAHMCSAGLAGVINRMRESRSEDVMRITVGVDGSVYKLHPSFKERFHASVRRLTPSCEITFIESEEGSGRGAALVSAVACKKACMLGQ

SEQ ID NO: 872357 - protein, 149 aa, Homo sapiens
GGVRTGMPRAGMGASLRPGTGPHPDTGDRKQIYNILSTLGLRPSTTDCDIVRRACESVSTRAAHMCSAGLAGVINRMRESRSEDVMRITVGVDGSVYKLHPSFKERFHASVRRLTPSCEITFIESEEGSGRGAALVSAVACKKACMLGQ

SEQ ID NO: 872358 - protein, 288 aa, Homo sapiens
MLDDRARMEAAKKEKVEQILAEFQLQEEDLKKVMRRMQKEMDRGLRLETHEEASVKMLPTYVRSTPEGSEVGDFLSLDLGGTNFRVMLVKVGEGEEGQWSVKTKHQMYSIPEDAMTGTAEMLFDYISECISDFLDKHQMKHKKLPLGFTFSFPVRHEDIDKGILLNWTKGFKASGAEGNNVVGLLRDAIKRRGDFEMDVVAMVNDTVATMISCYYEDHQCEVGMIVGTGCNACYMEEMQNVELVEGDEGRMCVNTEWGAFGDSGELDEFLLEYDRLVDESSANPGQQL

SEQ ID NO: 872359 - protein, 442 aa, Homo sapiens
GTRIEKTGEHFRLVYDTKGRFAVHRITVEEAKYKLCKVRKITVGVKGIPHLVTHDARTIRYLDDRILASCRIRHEWSVKTKHQMYSIPEDAMTGTAEMLFDYISECISDFLDKHQMKHKKLPLGFTFSFPVRHEDIDKGILLNWTKGFKASGAEGNNVVGLLRDAIKRRGDFEMDVVAMVNDTVATMISCYYEDHQCEVGMIVGTGCNACYMEEMQNVELVEGDEGRMCVNTEWGAFGDSGELDEFLLEYDRLVDESSANPGQQLYEKLIGGKYMGELVRLVLLRLVDENLLFHGEASEQLRTRGAFETRFVSQVESDTGDRKQIYNILSTLGLRPSTTDCDIVRRACESVSTRAAHMCSAGLAGVINRMRESRSEDVMRITVGVDGSVYKLHPSFKERFHASVRRLTPSCEITFIESEEGSGRGAALVSAVACKKACMLGQ

SEQ ID NO: 872360 - protein, 368 aa, Homo sapiens
MFAKGKGSAVPSDGQAREKLALYVYEYLLHVGAQKSAQTFLSEIRWEKNITLGEPPGFLHSWWCVFWDLYCAAPERRDTCEHSSEAKAFHDYSAAAAPSPVLGNIPPNDGMPGGPIPPGFFQGPPGSQPSPHAQPPPHNPSSMMGPHSQPPGGVPGTQPLLPNSMDPTRQQGHPNMGGSMQRMNPPRGMGPMGPGPQNYGSGMRPPPNSLGPAMPGINMGPGAGRPWPNPNSANSIPYSSSSPGTYVGPPGGGGPPGTPIMPSPADSTNSSDNIYTMINPVPPGGSRSNFPMGPGSDGPMGGMGGMEPHHMNGSLGSGDIDGLPKNSPNNISGISNPPGTPRDDGELGGNFLHSFQNDNYSPSMTMSV

SEQ ID NO: 872361 - protein, 206 aa, Homo sapiens
MFAKGKGSAVPSDGQAREKLALYVYEYLLHVGAQKSAQTFLSEIRWEKNITLGEPPGFLHSWWCVFWDLYCAAPERRDTCEHSSEAKAFHDYSAAAAPSPVLGNIPPNDGMPGGPIPPGFFQPFMSPRYAGGPRPPIRMGNQPPGGVPGTQPLLPNSMDPTRQQGHPNMGGSMQRMNPPRGMGPMGPGPQNYGSGMRPRHSARHRP

SEQ ID NO: 872362 - protein, 388 aa, Homo sapiens
MFAKGKGSAVPSDGQAREKLALYVYEYLLHVGAQKSAQTFLSEIRWEKNITLGEPPGFLHSWWCVFWDLYCAAPERRDTCEHSSEAKAFHDYSAAAAPSPVLGNIPPNDGMPGGPIPPGFFQGPPGSQPSPHAQPPPHNPSSMMGPHSQPFMSPRYAGGPRPPIRMGNQPPGGVPGTQPLLPNSMDPTRQQGHPNMGGSMQRMNPPRGMGPMGPGPQNYGSGMRPPPNSLGPAMPGINMGPGAGRPWPNPNSANSIPYSSSSPGTYVGPPGGGGPPGTPIMPSPADSTNSSDNIYTMINPVPPGGSRSNFPMGPGSDGPMGGMGGMEPHHMNGSLGSGDIDGLPKNSPNNISGISNPPGTPRDDGELGGNFLHSFQNDNYSPSMTMSV

SEQ ID NO: 872363 - protein, 361 aa, Homo sapiens
MFAKGKGSAVPSDGQAREKLALYVYEYLLHVGAQKSAQTFLSEIRWEKNITLGEPPGFLHSWWCVFWDLYCAAPERRDTCEHSSEAKAFHDYSAAAAPSPVLGNIPPNDGMPGGPIPPGFFQPFMSPRYAGGPRPPIRMGNQPPGGVPGTQPLLPNSMDPTRQQGHPNMGGSMQRMNPPRGMGPMGPGPQNYGSGMRPPPNSLGPAMPGINMGPGAGRPWPNPNSANSIPYSSSSPGTYVGPPGGGGPPGTPIMPSPADSTNSSDNIYTMINPVPPGGSRSNFPMGPGSDGPMGGMGGMEPHHMNGSLGSGDIDGLPKNSPNNISGISNPPGTPRDDGELGGNFLHSFQNDNYSPSMTMSV

SEQ ID NO: 872364 - protein, 223 aa, Homo sapiens
MGNQPPGGVPGTQPLLPNSMDPTRQQGHPNMGGSMQRMNPPRGMGPMGPGPQNYGSGMRPPPNSLGPAMPGINMGPGAGRPWPNPNSANSIPYSSSSPGTYVGPPGGGGPPGTPIMPSPADSTNSSDNIYTMINPVPPGGSRSNFPMGPGSDGPMGGMGGMEPHHMNGSLGSGDIDGLPKNSPNNISGISNPPGTPRDDGELGGNFLHSFQNDNYSPSMTMSV

SEQ ID NO: 872365 - protein, 341 aa, Homo sapiens
MFAKGKGSAVPSDGQAREKLALYVYEYLLHVGAQKSAQTFLSEIRWEKNITLGEPPGFLHSWWCVFWDLYCAAPERRDTCEHSSEAKAFHDYSAAAAPSPVLGNIPPNDGMPGGPIPPGFFQPPGGVPGTQPLLPNSMDPTRQQGHPNMGGSMQRMNPPRGMGPMGPGPQNYGSGMRPPPNSLGPAMPGINMGPGAGRPWPNPNSANSIPYSSSSPGTYVGPPGGGGPPGTPIMPSPADSTNSSDNIYTMINPVPPGGSRSNFPMGPGSDGPMGGMGGMEPHHMNGSLGSGDIDGLPKNSPNNISGISNPPGTPRDDGELGGNFLHSFQNDNYSPSMTMSV

SEQ ID NO: 872366 - protein, 388 aa, Homo sapiens; identical to SEQ ID NO: 872362

SEQ ID NO: 872367 - protein, 388 aa, Homo sapiens; identical to SEQ ID NO: 872362

SEQ ID NO: 872368 - protein, 388 aa, Homo sapiens; identical to SEQ ID NO: 872362

SEQ ID NO: 872369 - protein, 388 aa, Homo sapiens; identical to SEQ ID NO: 872362

SEQ ID NO: 872370 - protein, 388 aa, Homo sapiens; identical to SEQ ID NO: 872362

SEQ ID NO: 872371 - protein, 383 aa, Homo sapiens
MFAKGKGSAVPSDGQAREKLALYVYEYLLHVGAQKSAQTFLSEIRWEKNITLGEPPGFLHSWWCVFWDLYCAAPERRDTCEHSSEAKAFHDYSAAAAPSPVLGNIPPNDGMPGGPIPPGFFQPFMSPRYAGGPRPPIRMGNQPPGGVPGTQPLLPNSMDPTRQQGHPNMGGSMQRMNPPRGMGPMGPGPQNYGSGMRPPPNSLGPAMPGINMGPGAGRPWPNPNSANSIPYSSSSPGTYVGPPGGGGPPGTPIMPSPADSTNSSDNIYTMINPVPPGGSRSNFPMGPGSDGPMGGMGGMEPHHMNGSLGSGDIDGLPKNSPNNISGISNPPGTPRDDGELGGNFLHLQKTLSPAEDECVIPPLEKLRSGLGGKPICKEGSDGG

SEQ ID NO: 872372 - protein, 104 aa, Homo sapiens
GGGGSGAGGAEGGAGGAGRARERAESGRPCGRRRRHPQAEPARKEFQGDGAAAGADALTAGKSAEPAPGGEGGERGEESASERESERAPGRGPGARGSSGEPER

SEQ ID NO: 872373 - protein, 160 aa, Homo sapiens
MGNQPPGGVPGTQPLLPNSMDPTRQQGHPNMGGSMQRMNPPRGMGPMGPGPQNYGSGMRPPPNSLGPAMPGINMGPGAGRPWPNPNSANSIPYSSSSPGTYVGPPGGGGPPGTPIMPSPADSTNSSDNIYTMINPVPPGGSRSNVSLLSNNLHIRHHNKS

SEQ ID NO: 872374 - protein, 215 aa, Homo sapiens
MFAKGKGSAVPSDGQAREKLALYVYEYLLHVGAQKSAQTFLSEIRWEKNITLGEPPGFLHSWWCVFWDLYCAAPERRDTCEHSSEAKAFHDYSAAAAPSPVLGNIPPNDGMPGGPIPPGFFQGPPGSQPSPHAQPPPHNPSSMMGPHSQPPGGVPGTQPLLPNSMDPTRQQGHPNMGGSMQRMNPPRGMGPMGPGPQNYGSGGDTPILGRMPDTL

SEQ ID NO: 872375 - protein, 377 aa, Homo sapiens
MARQAREKLALYVYEYLLHVGAQKSAQTFLSEIRWEKNITLGEPPGFLHSWWCVFWDLYCAAPERRDTCEHSSEAKAFHDYSAAAAPSPVLGNIPPNDGMPGGPIPPGFFQGPPGSQPSPHAQPPPHNPSSMMGPHSQPFMSPRYAGGPRPPIRMGNQPPGGVPGTQPLLPNSMDPTRQQGHPNMGGSMQRMNPPRGMGPMGPGPQNYGSGMRPPPNSLGPAMPGINMGPGAGRPWPNPNSANSIPYSSSSPGTYVGPPGGGGPPGTPIMPSPADSTNSSDNIYTMINPVPPGGSRSNFPMGPGSDGPMGGMGGMEPHHMNGSLGSGDIDGLPKNSPNNISGISNPPGTPRDDGELGGNFLHSFQNDNYSPSMTMSV

SEQ ID NO: 872376 - protein, 251 aa, Homo sapiens
MPGGPIPPGFFQPFMSPRYAGGPRPPIRMGNQPPGGVPGTQPLLPNSMDPTRQQGHPNMGGSMQRMNPPRGMGPMGPGPQNYGSGMRPPPNSLGPAMPGINMGPGAGRPWPNPNSANSIPYSSSSPGTYVGPPGGGGPPGTPIMPSPADSTNSSDNIYTMINPVPPGGSRSNFPMGPGSDGPMGGMGGMEPHHMNGSLGSGDIDGLPKNSPNNISGISNPPGTPRDDGELGGNFLHSFQNDNYSPSMTMSV

SEQ ID NO: 872377 - protein, 388 aa, Homo sapiens; identical to SEQ ID NO: 872362

SEQ ID NO: 872378 - protein, 388 aa, Homo sapiens; identical to SEQ ID NO: 872362

SEQ ID NO: 872379 - protein, 388 aa, Homo sapiens; identical to SEQ ID NO: 872362

SEQ ID NO: 872380 - protein, 143 aa, Homo sapiens
MAMTWDMETVTSAFWSRDPRISVIVCTGLGGWSSGFLCFFSLFVLSQRWDTDQNCSVYAWDWMERLWSSCGGWGDTDNQTDVLAPVLFLLSKTNKPDSGACPLPGGCSWPHSPHHPTETFVSCPGRHPNSLYIDMPFSFLPPL

SEQ ID NO: 872381 - protein, 388 aa, Homo sapiens; identical to SEQ ID NO: 872362

SEQ ID NO: 872382 - protein, 298 aa, Homo sapiens
MFAKGKGSAVPSDGQAREKLALYVYEYLLHVGAQKSAQTFLSEIRWEKNITLGEPPGFLHSWWCVFWDLYCAAPERRDTCEHSSEAKAFHDYSAAAAPSPVLGNIPPNDGMPGGPIPPGFFQPFMSPRYAGGPRPPIRMGNQPPGGVPGTQPLLPNSMDPTRQQGHPNMGGSMQRMNPPRGMGPMGPGPQNYGSGMRPPPNSLGPAMPGINMGPGAGRPWPNPNSANSIPYSSSSPGTYVGPPGGGGPPGTPIMPSPADSTNSSDNIYTMINPVPPGGSRSNVSLLSNNLHIRHHNKS

SEQ ID NO: 872383 - protein, 113 aa, Homo sapiens [sequence omitted]

SEQ ID NO: 872384 - protein, 791 aa, Homo sapiens
RYRDTLRRAILLLSPQGAHSFINEAVETNLASKDSHWVFVNEEISDPEILDLVHSALGRMTVVRQIFPSAKDNQKCTRNNHRISSLLCDPQEGYLQMLQISNLYLYDSVLMLANAFHRKLEDRKWHSMASLNCIRKSTKPWNGGRSMLDTIKKGHITGLTGVMEFREDSSNPYVQFEILGTTYSETFGKDMRKLATWDSEKGLNGSLQERPMGSRLQGLTLKVVTVLEEPFVMVAENILGQPKRYKGFSIDVLDALAKALGFKYEIYQAPDGRYGHQLHNTSWNGMIGELISKRADLAISAITITPERESVVDFSKRYMDYSVGILIKKPEEKISIFSLFAPFDFAVWACIAAAIPVVGVLIFVLNRIQAVRAQSAAQPRPSASATLHSAIWIVYGAFVQQGGESSVNSMAMRIVMGSWWLFTLIVCSSYTANLAAFLTVSRMDNPIRTFQDLSKQVEMSYGTVRDSAVYEYFRAKGTNPLEQDSTFAELWRTISKNGGADNCVSSPSEGIRKAKKGNYAFLWDVAVVEYAALTDDDCSVTVIGNSISSKGYGIALQHGSPYRDLFSQRILELQDTGDLDVLKQKWWPHMGRCDLTSHASAQADGKSLKLHSFAGVFCILAIGLLLACLVAALELWWNSNRCHQETPKEDKEVNLEQVHRRMNSLMDEDIAHKQISPASIELSALEMGGLAPTQTLEPTREYQNTQLSVSTFLPEQSSHGTSRTLSSGPSSNLPLPLSSSATMPSMQCKHRSPNGGLFRQSPVKTPIPMSFQPVPGGVLPEALDTSHGTSI

SEQ ID NO: 872385 - protein, 791 aa, Homo sapiens; identical to SEQ ID NO: 872384

SEQ ID NO: 872386 - protein, 739 aa, Homo sapiens
RYRDTLRRAILLLSPQGAHSFINEAVETNLASKDSHWVFVNEEISDPEILDLVHSALGRMTVVRQIFPSAKDNQKCTRNNHRISSLLCDPQEGYLQMLQISNLYLYDSVLMLANAFHRKLEDRKWHSMASLNCIRKSTKPWNGGRSMLDTIKKGHITGLTGVMEFREDSSNPYVQFEILGTTYSETFGKDMRKLATWDSEKGLNGSLQERPMGSRLQGLTLKVVTVLEEPFVMVAENILGQPKRYKGFSIDVLDALAKALGFKYEIYQAPDGRYGHQLHNTSWNGMIGELISKRADLAISAITITPERESVVDFSKRYMDYSVGILIKKPEEKISIFSLFAPFDFAVWACIAAAIPVVGVLIFVLNRIQAVRAQSAAQPRPSASATLHSAIWIVYGAFVQQGGESSVNSMAMRIVMGSWWLFTLIVCSSYTANLAAFLTVSRMDNPIRTFQDLSKQVEMSYGTVRDSAVYEYFRAKGTNPLEQDSTFAELWRTISKNGGADNCVSSPSEGIRKAKKGNYAFLWDVAVVEYAALTDDDCSVTVIGNSISSKGYGIALQHGSPYRDLFSQRILELQDTGDLDVLKQKWWPHMGRCDLTSHASAQADGKSLKLHSFAGVFCILAIGLLLACLVAALELWWNSNRCHQETPKEDKEVNLEQVHRRMNSLMDEDIAHKQISPASIELSALEMGGLAPTQQSFLIQENNNTNHTHSHTHTYTETLSFFLYICVNNDRMEWGKSVF

SEQ ID NO: 872387 - protein, 46 aa, Homo sapiens
GSKPGERERRSVGQYRGRAGLCLLRWPQGMREKEGAGEAGKAWRMQ

SEQ ID NO: 872388 - protein, 137 aa, Homo sapiens
VLAPRPKRATASALGTESPRFLDRPDFFDYPDSDQARLLAVAQFIGEKPIVFINSGSSPGLFHHILVGLLVVAFFFLLFQFCTHIIVGGKEKTRRCPQTKRHRYSAKISPGQGQPSVKGKMQSKRSQGQRKFHVLGE

SEQ ID NO: 872389 - protein, 523 aa, Homo sapiens
RFEQSRQAGYSGFVAAWLHTWAAVGIPTGNSSYWCAAATLKDRVAAEAKDRELMEFAAENEGKSGGGLHSVAEGVRLSPEPGREGVRDLAGAEEFGGGEEGTGLTGIKEIGDGEEGSGQRPEEIPMDLTVVKQEIIDWPGTEGRLAGQWVEQEVEDRPEVKDENAGVLEVKQETDSSLVVKEAKVGEPEVKEEKVKEEVMDWSEVKEEKDNLEIKQEEKFVGQCIKEELMHGECVKEEKDFLKKEIVDDTKVKEEPPINHPVGCKRKLAMSRCETCGTEEAKYRCPRCMRYSCSLPCVKKHKAELTCNGVRDKTAYISIQQFTEMNLLSDYRFLEDVARTADHISRDAFLKRPISNKYMYFMKNRARRQGINLKLLPNGFTKRKENSTFFDKKKQQFCWHVKLQFPQSQAEYIEKRVPDDKTINEILKPYIDPEKSDPVIRQRLKAYIRSQTGVQILMKIEYMQQNLVRYYELDPYKSLLDNLRNKVIIEYPTLHVVLKGSNNDMKVLHQVKSESTKNVGNEN

SEQ ID NO: 872390 - protein, 471 aa, Homo sapiens
RFEQSRQAGYSGFVAAWLHTWAAVGIPTGNSSYWCAAATLKDRVAAEAKDRELMEFAAENEGKSGGGLHSVAEGVRLSPEPGREGVRDLAGAEEFGGGEEGTGLTGIKEIGDGEEGSGQRPEEIPMDLTVVKQEIIDWPGTEGRLAGQWVEQEVEDRPEVKDENAGVLEVKQETDSSLVVKEAKVGEPEVKEEKVKEEVMDWSEVKEEKDNLEIKQEEKFVGQCIKEELMHGECVKEEKDFLKKEIVDDTKVKEEPPINHPVGCKRKLAMSRCETCGTEEAKYRCPRCMRYSCSLPCVKKHKAELTCNGVRDKTAYISIQQFTEMNLLSDYRFLEDVARTADHISRDAFLKRPISNKYMYFMKNRARRQGINLKLLPNGFTKRKENSTFFDKKKQQFCWHVKLQFPQSQAEYIEKRVPDDKTINEILKPYIDPEKSDPVIRQRLKAYIRSQTGVQILMKIEYMQQNLVSEE

SEQ ID NO: 872391 - protein, 171 aa, Homo sapiens
  misc_feature (11)..(11): Xaa can be any naturally occurring amino acid
RVLEAFGSGSXHTARRQGINLKLLPNGFTKRKENSTFFDKKKQQFCWHVKLQFPQSQAEYIEKRVPDDKTINEILKPYIDPEKSDPVIRQRLKAYIRSQTGVQILMKIEYMQQNLVRYYELDPYKSLLDNLRNKVIIEYPTLHVVLKGSNNDMKVLHQVKSESTKNVGNEN

SEQ ID NO: 872392 - protein, 118 aa, Homo sapiens
RFEQSRQAGYSGFVAAWLHTWAAVGIPTGNSSYWCAAATLKDRVAAEAKDRELMEFAAENEGKSGGGLHSVAEGVRLSPEPGREGVRDLAGAEEFGGGEEGTGLTGIKEIGDGEEGMV

SEQ ID NO: 872393 - protein, 1166 aa, Homo sapiens
MDQTQNKPTPLGTMLKNFKKGFNGDYGVTMTPGKLRTLCEIDWPTLEVGWPSEGSLDRSLVSKVWHKVTSKSGHSDQFPYIDTWLQLVLDPPQWLRGQAAAVLVAKGQIVKEGFCSTRCGKSTPEVLFDQTSEDPLQEMAPVIPVLPSPYQGERLPTFESTVLAPLPDKCIPRPLRVDKRGGEASGETPPLAAHLRPKTGIQMPLREQQYTGIDEDGHMVESRVFVYQPFTSADLLNWKNNTPSYTEKPQALIDLLQTIIQTHNPTWADCHQLLMFLFKTDERRRVLQAATKWLEEHALADYQNPQEYVRTQLPGTDPQWDPNEREDMQRLNRYRKALLEGLKRRAQKATNINKVSEVIQGKEESPAKFYERLCEAYCMYTPFDPDSPENQRMINMALVSQSTEDIRRKLQKKAGFAGMNTSQLLEIANQVFVNRDAASRKENHIENERQARRNADLLAAAIRGVPPKEAREKGGPGKETQPGCQSLQCNQCAYRKEIGYWKNKCPQLKGKQGDSEQEAPDKEEGALLNLAEGLLDRGGLGSRTSKEPMVRMTVGGKDIDFLVDTSAEHSVVTASVAPLSKKTIDIIGAMGVSAKQAFCLPQTCTIGGHKVIHQFLYMPDCPLPLLGRDLLSKLRATISFTEHGSLLLKLPGTGVIMTLMLPREEEWRLFLTEPGQEIRPALAKRWPRVWAEDNPPGLAVNQAPVLIEVKPGVQPVRQKQYPVLREALEGIQVHLKCLRTFRIIVPCQSPWNTPLLPVPKPGTKDYRPVQDLRLVNQATVTLHPTVPNLYTLLGLLPAEDSWFTCLDLKDAFFSIRLAPERQKLFAFQWEDPESGVTTQYTWTQLPQRFKNSPTIFGEALARDLQKFPTRDLGCVLLQYVDDLLLGHPTAVGCAKGTDALLRHLEDCGYKVSKKKSSDLPTAGMLLGIYYPTGGAQPGSERKQVICNLPEPKTRRQVREFLGAVGFCRLWIPNFAVLAKPLYEVTKAGDQEPFEWGSQQQQAFHELKERLMSVPALGLPDLTKPFTLYVSESEKMAVGVLTQTVGPWLRPVAYLSKQLDGVSKGWPPCLRALAATALLVQEADKLILGQNLNIKDPHAVVTLMNTRGHHWLTNARLTKYQSLLCENPHITIEVCNTLNPATLLPVLEIPVEHDCVEVLDSVYSGHQ

SEQ ID NO: 872394 - protein, 87 aa, Homo sapiens
MAAQITQRKWEAAHEAEQQTAYLEGRCVEWLRRYLENRKETLQHTCTRDHGRLPDRLLSPGLASHKDGRQMGPTLEYHPPSGPEGEE

SEQ ID NO: 872395 - protein, 209 aa, Homo sapiens
QPGKKLKHFGQGYTTRNTGTRPGGGFGLAVQARPLRRGPACSAPARVLGRPVAPRLPGAEGQPARRRRLPGPPSARRRWRPRVARHFRRVPGWPDDVAESEEEAEEARGAGEAQERAVTATAAAEEAAAGPGPVRLSAPRGCESAAAEAAAAEEAAAGGGVGEPAPGRRGAEDEAAAWRSWRGGGRRAVAAAAAAAPDPGGRARTHVSR

SEQ ID NO: 872396 - protein, 589 aa, Homo sapiens
MRPLPGALGVAAAAALWLLLLLLPRTRADEHEHTYQDKEEVVLWMNTVGPYHNRQETYKYFSLPFCVGSKKSISHYHETLGEALQGVELEFSGLDIKFKDDVMPATYCEIDLDKEKRDAFVYAIKNHYWYQMYIDDLPIWGIVGEADENGEDYYLWTYKKLEIGFNGNRIVDVNLTSEGKVKLVPNTKIQMSYSVKWKKSDVKFEDRFDKYLDPSFFQHRIHWFSIFNSFMMVIFLVGLVSMILMRTLRKDYARYSKEEEMDDMDRDLGDEYGWKQVHGDVFRPSSHPLIFSSLIGSGCQIFAVSLIVIIVAMIEDLYTERGSMLSTAIFVYAATSPVNGYFGGSLYARQGGRRWIKQMFIGAFLIPAMVCGTAFFINFIAIYYHASRAIPFGTMVAVCCICFFVILPLNLVGTILGRNLSGQPNFPCRVNAVPRPIPEKKWFMEPAVIVCLGGILPFGSIFIEMYFIFTSFWAYKIYYVYGFMMLVLVILCIVTVCVTIVCTYFLLNAEDYRWQWTSFLSAASTAIYVYMYSFYYYFFKTKMYGLFQTSFYFGYMAVFSTALGIMCGAIGYMGTSAFVRKIYTNVKID

SEQ ID NO: 872397 - protein, 589 aa, Homo sapiens; identical to SEQ ID NO: 872396

SEQ ID NO: 872398 - protein, 589 aa, Homo sapiens; identical to SEQ ID NO: 872396

SEQ ID NO: 872399 - protein, 575 aa, Homo sapiens
MRPLPGALGVAAAAALWLLLLLLPRTRADEHEHTYQDKEEVVLWMNTVGPYHNRQETYKYFSLPFCVGSKKSISHYHETLGEALQGVELEFSGLDIKFKDDVMPATYCEIDLDKEKRDAFVYAIKNHYWYQMYIDDLPIWGIVGEADENGEDYYLWTYKKLEIGFNGNRIVDVNLTSEGKVKLVPNTKIQMSYSVKWKKSDVKFEDRFDKYLDPSFFQHRIHWFSIFNSFMMVIFLVGLVSMILMRTLRKDYARYSKEEEMDDMDRDLGDEYGWKQVHGDVFRPSSHPLIFSSLIGSGCQIFAVSLIVIIVAMIEDLYTERGSMLSTAIFVYAATSPVNGYFGGSLYARQGGRRWIKQMFIGAFLIPAMVCGTAFFINFIAIYYHASRAIPFGTMVAVCCICFFVILPLNLVGTILGRNLSGQPNFPCRVNAVPRPIPEKKWFMEPAVIVCLGGILPFGSIFIEMYFIFTSFWAYKIYYVYGFMMLVLVILCIVTVCVTIVCTYFLLNAEDYRCAIHSKEIYLLSPSPHQAMDKFSLCCINCNLCLHVFLLLLFFQNKDVWLISNIILLWIYGGI

SEQ ID NO: 872400 - protein, 589 aa, Homo sapiens; identical to SEQ ID NO: 872396

SEQ ID NO: 872401 - protein, 589 aa, Homo sapiens; identical to SEQ ID NO: 872396

SEQ ID NO: 872402 - protein, 589 aa, Homo sapiens; identical to SEQ ID NO: 872396

SEQ ID NO: 872403 - protein, 589 aa, Homo sapiens; identical to SEQ ID NO: 872396

SEQ ID NO: 872404 - protein, 67 aa, Homo sapiens
LAVRPEVLICRPGARDAWSHASVDAWAALKSFRKGLVLVFGCIEGLNKCMYVVCVCVCLLKEDVIHK

SEQ ID NO: 872405 - protein, 465 aa, Homo sapiens
MRPLPGALGVAAAAALWLLLLLLPRTRADEHEHTYQDKEEVVLWMNTVGPYHNRQETYKYFSLPFCVGSKKSISHYHETLGEALQGVELEFSGLDIKFKDDVMPATYCEIDLDKEKRDAFVYAIKNHYWYQMYIDDLPIWGIVGEADENGEDYYLWTYKKLEIGFNGNRIVDVNLTSEGKVKLVPNTKIQMSYSVKWKKSDVKFEDRFDKYLDPSFFQHRIHWFSIFNSFMMVIFLVGLVSMILMRTLRKDYARYSKEEEMDDMDRDLGDEYGWKQVHGDVFRPSSHPLIFSSLIGSGCQIFAVSLIVIIVAMIEDLYTERGSMLSTAIFVYAATSPVNGYFGGSLYARQGGRRWIKQMFIGAFLIPAMVCGTAFFINFIAIYYHASRAIPFGTMVAVCCICFFVILPLNLVGTILGRNLSGQPNFPCRVNAVPRPIPEKKWFMEPAVIVCLGGILPFGSIFIEM

SEQ ID NO: 872406 - protein, 589 aa, Homo sapiens; identical to SEQ ID NO: 872396

SEQ ID NO: 872407 - protein, 589 aa, Homo sapiens; identical to SEQ ID NO: 872396

SEQ ID NO: 872408 - protein, 589 aa, Homo sapiens; identical to SEQ ID NO: 872396

SEQ ID NO: 872409 - protein, 545 aa, Homo sapiens
MNTVGPYHNRQETYKYFSLPFCVGSKKSISHYHETLGEALQGVELEFSGLDIKFKDDVMPATYCEIDLDKEKRDAFVYAIKNHYWYQMYIDDLPIWGIVGEADENGEDYYLWTYKKLEIGFNGNRIVDVNLTSEGKVKLVPNTKIQMSYSVKWKKSDVKFEDRFDKYLDPSFFQHRIHWFSIFNSFMMVIFLVGLVSMILMRTLRKDYARYSKEEEMDDMDRDLGDEYGWKQVHGDVFRPSSHPLIFSSLIGSGCQIFAVSLIVIIVAMIEDLYTERGSMLSTAIFVYAATSPVNGYFGGSLYARQGGRRWIKQMFIGAFLIPAMVCGTAFFINFIAIYYHASRAIPFGTMVAVCCICFFVILPLNLVGTILGRNLSGQPNFPCRVNAVPRPIPEKKWFMEPAVIVCLGGILPFGSIFIEMYFIFTSFWAYKIYYVYGFMMLVLVILCIVTVCVTIVCTYFLLNAEDYRWQWTSFLSAASTAIYVYMYSFYYYFFKTKMYGLFQTSFYFGYMAVFSTALGIMCGAIGYMGTSAFVRKIYTNVKID

SEQ ID NO: 872410 - protein, 274 aa, Homo sapiens
ARFGSTYTKIGTIQRRLAWPLRKDDTQIREAFHIFEGRRWIKQMFIGAFLIPAMVCGTAFFINFIAIYYHASRAIPFGTMVAVCCICFFVILPLNLVGTILGRNLSGQPNFPCRVNAVPRPIPEKKWFMEPAVIVCLGGILPFGSIFIEMYFIFTSFWAYKIYYVYGFMMLVLVILCIVTVCVTIVCTYFLLNAEDYRWQWTSFLSAASTAIYVYMYSFYYYFFKTKMYGLFQTSFYFGYMAVFSTALGIMCGAIGYMGTSAFVRKIYTNVKID

SEQ ID NO: 872411 - protein, 589 aa, Homo sapiens; identical to SEQ ID NO: 872396

SEQ ID NO: 872412 - protein, 589 aa, Homo sapiens; identical to SEQ ID NO: 872396

SEQ ID NO: 872413 - protein, 589 aa, Homo sapiens; identical to SEQ ID NO: 872396

SEQ ID NO: 872414 - protein, 589 aa, Homo sapiens; identical to SEQ ID NO: 872396

SEQ ID NO: 872415 - protein, 203 aa, Homo sapiens
NKHITHQTRSPPAAICCCVIVETEVLKAPVFAGSVSSLSLQGHFQKTVKRMACPAFSTTDTPCMKTPGAQKSCLGPRNSMAPAKDDSSLPEYSAFNTSVHAAIRHGNWKLLTGYPGCGYWFPPPSQYNVSEIPSSDPPTKTLWLFDIDRDPEERHDLSREYPHIVTKLLSRLQFYHKHSVPVYFPAQDPRCDPKATGVWGPWM

SEQ ID NO: 872416 - protein, 533 aa, Homo sapiens
MGPRGAASLPRGPGPRRLLLPVVLPLLLLLLLAPPGSGAGASRPPHLVFLLADDLGWNDVGFHGSRIRTPHLDALAAGGVLLDNYYTQPLCTPSRSQLLTGRYQIRTGLQHQIIWPCQPSCVPLDEKLLPQLLKEAGYTTHMVGKWHLGMYRKECLPTRRGFDTYFGYLLGSEDYYSHERCTLIDALNVTRCALDFRDGEEVATGYKNMYSTNIFTKRAIALITNHPPEKPLFLYLALQSVHEPLQVPEEYLKPYDFIQDKNRHHYAGMVSLMDEAVGNVTAALKSSGLWNNTVFIFSTDNGGQTLAGGNNWPLRGRKWSLWEGGVRGVGFVASPLLKQKGVKNRELIHISDWLPTLVKLARGHTNGTKPLDGFDVWKTISEGSPSPRIELLHNIDPNFVDSSPCPRNSMAPAKDDSSLPEYSAFNTSVHAAIRHGNWKLLTGYPGCGYWFPPPSQYNVSEIPSSDPPTKTLWLFDIDRDPEERHDLSREYPHIVTKLLSRLQFYHKHSVPVYFPAQDPRCDPKATGVWGPWM

SEQ ID NO: 872417 - protein, 533 aa, Homo sapiens; identical to SEQ ID NO: 872416

SEQ ID NO: 872418 - protein, 220 aa, Homo sapiens
SSTRSIHLYWSQNIRKQRNKKSKIFSSLVLKICCCVIVETEVLKAPVFAGSVSSLSLQGHFQKTVKRMACPAFSTTDTPCMKTPGAQKSCLGPRNSMAPAKDDSSLPEYSAFNTSVHAAIRHGNWKLLTGYPGCGYWFPPPSQYNVSEIPSSDPPTKTLWLFDIDRDPEERHDLSREYPHIVTKLLSRLQFYHKHSVPVYFPAQDPRCDPKATGVWGPWM

SEQ ID NO: 872419 - protein, 413 aa, Homo sapiens
MGPRGAASLPRGPGPRRLLLPVVLPLLLLLLLAPPGSGAGASRPPHLVFLLADDLGWNDVGFHGSRIRTPHLDALAAGGVLLDNYYTQPLCTPSRSQLLTGRYQIRTGLQHQIIWPCQPSCVPLDEKLLPQLLKEAGYTTHMVGKWHLGMYRKECLPTRRGFDTYFGYLLGSEDYYSHERCTLIDALNVTRCALDFRDGEEVATGYKNMYSTNIFTKRAIALITNHPPEKPLFLYLALQSVHEPLQVPEEYLKPYDFIQDKNRHHYAGMVSLMDEAVGNVTAALKSSGLWNNTVFIFSTDNGGQTLAGGNNWPLRGRKWSLWEGGVRGVGFVASPLLKQKGVKNRELIHISDWLPTLVKLARGHTNGTKPLDGFDVWKTISEGSPSPRIELLHNIDPNFVDSSPYWPECSLLL

SEQ ID NO: 872420 - protein, 382 aa, Homo sapiens
MGPRGAASLPRGPGPRRLLLPVVLPLLLLLLLAPPGSGAGASRPPHLVFLLADDLGWNDVGFHGSRIRTPHLDALAAGGVLLDNYYTQPLCTPSRSQLLTGRYQIRTGLQHQIIWPCQPSCVPLDEKLLPQLLKEAGYTTHMVGKWHLGMYRKECLPTRRGFDTYFGYLLGSEDYYSHERCTLIDALNVTRCALDFRDGEEVATGYKNMYSTNIFTKRAIALITNHPPEKPLFLYLALQSVHEPLQVPEEYLKPYDFIQDKNRHHYAGMVSLMDEAVGNVTAALKSSGLWNNTVFIFSTDNGGQTLAGGNNWPLRGRKWSLWEGGVRGVGFVASPLLKQKGVKNRELIHISDWLPTLVKLARGHTNGTKPLDGFDVWKTIRC

SEQ ID NO: 872421 - protein, 533 aa, Homo sapiens; identical to SEQ ID NO: 872416

SEQ ID NO: 872422 - protein, 533 aa, Homo sapiens; identical to SEQ ID NO: 872416

SEQ ID NO: 872423 - protein, 413 aa, Homo sapiens; identical to SEQ ID NO: 872419

SEQ ID NO: 872424 - protein, 533 aa, Homo sapiens; identical to SEQ ID NO: 872416

SEQ ID NO: 872425 - protein, 97 aa, Homo sapiens
HPAPSDFYTRSPFLYPQAASVSTLGPRAGLDSAQSEPRLARGEGAAGRQAGKQDSQLPPSPQSRSSLEREAQASLSRRTCVCSVCAISQGPGCRWNA

SEQ ID NO: 872426 - protein, 1237 aa, Homo sapiens
NLNPVWEENFHFECHNSSDRIKVRVWDEDDDIKSRVKQRFKRESDDFLGQTIIEVRTLSGEMDVWYNLDKRTDKSAVSGAIRLHISVEIKGEEKVAPYHVQYTCLHENLFHFVTDVQNNGVVKIPDAKGDDAWKVYYDETAQEIVDEFAMRYGVESIYQAMTHFACLSSKYMCPGVPAVMSTLLANINAYYAHTTASTNVSASDRFAASNFGKERFVKLLDQLHNSLRIDLSMYRNNFPASSPERLQDLKSTVDLLTSITFFRMKVQELQSPPRASQVVKDCVKACLNSTYEYIFNNCHELYSREYQTDPAKKGEVPPEEQGPSIKNLDFWSKLITLIVSIIEEDKNSYTPCLNQFPQELNVGKISAEVMWNLFAQDMKYAMEEHDKHRLCKSADYMNLHFKVKWLYNEYVTELPSFKDRVPEYPAWFEPFVIQWLDENEEVSRDFLHGALERDKKDGFQQTSEHALFSCSVVDVFSQLNQSFEIIKKLECPDPQIVGHYMRRFAKTISNVLLQYADIISKDFASYCSKEKEKVPCILMNNTQQLRVQLEKMFEAMGGKELDAEASDILKELQVKLNNVLDELSRVFATSFQPHIEECVKQMGDILSQVKGTGNVPASACSSVAQDADNVLQPIMDLLDSNLTLFAKICEKTVLKRVLKELWKLVMNTMEKTIVLPPLTDQTMIGNLLRKHGKGLEKGRVKLPSHSDGTQMIFNAAKELGQLSKLKDHMVREEAKSLTPKQCAVVELALDTIKQYFHAGGVGLKKTFLEKSPDLQSLRYALSLYTQATDLLIKTFVQTQSAQGLGVEDPVGEVSVHVELFTHPGTGEHKVTVKVVAANDLKWQTSGIFRPFIEVNIIGPQLSDKKRKFATKSKNNSWAPKYNESFQFTLSADAGPECYELQVCVKDYCFAREDRTVGLAVLQLRELAQRGSAACWLPLGRRIHMDDTGLTVLRILSQRSNDEVAKEFVKLKSDTRSAEEGGAAACALARAVGRAALRLRGGRWAGRDGACALVGPPQGRGSGGSTPRVGCAYALDSAFPFGELGMEDAPPSREATPKGSDEGRSHIPNLRPRPQHLGGILSWDGGNLVPMEEATSRGSGTGRHHLMSPGKAIRWDPDPWDPRPIAKYGNLSSLEGGPWARGRALWSAPLGGLGTGGTRMLVGGPRNTGVPLDICAKNKWGEGGGWDFKSTCALGRPNPGGRGDGSGSPRCPYFPLGVCLSLSPNKPSPHIIEFNTPI

SEQ ID NO: 872427 - protein, 335 aa, Homo sapiens
MLGSGPGAGSWVESSPRAPAPHVLPPLTDQTMIGNLLRKHGKGLEKGRVKLPSHSDGTQMIFNAAKELGQLSKLKDHMVREEAKSLTPKQCAVVELALDTIKQYFHAGGVGLKKTFLEKSPDLQSLRYALSLYTQATDLLIKTFVQTQSAQGLGVEDPVGEVSVHVELFTHPGTGEHKVTVKVVAANDLKWQTSGIFRPFIEVNIIGPQLSDKKRKFATKSKNNSWAPKYNESFQFTLSADAGPECYELQVCVKDYCFAREDRTVGLAVLQLRELAQRGSAACWLPLGRRIHMDDTGLTVLRILSQRSNDEVAKEFVKLKSDTRSAEEGGAAPAP

SEQ ID NO: 872428 - protein, 196 aa, Homo sapiens
PTLSQEVPFSPPNQLKMPPRCWGRGLKLGMCPQHLGGILSWDGGNLVPMEEATSRGSGTGRHHLMSPGKAIRWDPDPWDPRPIAKYGNLSSLEGGPWARGRALWSAPLGGLGTGGTRMLVGGPRNTGVPLDICAKNKWGEGGGWDFKSTCALGRPNPGGRGDGSGSPRCPYFPLGVCLSLSPNKPSPHIIEFNTPI

SEQ ID NO: 872429 - protein, 340 aa, Homo sapiens
PSTHLQLIALGTRVGAQRELEALIVLGSPAIVLGFGANLRFLSLSWGPMMLTSMNGRKMPEVCHLRSLAAKELGQLSKLKDHMVREEAKSLTPKQCAVVELALDTIKQYFHAGGVGLKKTFLEKSPDLQSLRYALSLYTQATDLLIKTFVQTQSAQGLGVEDPVGEVSVHVELFTHPGTGEHKVTVKVVAANDLKWQTSGIFRPFIEVNIIGPQLSDKKRKFATKSKNNSWAPKYNESFQFTLSADAGPECYELQVCVKDYCFAREDRTVGLAVLQLRELAQRGSAACWLPLGRRIHMDDTGLTVLRILSQRSNDEVAKEFVKLKSDTRSAEEGGAAPAP

SEQ ID NO: 872430 - protein, 200 aa, Homo sapiens
MEQTEVLKPRTLADLIRILHQLFAGDEVNVEEVQAIMEAYESDPTEWAMYAKFDQYRYTRNLVDQGNGKFNLMILCWGEGHGSSIHDHTNSHCFLKMLQGNLKETLFAWPDKKSNEMVKKSERVLRENQCAYINDSIGLHRVENISHTEPAVSLHLYSPPFDTCHAFDQRTGHKNKVTMTFHSKFGIRTPNATSGSLENN

SEQ ID NO: 872431 - protein, 185 aa, Homo sapiens
MEQTEVLKPRTLADLIRILHQLFAGDEVNVEEVQAIMEAYESDPTEWAMYAKFDQYRYTRNLVDQGNGSIHDHTNSHCFLKMLQGNLKETLFAWPDKKSNEMVKKSERVLRENQCAYINDSIGLHRVENISHTEPAVSLHLYSPPFDTCHAFDQRTGHKNKVTMTFHSKFGIRTPNATSGSLENN

SEQ ID NO: 872432 - protein, 128 aa, Homo sapiens
MILCWGEGHGSSIHDHTNSHCFLKMLQGNLKETLFAWPDKKSNEMVKKSERVLRENQCAYINDSIGLHRVENISHTEPAVSLHLYSPPFDTCHAFDQRTGHKNKVTMTFHSKFGIRTPNATSGSLENN

SEQ ID NO: 872433 - protein, 200 aa, Homo sapiens; identical to SEQ ID NO: 872430

SEQ ID NO: 872434 - protein, 200 aa, Homo sapiens; identical to SEQ ID NO: 872430

SEQ ID NO: 872435 - protein, 104 aa, Homo sapiens
MLQGNLKETLFAWPDKKSNEMVKKSERVLRENQCAYINDSIGLHRVENISHTEPAVSLHLYSPPFDTCHAFDQRTGHKNKVTMTFHSKFGIRTPNATSGSLENN

SEQ ID NO: 872436 - protein, 136 aa, Homo sapiens
LKGAREDEPHRSEPDLCVHRVSSDPGSTALPGAWGYTRNLVDQGNGKFNLMILCWGEGHGSSIHDHTNSHCFLKMLQGNLKETLFAWPDKKSNEMVKKSERVLRENQCAYINDAGVGVEMDSDQGEGCCKYKEEHK

SEQ ID NO: 872437 - protein, 71 aa, Homo sapiens
LGISHGELSHSRAPLCRWVSRRAQLGAQFGRVSEPSFCAQQSHSKIHWRWDCAHSWLPFQAIQQPIVCHSH

SEQ ID NO: 872438 - protein, 109 aa, Homo sapiens
MGYYNKASECFQQAFDTTVELMSMPLMDETKVHYGIAKAHQMMLTVNNYIESADLTSLNYLLSWKESRGNIEPDPVTEEFRGSTVEAVSQNSERLEELSRFPGDQKNET

SEQ ID NO: 872439 - protein, 90 aa, Homo sapiens
  misc_feature (6)..(6): Xaa can be any naturally occurring amino acid
  misc_feature (8)..(8): Xaa can be any naturally occurring amino acid
  misc_feature (14)..(14): Xaa can be any naturally occurring amino acid
NAPTAXRXPAPEPXPLNQCRARFVYSSKSLEDPQWKLYLKTQNVWKNSVGFQVIKKMKLKAAFHLTSKQEEIHHVTLDFNTCNRSMLQII

SEQ ID NO: 872440 - protein, 475 aa, Homo sapiens [sequence omitted]

SEQ ID NO: 872441 - protein, 475 aa, Homo sapiens [sequence omitted]

SEQ ID NO: 872442 - protein, 86 aa, Homo sapiens
  misc_feature (16)..(16): Xaa can be any naturally occurring amino acid
MGDEHTRAGGRARRRXGGVRASLKSLEDPQWKLYLKTQNVWKNSVGFQVIKKMKLKAAFHLTSKQEEIHHVTLDFNTCNRSMLQII

SEQ ID NO: 872443 - protein, 314 aa, Homo sapiens
MPLEQRSQHCKPEEGLEARGEALGLVGAQAPATEEQEAASSSSTLVEVTLGEVPAAESPDPPQSPQGASSLPTTMNYPLWSQSYEDSSNQEEEGPSTFPDLESEFQAALSRKVAKLVHFLLLKYRAREPVTKAEMLGSVVGNWQYFFPVIFSKASDSLQLVFGIELMEVDPIGHVYIFATCLGLSYDGLLGDNQIMPKTGFLIIILAIIAKEGDCAPEEKIWEELSVLEVFEGREDSIFGDPKKLLTQYFVQENYLEYRQVPGSDPACYEFLWGPRALIETSYVKVLHHMVKISGGPRISYPLLHEWALREGEE

SEQ ID NO: 872444 - protein, 314 aa, Homo sapiens; identical to SEQ ID NO: 872443

SEQ ID NO: 872445 - protein, 314 aa, Homo sapiens; identical to SEQ ID NO: 872443

SEQ ID NO: 872446 - protein, 465 aa, Homo sapiens
HEVGSEQSARPMDSGEWDVLIAHFLGVDHCGHKHGPHHPEMAKKLSQMDQVIQGLVERLENDTLLVVAGDHGMTTNGDHGGDSELEVSAALFLYSPTAVFPSTPPEEPEVIPQVSLVPTLALLLGLPIPFGNIGEVMAELFSGGEDSQPHSSALAQASALHLNAQQVSRFLHTYSAATQDLQAKELHQLQNLFSKASADYQWLLQSPKGAEATLPTVIAELQQFLRGARAMCIESWARFSLSFLLLHLLAAGIPVTTPGPFTVPWQAVSAWALMATQTFYSTGHQPVFPAIHWHAAFVGFPEGHGSCTWLPALLVGANTFASHLLFAVGCPLLLLWPFLCESQGLRKRQQPPGNEADARVRPEEEEEPLMEMRLRDAPQHFYAALLQLGLKYLFILGIQILACALAASILRRHLMVWKVFAPKFIFEAVGFIVSSVGLLLGIALVMRVDGAVSSWFRQLFLAQQR

SEQ ID NO: 872447 - protein, 672 aa, Homo sapiens
MQKASVLLFLAWVCFLFYAGIALFTSGFLLTRLELTNHSSCQEPPGPGSLPWGSQGKPGACWMASRFSRVVLVLIDALRFDFAQPQHSHVPREPPVSLPFLGKLSSLQRILEIQPHHARLYRSQVDPPTTTMQRLKALTTGSLPTFIDAGSNFASHAIVEDNLIKQLTSAGRRVVFMGDDTWKDLFPGAFSKAFFFPSFNVRDLDTVDNGILEHLYPTMDSGEWDVLIAHFLGVDHCGHKHGPHHPEMAKKLSQMDQVIQGLVERLENDTLLVVAGDHGMTTNGDHGGDSELEVSAALFLYSPTAVFPSTPPEEPEVIPQVSLVPTLALLLGLPIPFGNIGEVMAELFSGGEDSQPHSSALAQASALHLNAQQVSRFLHTYSAATQDLQAKELHQLQNLFSKASADYQWLLQSPKGAEATLPTVIAELQQFLRGARAMCIESWARFSLSFLLLHLLAAGIPVTTPGPFTVPWQAVSAWALMATQTFYSTGHQPVFPAIHWHAAFVGFPEGHGSCTWLPALLVGANTFASHLLFAVGCPLLLLWPFLCESQGLRKRQQPPGNEADARVRPEEEEEPLMEMRLRDAPQHFYAALLQLGLKYLFILGIQILACALAASILRRHLMVWKVFAPKFIFEAVGFIVSSVGLLLGIALVMRVDGAVSSWFRQLFLAQQR

SEQ ID NO: 872448 - protein, 974 aa, Homo sapiens
MQKASVLLFLAWVCFLFYAGIALFTSGFLLTRLELTNHSSCQEPPGPGSLPWGSQGKPGACWMASRFSRVVLVLIDALRFDFAQPQHSHVPREPPVSLPFLGKLSSLQRILEIQPHHARLYRSQVDPPTTTMQRLKALTTGSLPTFIDAGSNFASHAIVEDNLIKQLTSAGRRVVFMGDDTWKDLFPGAFSKAFFFPSFNVRDLDTVDNGILEHLYPTMDSGEWDVLIAHFLGVDHCGHKHGPHHPEMAKKLSQMDQVIQGLVERLENDTLLVVAGDHGMTTNGDHGGDSELEVSAALFLYSPTAVFPSTPPEEPEVIPQVSLVPTLALLLGLPIPFGNIGEVMAELFSGGEDSQPHSSALAQASALHLNAQQVSRFLHTYSAATQDLQAKELHQLQNLFSKASADYQWLLQSPKGAEATLPTVIAELQQFLRGARAMCIESWARFSLVRMAGGTALLAASCFICLLASQWAISPGFPFCPLLLTPVAWGLVGAIAYAGLLGTIELKLDLVLLGAVAAVSSFLPFLWKAWAGWGSKRPLATLFPIPGPVLLLLLFRLAVFFSDSFVVAEARATPFLLGSFILLLVVQLHWEGQLLPPKLLTMPRLGTSATTNPPRHNGAYALRLGIGLLLCTRLAGLFHRCPEETPVCHSSPWLSPLASMVGGRAKNLWYGACVAALVALLAAVRLWLRRYGNLKSPEPPMLFVRWGLPLMALGTAAYWALASGADEAPPRLRVLVSGASMVLPRAVAGLAASGLALLLWKPVTVLVKAGAGAPRTRTVLTPFSGPPTSQADLDYVVPQIYRHMQEEFRGRLERTKSQGPLTVAAYQLGSVYSAAMVTALTLLAFPLLLLHAERISLVFLLLFLQSFLLLHLLAAGIPVTTPGPFTVPWQAVSAWALMATQTFYSTGHQPVFPAIHWHAAFVGFPEGHGSCTWLPALLVGANTFASHLLFADSGLCLGSLHPSQASHGLESVCP

SEQ ID NO: 872449 - protein, 1181 aa, Homo sapiens
RRRRRTSGCHCRMQKASVLLFLAWVCFLFYAGIALFTSGFLLTRLELTNHSSCQEPPGPGSLPWGSQGKPGACWMASRFSRVVLVLIDALRFDFAQPQHSHVPREPPVSLPFLGKLSSLQRILEIQPHHARLYRSQVDPPTTTMQRLKALTTGSLPTFIDAGSNFASHAIVEDNLIKQLTSAGRRVVFMGDDTWKDLFPGAFSKAFFFPSFNVRDLDTVDNGILEHLYPTMDSGEWDVLIAHFLGVDHCGHKHGPHHPEMAKKLSQMDQVIQGLVERLENDTLLVVAGDHGMTTNGDHGGDSELEVSAALFLYSPTAVFPSTPPEVRPGMFLICSPSNQPMYHYSILMNTSILGPQIHDPGYPPLSFLTKAPMSAIPNIDFSFVMNLLTTVIFLEEPEVIPQVSLVPTLALLLGLPIPFGNIGEVMAELFSGGEDSQPHSSALAQASALHLNAQQVGERAGFPGDRARVGMKEDNEPLFCPLTSLSPTFHTYPSSVIPPFPDSGQSWVLDFQVPPFVIPILASAPIYVSDLFPLALTFSLPGVPISSYLLSASCFICLLASQWAISPGFPFCPLLLTPVAWGLVGAIAYAGLLGTIELKLDLVLLGAVAAVSSFLPFLWKAWAGWGSKRPLATLFPIPGPVLLLLLFRLAVFFSDSFVVAEARATPFLLGSFILLLVVQLHWEGQLLPPKLLTMPRLGTSATTNPPRHNGAYALRLGIGLLLCTRLAGLFHRCPEETPVCHSSPWLSPLASMVGGRAKNLWYGACVAALVALLAAVRLWLRRYGNLKSPEPPMLFVRWGLPLMALGTAAYWALASGADEAPPRLRVLVSGASMVLPRAVAGLAASGLALLLWKPVTVLVKAGAGAPRTRTVLTPFSGPPTSQADLDYVVPQIYRHMQEEFRGRLERTKSQGPLTVAAYQLGSVYSAAMVTALTLLAFPLLLLHAERISLVFLLLFLQSFLLLHLLAAGIPVTTPGPFTVPWQAVSAWALMATQTFYSTGHQPVFPAIHWHAAFVGFPEGHGSCTWLPALLVGANTFASHLLFAVGCPLLLLWPFLCESQGLRKRQQPPGNEADARVRPEEEEEPLMEMRLRDAPQHFYAALLQLGLKYLFILGIQILACALAASILRRHLMVWKVFAPKFIFEAVGFIVSSVGLLLGIALVMRVDGAVSSWFRQLFLAQQR

SEQ ID NO: 872450 - protein, 917 aa, Homo sapiens
MCRGGRCVNYICLGSFNRLLASFNPSFNVRDLDTVDNGILEHLYPTMDSGEWDVLIAHFLGVDHCGHKHGPHHPEMAKKLSQMDQVIQGLVERLENDTLLVVAGDHGMTTNGDHGGDSELEVSAALFLYSPTAVFPSTPPEEPEVIPQVSLVPTLALLLGLPIPFGNIGEVMAELFSGGEDSQPHSSALAQASALHLNAQQVSRFLHTYSAATQDLQAKELHQLQNLFSKASADYQWLLQSPKGAEATLPTVIAELQQFLRGARAMCIESWARFSLVRMAGGTALLAASCFICLLASQWAISPGFPFCPLLLTPVAWGLVGAIAYAGLLGTIELKLDLVLLGAVAAVSSFLPFLWKAWAGWGSKRPLATLFPIPGPVLLLLLFRLAVFFSDSFVVAEARATPFLLGSFILLLVVQLHWEGQLLPPKLLTMPRLGTSATTNPPRHNGAYALRLGIGLLLCTRLAGLFHRCPEETPVCHSSPWLSPLASMVGGRAKNLWYGACVAALVALLAAVRLWLRRYGNLKSPEPPMLFVRWGLPLMALGTAAYWALASGADEAPPRLRVLVSGASMVLPRAVAGLAASGLALLLWKPVTVLVKAGAGAPRTRTVLTPFSGPPTSQADLDYVVPQIYRHMQEEFRGRLERTKSQGPLTVAAYQLGSVYSAAMVTALTLLAFPLLLLHAERISLVFLLLFLQSFLLLHLLAAGIPVTTPGPFTVPWQAVSAWALMATQTFYSTGHQPVFPAIHWHAAFVGFPEGHGSCTWLPALLVGANTFASHLLFAVGCPLLLLWPFLCESQGLRKRQQPPGNEADARVRPEEEEEPLMEMRLRDAPQHFYAALLQLGLKYLFILGIQILACALAASILRRHLMVWKVFAPKFIFEAVGFIVSSVGLLLGIALVMRVDGAVSSWFRQLFLAQQR

SEQ ID NO: 872451 - protein, 756 aa, Homo sapiens
GRVGRPRVRVMAELFSGGEDSQPHSSALAQASALHLNAQQVSRFLHTYSAATQDLQAKELHQLQNLFSKASADYQWLLQSPKGAEATLPTVIAELQQFLRGARAMCIESWARFSLVRMAGGTALLAASCFICLLASQWAISPGFPFCPLLLTPVAWGLVGAIAYAGLLGTIELKLDLVLLGAVAAVSSFLPFLWKAWAGWGSKRPLATLFPIPGPVLLLLLFRLAVFFSDSFVVAEARATPFLLGSFILLLVVQLHWEGQLLPPKLLTMPRLGTSATTNPPRHNGAYALRLGIGLLLCTRLAGLFHRCPEETPVCHSSPWLSPLASMVGGRAKNLWYGACVAALVALLAAVRLWLRRYGNLKSPEPPMLFVRWGLPLMALGTAAYWALASGADEAPPRLRVLVSGASMVLPRAVAGLAASGLALLLWKPVTVLVKAGAGAPRTRTVLTPFSGPPTSQADLDYVVPQIYRHMQEEFRGRLERTKSQGPLTVAAYQLGSVYSAAMVTALTLLAFPLLLLHAERISLVFLLLFLQSFLLLHLLAAGIPVTTPGPFTVPWQAVSAWALMATQTFYSTGHQPVFPAIHWHAAFVGFPEGHGSCTWLPALLVGANTFASHLLFAVGCPLLLLWPFLCESQGLRKRQQPPGNEADARVRPEEEEEPLMEMRLRDAPQHFYAALLQLGLKYLFILGIQILACALAASILRRHLMVWKVFAPKFIFEAVGFIVSSVGLLLGIALVMRVDGAVSSWFRQLFLAQQR

SEQ ID NO: 872452 - protein, 879 aa, Homo sapiens
MQKASVLLFLAWVCFLFYAGIALFTSGFLLTRLELTNHSSCQEPPGPGSLPWGSQGKPGACWMASRFSRVVLVLIDALRFDFAQPQHSHVPREPPVSLPFLGKLSSLQRILEIQPHHARLYRSQVDPPTTTMQRLKALTTGSLPTFIDAGSNFASHAIVEDNLIKQLTSAGRRVVFMGDDTWKDLFPGAFSKAFFFPSFNVRDLDTVDNGILEHLYPTMDSGEWDVLIAHFLGVDHCGHKHGPHHPEMAKKLSQMDQVIQGLVERLENDTLLVVAGDHGMTTNGDHGGDSELEVSAALFLYSPTAVFPSTPPEEPEVIPQVSLVPTLALLLGLPIPFGNIGEVMAELFSGGEDSQPHSSALAQASALHLNAQQVSRFLHTYSAATQDLQAKELHQLQNLFSKASADYQWLLQSPKGAEATLPTVIAELQQFLRGARAMCIESWARFSLVRMAGGTALLAASCFICLLASQWAISPGFPFCPLLLTPVAWGLVGAIAYAGLLGTIELKLDLVLLGAVAAVSSFLPFLWKAWAGWGSKRPLATLFPIPGPVLLLLLFRLAVFFSDSFVVAEARATPFLLGSFILLLVVQLHWEGQLLPPKLLTMPRLGTSATTNPPRHNGAYALRLGIGLLLCTRLAGLFHRCPEETPVCHSSPWLSPLASMVGGRAKNLWYGACVAALVALLAAVRLWLRRYGNLKSPEPPMLFVRWGLPLMALGTAAYWALASGADEAPPRLRVLVSGASMVLPRAVAGLAASGLALLLWKPVTVLVKAGAGAPRTRTVLTPFSGPPTSQADLDYVVPQIYRHMQEEFRGRLERTKSQGPLTVAAYQLGSVYSAAMVTALTLLAFPLLLLHAERISLVFLLLFLQSFLLLHLLAGDLHL

SEQ ID NO: 872453 - protein, 107 aa, Homo sapiens
FFLFEKNIYPFLLLTHLLAPRGLVERLENDTLLVVAGDHGMTTNGDHGGDSELEVSAALFLYSPTAVFPSTPPEVRPGMFLICSPSNQPMLPLQHPHEYLYFRPPNP

SEQ ID NO: 872454 - protein, 672 aa, Homo sapiens; identical to SEQ ID NO: 872447

SEQ ID NO: 872455 - protein, 672 aa, Homo sapiens; identical to SEQ ID NO: 872447

SEQ ID NO: 872456 - protein, 1101 aa, Homo sapiens
RRRRRTSGCHCRMQKASVLLFLAWVCFLFYAGIALFTSGFLLTRLELTNHSSCQEPPGPGSLPWGSQGKPGACWMASRFSRVVLVLIDALRFDFAQPQHSHVPREPPVSLPFLGKLSSLQRILEIQPHHARLYRSQVDPPTTTMQRLKALTTGSLPTFIDAGSNFASHAIVEDNLIKQLTSAGRRVVFMGDDTWKDLFPGAFSKAFFFPSFNVRDLDTVDNGILEHLYPTMDSGEWDVLIAHFLGVDHCGHKHGPHHPEMAKKLSQMDQVIQGLVERLENDTLLVVAGDHGMTTNGDHGGDSELEVSAALFLYSPTAVFPSTPPEEPEVIPQVSLVPTLALLLGLPIPFGNIGEVMAELFSGGEDSQPHSSALAQASALHLNAQQVSRFLHTYSAATQDLQAKELHQLQNLFSKASADYQWLLQSPKGAEATLPTVIAELQQFLRGARAMCIESWARFSLVRMAGGTALLAASCFICLLASQWAISPGFPFCPLLLTPVAWGLVGAIAYAGLLGTIELKLDLVLLGAVAAVSSFLPFLWKAWAGWGSKRPLATLFPIPGPVLLLLLFRLAVFFSDSFVVAEARATPFLLGSFILLLVVQLHWEGQLLPPKLLTMPRLGTSATTNPPRHNGAYALRLGIGLLLCTRLAGLFHRCPEETPVCHSSPWLSPLASMVGGRAKNLWYGACVAALVALLAAVRLWLRRYGNLKSPEPPMLFVRWGLPLMALGTAAYWALASGADEAPPRLRVLVSGASMVLPRAVAGLAASGLALLLWKPVTVLVKAGAGAPRTRTVLTPFSGPPTSQADLDYVVPQIYRHMQEEFRGRLERTKSQGPLTVAAYQLGSVYSAAMVTALTLLAFPLLLLHAERISLVFLLLFLQSFLLLHLLAAGIPVTTPGPFTVPWQAVSAWALMATQTFYSTGHQPVFPAIHWHAAFVGFPEGHGSCTWLPALLVGANTFASHLLFAVGCPLLLLWPFLCESQGLRKRQQPPGNEADARVRPEEEEEPLMEMRLRDAPQHFYAALLQLGLKYLFILGIQILACALAASILRRHLMVWKVFAPKFIFEAVGFIVSSVGLLLGIALVMRVDGAVSSWFRQLFLAQQR

SEQ ID NO: 872457 - protein, 1101 aa, Homo sapiens; identical to SEQ ID NO: 872456

SEQ ID NO: 872458 - protein, 1172 aa, Homo sapiens
RRRRRTSGCHCRMQKASVLLFLAWVCFLFYAGIALFTSGFLLTRLELTNHSSCQEPPGPGSLPWGSQGKPGACWMASRFSRVVLVLIDALRFDFAQPQHSHVPREPPVSLPFLGKLSSLQRILEIQPHHARLYRSQVDPPTTTMQRLKALTTGSLPTFIDAGSNFASHAIVEDNLIKQLTSAGRRVVFMGDDTWKDLFPGAFSKAFFFPSFNVRDLDTVDNGILEHLYPTMDSGEWDVLIAHFLGVDHCGHKHGPHHPEMAKKLSQMDQVIQGLVERLENDTLLVVAGDHGMTTNGDHGGDSELEVSAALFLYSPTAVFPSTPPEVRPGMFLICSPSNQPMLPLQHPHEYLYFEAPKSMILGILHSHFLPEAPMSAIPNIDFSFVMNLLTTVIFLEEPEVIPQVSLVPTLALLLGLPIPFGNIGEVMAELFSGGEDSQPHSSALAQASALHLNAQQVSRFLHTYSAATQDLQAKELHQLQNLFSKASADYQWLLQSPKGAEATLPTVIAELQQFLRGARAMCIESWARFSLVRMAGGTALLAASCFICLLASQWAISPGFPFCPLLLTPVAWGLVGAIAYAGLLGTIELKLDLVLLGAVAAVSSFLPFLWKAWAGWGSKRPLATLFPIPGPVLLLLLFRLAVFFSDSFVVAEARATPFLLGSFILLLVVQLHWEGQLLPPKLLTMPRLGTSATTNPPRHNGAYALRLGIGLLLCTRLAGLFHRCPEETPVCHSSPWLSPLASMVGGRAKNLWYGACVAALVALLAAVRLWLRRYGNLKSPEPPMLFVRWGLPLMALGTAAYWALASGADEAPPRLRVLVSGASMVLPRAVAGLAASGLALLLWKPVTVLVKAGAGAPRTRTVLTPFSGPPTSQADLDYVVPQIYRHMQEEFRGRLERTKSQGPLTVAAYQLGSVYSAAMVTALTLLAFPLLLLHAERISLVFLLLFLQSFLLLHLLAAGIPVTTPGPFTVPWQAVSAWALMATQTFYSTGHQPVFPAIHWHAAFVGFPEGHGSCTWLPALLVGANTFASHLLFAVGCPLLLLWPFLCESQGLRKRQQPPGNEADARVRPEEEEEPLMEMRLRDAPQHFYAALLQLGLKYLFILGIQILACALAASILRRHLMVWKVFAPKFIFEAVGFIVSSVGLLLGIALVMRVDGAVSSWFRQLFLAQQR

SEQ ID NO: 872459 - protein, 981 aa, Homo sapiens
RRRRRTSGCHCRMQKASVLLFLAWVCFLFYAGIALFTSGFLLTRLELTNHSSCQEPPGPGSLPWGSQGKPGACWMASRFSRVVLVLIDALRFDFAQPQHSHVPREPPVSLPFLGKLSSLQRILEIQPHHARLYRSQVDPPTTTMQRLKALTTGSLPTFIDAGSNFASHAIVEDNLIKQLTSAGRRVVFMGDDTWKDLFPGAFSKAFFFPSFNVRDLDTVDNGILEHLYPTMDSGEWDVLIAHFLGVDHCGHKHGPHHPEMAKKLSQMDQVIQGLVERLENDTLLVVAGDHGMTTNGDHGGDSELEVSAALFLYSPTAVFPSTPPEEPEVIPQVSLVPTLALLLGLPIPFGNIGEVMAELFSGGEDSQPHSSALAQASALHLNAQQVSRFLHTYSAATQDLQAKELHQLQNLFSKASADYQWLLQSPKGAEATLPTVIAELQQFLRGARAMCIESWARFSLVRMAGGTALLAASCFICLLASQWAISPGFPFCPLLLTPVAWGLVGAIAYAGLLGTIELKLDLVLLGAVAAVSSFLPFLWKAWAGWGSKRPLATLFPIPGPVLLLLLFRLAVFFSDSFVVAEARATPFLLGSFILLLVVQLHWEGQLLPPKLLTMPRLGTSATTNPPRHNGAYALRLGIGLLLCTRLAGLFHRCPEETPVCHSSPWLSPLASMVGGRAKNLWYGACVAALVALLAAVRLWLRRYGNLKSPEPPMLFVRWGLPLMALGTAAYWALASGADEAPPRLRVLVSGASMVLPRAVAGLAASGLALLLWKPVTVLVKAGAGAPRTRTVLTPFSGPPTSQADLDYVVPQIYRHMQEEFRGRLERTKSQGPLTVAAYQLGSVYSAAMVTALTLLAFPLLLLHAERISLVFLLLFLQSFLLLHLLAAGIPVTTPGKYLSSDSLKDNSDVSSAPLVFKEVLLLMFLSLTEGPMPHTTRKVFLVSSLLPAIAKQIDPSCWFPGFMERRDKESSKTPCGNAASS

SEQ ID NO: 872460 - protein, 804 aa, Homo sapiens
RRRRRTSGCHCRMQKASVLLFLAWVCFLFYAGIALFTSGFLLTRLELTNHSSCQEPPGPGSLPWGSQGKPGACWMASRFSRVVLVLIDALRFDFAQPQHSHVPREPPVSLPFLGKLSSLQRILEIQPHHARLYRSQVDPPTTTMQRLKALTTGSLPTFIDAGSNFASHAIVEDNLIKQLTSAGRRVVFMGDDTWKDLFPGAFSKAFFFPSFNVRDLDTVDNGILEHLYPTMDSGEWDVLIAHFLGVDHCGHKHGPHHPEMAKKLSQMDQVIQGLVERLENDTLLVVAGDHGMTTNGDHGGDSELEVSAALFLYSPTAVFPSTPPEEPEVIPQVSLVPTLALLLGLPIPFGNIGEVMAELFSGGEDSQPHSSALAQASALHLNAQQVSRFLHTYSAATQDLQAKELHQLQNLFSKASADYQWLLQSPKGAEATLPTVIAELQQFLRGARAMCIESWARFSLVRMAGGTALLAASCFICLLASQWAISPGFPFCPLLLTPVAWGLVGAIAYAGLLGTIELKLDLVLLGAVAAVSSFLPFLWKAWAGWGSKRPLATLFPIPGPVLLLLLFRLAVFFSDSFVVAEARATPFLLGSFILLLVVQLHWEGQLLPPKLLTMPRLGTSATTNPPRHNGAYALRLGIGLLLCTRLAGLFHRCPEETPVCHSSPWLSPLASMVGGRAKNLWYGACVAALVALLAAVRLWLRRYGNLKSPEPPMLFVRWGLPLMALGTAAYWALASGADEAPPRLRVLVSGASMVLPRAVAGLAASGLALLLWKPVTVLVKAGAGAPRTRTVLTPFSGPPTSQAE

SEQ ID NO: 872461 - protein, 525 aa, Homo sapiens
GGRGPLGGTGKPGILRQEGRDTPERRREGWGRGRGGRSRRRQKPKAKRARAAHTGWEAAVCAASSRRGEAAVHGASQSAGSMGKGGNQGEGAAEREVSVPTFSWEEIQKHNLRTDRWLVIDRKVYNITKWSIQHPGGQRVIGHYAGEDATDAFRAFHPDLEFVGKFLKPLLIGELAPEEPSQDHGKNSKITEDFRALRKTAEDMNLFKTNHVFFLLLLAHIIALESIAWFTVFYFGNGWIPTLITAFVLATSQAQAGWLQHDYGHLSVYRKPKWNHLVHKFVIGHLKGASANWWNHRHFQHHAKPNIFHKDPDVNMLHVFVLGEWQPIEYGKKKLKYLPYNHQHEYFFLIGPPLLIPMYFQYQIIMTMIVHKNWVDLAWAVSYYIRFFITYIPFYGILGALLFLNFIRFLESHWFVWVTQMNHIVMEIDQEAYRDWFSSQLTATCNVEQSFFNDWFSGHLNFQIEHHLFPTMPRHNLHKIAPLVKSLCAKHGIEYQEKPLLRALLDIIRSLKKSGKLWLDAYLHK

SEQ ID NO: 872462 - protein, 201 aa, Homo sapiens
GWWLQDGLGNMGGWELRLLGAHDLFLSPQYGKKKLKYLPYNHQHEYFFLIGPPLLIPMYFQYQIIMTMIVHKNWVDLAWAVSYYIRFFITYIPFYGILGALLFLNFIRFLESHWFVWVTQMNHIVMEIDQEAYRDWFSSQLTATCNVEQSFFNDWFSGHLNFQIEHQALSSQEGPASKHLGCHGNGMPPSYCMPPTPAEAE

SEQ ID NO: 872463 - protein, 638 aa, Homo sapiens
GGRGPLGGTGKPGILRQEGRDTPERRREGWGRGRGGRSRRRQKPKAKRARAAHTGWEAAVCAASSRRGEAAVHGASQSAGSMGKGGNQGEGAAEREVSVPTFSWEEIQKHNLRTDRWLVIDRKVYNITKWSIQHPGGQRVIGHYAGEDATDAFRAFHPDLEFVGKFLKPLLIGELAPEEPSQDHGKNSKITEDFRALRKTAEDMNLFKTNHVFFLLLLAHIIALESIAWFTVFYFGNGWIPTLITAFVLATSQAQAGWLQHDYGHLSVYRKPKWNHLVHKFVIGHLKLWFHHLVTERQRLAATPAGALTVWSLSSTPHLPPSSYDQGNWSLERYSDFTPSGAGACSELSHGRAGFWPCGGLKCYPRGLKVPGTAPKKGLLQASSVPWWLAWLIPTPLSPQGASANWWNHRHFQHHAKPNIFHKDPDVNMLHVFVLGEWQPIEYGKKKLKYLPYNHQHEYFFLIGPPLLIPMYFQYQIIMTMIVHKNWVDLAWAVSYYIRFFITYIPFYGILGALLFLNFIRFLESHWFVWVTQMNHIVMEIDQEAYRDWFSSQLTATCNVEQSFFNDWFSGHLNFQIEHHLFPTMPRHNLHKIAPLVKSLCAKHGIEYQEKPLLRALLDIIRSLKKSGKLWLDAYLHK

SEQ ID NO: 872464 - protein, 509 aa, Homo sapiens
GGRGPLGGTGKPGILRQEGRDTPERRREGWGRGRGGRSRRRQKPKAKRARAAHTGWEAAVCAASSRRGEAAVHGASQSAGSMGKGGNQGEGAAEREVSVPTFSWEEIQKHNLRTDRWLVIDRKVYNITKWSIQHPGGQRVIGHYAGEDATDAFRAFHPDLEFVGKFLKPLLIGELAPEEPSQDHGKNSKITEDFRALRKTAEDMNLFKTNHVFFLLLLAHIIALESIAWFTVFYFGNGWIPTLITAFVLATSQAQAGWLQHDYGHLSVYRKPKWNHLVHKFVIGHLKGASANWWNHRHFQHHAKPNIFHKDPDVNMLHVFVLGEWQPIEYGKKKLKYLPYNHQHEYFFLIGPPLLIPMYFQYQIIMTMIVHKNWVDLAWAVSYYIRFFITYIPFYGILGALLFLNFIRFLESHWFVWVTQMNHIVMEIDQEAYRDWFSSQLTATCNVEQSFFNDWFSGHLNFQIEHHLFPTMPRHNLHKIAPLVKSLCAKHGIEYQEKPLLRALLDIIR

SEQ ID NO: 872465 - protein, 525 aa, Homo sapiens; identical to SEQ ID NO: 872461

SEQ ID NO: 872466 - protein, 127 aa, Homo sapiens
RPCYLTIFKVQGTDLGSLLLVSHSTLPSWDLPSLSRQPSAMALPVPPSPFFQGAERWPPGVALSYLHSLPLKMGGDQRSMGLACESPLAAWSLGITPALVLQMLLGFIGAGPSRAGPLTLPAWLHSP

SEQ ID NO: 872467 - protein, 525 aa, Homo sapiens; identical to SEQ ID NO: 872461

SEQ ID NO: 872468 - protein, 525 aa, Homo sapiens; identical to SEQ ID NO: 872461

SEQ ID NO: 872469 - protein, 720 aa, Homo sapiens
GGRGPLGGTGKPGILRQEGRDTPERRREGWGRGRGGRSRRRQKPKAKRARAAHTGWEAAVCAASSRRGEAAVHGASQSAGSMGKGGNQGEGAAEREVSVPTFSWEEIQKHNLRTDRWLVIDRKVYNITKWSIQHPGGQRVIGHYAGEDATDAFRAFHPDLEFVGKFLKPLLIGELAPEEPSQDHGKNSKITEDFRALRKTAEDMNLFKTNHVFFLLLLAHIIALESIAWFTVFYFGNGWIPTLITAFVLATSQAQAGWLQHDYGHLSVYRKPKWNHLVHKFVIGHLKGASANWWNHRHFQHHAKPNIFHKDPDVNMLHVFVLGEWQPIEYGKKKLKYLPYNHQHEYFFLIGPPLLIPMYFQYQIIMTMIVHKNWVDLAWAVSYYIRFFITYIPFYGILGALLFLNFIRFLESHWFVWVTQMNHIVMEIDQEAYRDWFSSQLTATCNVEQSFFNDWFSGHLNFQIEHHLFPTMPRHNLHKIAPLVKSLCAKHGIEYQEKPLLRALLDIIRSLKKSGKLWLDAYLHRKERPHSPPVWKPKNPPGVGGRGAGGGECATREMTVAFVLKWGVWFPRNGMGPLGVGLNFGPQTFGVFFPKNPGGEKHNTQNTTDRRETLFGVLGHPFSFPLFLPFFRFFPSFDHSSPPLGSALLGWGVAPPRRSTPTSSLAFSFSFPRQKFFWCAVGIKKNPPFVGVHPALFYTAPVFKRGPGYKSAISSNGPPK

SEQ ID NO: 872470 - protein, 544 aa, Homo sapiens
GGRGPLGGTGKPGILRQEGRDTPERRREGWGRGRGGRSRRRQKPKAKRARAAHTGWEAAVCAASSRRGEAAVHGASQSAGSMGKGGNQGEGAAEREVSVPTFSWEEIQKHNLRTDRWLVIDRKVYNITKWSIQHPGGQRVIGHYAGEDATDAFRAFHPDLEFVGKFLKPLLIGELAPEEPSQDHGKNSKITEDFRALRKTAEDMNLFKTNHVFFLLLLAHIIALESIAWFTVFYFGNGWIPTLITAFVLATSQAQAGWLQHDYGHLSVYRKPKWNHLVHKFVIGHLKGASANWWNHRHFQHHAKPNIFHKDPDVNMLHVFVLGEWQPIEYGKKKLKYLPYNHQHEYFFLIGPPLLIPMYFQYQIIMTMIVHKNWVDLAWAVSYYIRFFITYIPFYGILGALLFLNFIRFLESHWFVWVTQMNHIVMEIDQEAYRDWFSSQLTATCNVEQSFFNDWFSGHLNFQIEHHSERGAAGRRGDPQREGSGRYPTGQNAECGGHLFVSLTRSLPNIEQGSQPAPLRSGEGLPYSISLRVILCPSCCATWS

SEQ ID NO: 872471 - protein, 337 aa, Homo sapiens
GGRGPLGGTGKPGILRQEGRDTPERRREGWGRGRGGRSRRRQKPKAKRARAAHTGWEAAVCAASSRRGEAAVHGASQSAGSMGKGGNQGEGAAEREVSVPTFSWEEIQKHNLRTDRWLVIDRKVYNITKWSIQHPGGQRVIGHYAGEDATDAFRAFHPDLEFVGKFLKPLLIGELAPEEPSQDHGKNSKITEDFRALRKTAEDMNLFKTNHVFFLLLLAHIIALESIAWFTVFYFGNGWIPTLITAFVLATSQAQAGWLQHDYGHLSVYRKPKWNHLVHKFVIGHLKGASANWWNHRHFQHHAKPNIFHKDPDVNMLHVFVLGEWQPIEASCGGSHL

SEQ ID NO: 872472 - protein, 299 aa, Homo sapiens
GGRGPLGGTGKPGILRQEGRDTPERRREGWGRGRGGRSRRRQKPKAKRARAAHTGWEAAVCAASSRRGEAAVHGASQSAGSMGKGGNQGEGAAEREVSVPTFSWEEIQKHNLRTDRWLVIDRKVYNITKWSIQHPGGQRVIGHYAGEDATDAFRAFHPDLEFVGKFLKPLLIGELAPEEPSQDHGKNSKITEDFRALRKTAEDMNLFKTNHVFFLLLLAHIIALESIAWFTVFYFGNGWIPTLITAFVLATSQAQAGWLQHDYGHLSVYRKPKWNHLVHKFVIGHLKRWSFTLAAQAGV

SEQ ID NO: 872473 - protein, 425 aa, Homo sapiens
ADGMHGREAGPFVCVCVLLASIPTPQTPLLQASLPPFHPASAGHPITGQQDAFRAFHPDLEFVGKFLKPLLIGELAPEEPSQDHGKNSKITEDFRALRKTAEDMNLFKTNHVFFLLLLAHIIALESIAWFTVFYFGNGWIPTLITAFVLATSQAQAGWLQHDYGHLSVYRKPKWNHLVHKFVIGHLKGASANWWNHRHFQHHAKPNIFHKDPDVNMLHVFVLGEWQPIEYGKKKLKYLPYNHQHEYFFLIGPPLLIPMYFQYQIIMTMIVHKNWVDLAWAVSYYIRFFITYIPFYGILGALLFLNFIRFLESHWFVWVTQMNHIVMEIDQEAYRDWFSSQLTATCNVEQSFFNDWFSGHLNFQIEHHLFPTMPRHNLHKIAPLVKSLCAKHGIEYQEKPLLRALLDIIRSLKKSGKLWLDAYLHK

SEQ ID NO: 872474 - protein, 525 aa, Homo sapiens; identical to SEQ ID NO: 872461

SEQ ID NO: 872475 - protein, 525 aa, Homo sapiens; identical to SEQ ID NO: 872461

SEQ ID NO: 872476 - protein, 122 aa, Homo sapiens
MLDLSPFLLSFFSSHLPHSTLPSWDLPSLSRQPSAMALPVPPSPFFQGAERWPPGVALSYLHSLPLKMGGDQRSMGLACESPLAAWSLGITPALVLQMLLGFIGAGPSRAGPLTLPAWLHSP

SEQ ID NO: 872477 - protein, 525 aa, Homo sapiens; identical to SEQ ID NO: 872461

SEQ ID NO: 872478 - protein, 544 aa, Homo sapiens; identical to SEQ ID NO: 872470

SEQ ID NO: 872479 - protein, 544 aa, Homo sapiens; identical to SEQ ID NO: 872470

SEQ ID NO: 872480 - protein, 385 aa, Homo sapiens
GGRGPLGGTGKPGILRQEGRDTPERRREGWGRGRGGRSRRRQKPKAKRARAAHTGWEAAVCAASSRRGEAAVHGASQSAGSMGKGGNQGEGAAEREVSVPTFSWEEIQKHNLRTDRWLVIDRKVYNITKWSIQHPGGQRVIGHYAGEDATDAFRAFHPDLEFVGKFLKPLLIGELAPEEPSQDHGKNSKITEDFRALRKTAEDMNLFKTNHVFFLLLLAHIIALESIAWFTVFYFGNGWIPTLITAFVLATSQAQAGWLQHDYGHLSVYRKPKWNHLVHKFVIGHLKGASANWWNHRHFQHHAKPNIFHKDPDVNMLHVFVLGEWQPIEGRGKSCSSSAGRQDFRGSSLVANRLAHVEKTLFGESSSCTLGGASTWLGPICFTSG

SEQ ID NO: 872481 - protein, 46 aa, Homo sapiens
KGAIPRFSVISNAYPGSTTKKTTQGAMSLSRSHRVQKLLSFKQVVI

SEQ ID NO: 872482 - protein, 703 aa, Homo sapiens
MADRRRQRASQDTEDEESGASGSDSGGSPLRGGGSCSGSAGGGGSGSLPSQRGGRTGALHLRRVESGGAKSAEESECESEDGIEGDAVLSDYESAEDSEGEEGEYSEEENSKVELKSEANDAVNSSTKEEKGEEKPDTKSTVTGERQSGDGQESTEPVENKVGKKGPKHLDDDEDRKNPAYIPRKGLFFEHDLRGQTQEEEVRPKGRQRKLWKDEGRWEHDKFREDEQAPKSRQELIALYGYDIRSAHNPDDIKPRRIRKPRYGSPPQRDPNWNGERLNKSHRHQGLGGTLPPRTFINRNAAGTGRMSAPRNYSRSGGFKEGRAGFRPVEAGGQHGGRSGETVKHEISYRSRRLEQTSVRDPSPEADAPVLGSPEKEEAASEPPAAAPDAAPPPPDRPIEKKSYSRARRTRTKVGDAVKLAEEVPPPPEGLIPAPPVPETTPTPPTKTGTWEAPVDSSTSGLEQDVAQLNIAEQNWSPGQPSFLQPRELRGMPNHIHMGAGPPPQFNRMEEMGVQGGRAKRYSSQRQRPVPEPPAPPVHISIMEGHYYDPLQFQGPIYTHGDSPAPLPPQGMLVQPGMNLPHPGLHPHQTPAPLPNPGLYPPPVSMSPGQPPPQQLLAPTYFSAPGVMNFGNPSYPYAPGALPPPPPPHLYPNTQAPSQVYGGVTYYNPAQQQVQPKPSPPRRTPQPVTIKPPPPEVVSRGSS

SEQ ID NO: 872483 - protein, 720 aa, Homo sapiens
MADRRRQRASQDTEDEESGASGSDSGGSPLRGGGSCSGSAGGGGSGSLPSQRGGRTGALHLRRVESGGAKSAEESECTVKMALKGDAGLSDYEGAERIGKRKFAVFGDKLLENCSEGEEGEYSEEENSKVELKSEANDAVNSSTKEEKGEEKPDTKSTVTGERQSGDGQESTEPVENKVGKKGPKHLDDDEDRKNPAYIPRKGLFFEHDLRGQTQEEEVRPKGRQRKLWKDEGRWEHDKFREDEQAPKSRQELIALYGYDIRSAHNPDDIKPRRIRKPRYGSPPQRDPNWNGERLNKSHRHQGLGGTLPPRTFINRNAAGTGRMSAPRNYSRSGGFKEGRAGFRPVEAGGQHGGRSGETVKHEISYRSRRLEQTSVRDPSPEADAPVLGSPEKEEAASEPPAAAPDAAPPPPDRPIEKKSYSRARRTRTKVGDAVKLAEEVPPPPEGLIPAPPVPETTPTPPTKTGTWEAPVDSSTSGLEQDVAQLNIAEQNWSPGQPSFLQPRELRGMPNHIHMGAGPPPQFNRMEEMGVQGGRAKRYSSQRQRPVPEPPAPPVHISIMEGHYYDPLQFQGPIYTHGDSPAPLPPQGMLVQPGMNLPHPGLHPHQTPAPLPNPGLYPPPVSMSPGQPPPQQLLAPTYFSAPGVMNFGNPSYPYAPGALPPPPPPHLYPNTQAPSQVYGGVTYYNPAQQQVQPKPSPPRRTPQPVTIKPPPPEVVSRGSS

SEQ ID NO: 872484 - protein, 612 aa, Homo sapiens
MICAEDSEGEEGEYSEEENSKVELKSEANDAVNSSTKEEKGEEKPDTKSTVTGERQSGDGQESTEPVENKVGKKGPKHLDDDEDRKNPAYIPRKGLFFEHDLRGQTQEEEVRPKGRQRKLWKDEGRWEHDKFREDEQAPKSRQELIALYGYDIRSAHNPDDIKPRRIRKPRYGSPPQRDPNWNGERLNKSHRHQGLGGTLPPRTFINRNAAGTGRMSAPRNYSRSGGFKEGRAGFRPVEAGGQHGGRSGETVKHEISYRSRRLEQTSVRDPSPEADAPVLGSPEKEEAASEPPAAAPDAAPPPPDRPIEKKSYSRARRTRTKVGDAVKLAEEVPPPPEGLIPAPPVPETTPTPPTKTGTWEAPVDSSTSGLEQDVAQLNIAEQNWSPGQPSFLQPRELRGMPNHIHMGAGPPPQFNRMEEMGVQGGRAKRYSSQRQRPVPEPPAPPVHISIMEGHYYDPLQFQGPIYTHGDSPAPLPPQGMLVQPGMNLPHPGLHPHQTPAPLPNPGLYPPPVSMSPGQPPPQQLLAPTYFSAPGVMNFGNPSYPYAPGALPPPPPPHLYPNTQAPSQVYGGVTYYNPAQQQVQPKPSPPRRTPQPVTIKPPPPEVVSRGSS

SEQ ID NO: 872485 - protein, 564 aa, Homo sapiens [sequence omitted]

SEQ ID NO: 872486 - protein, 132 aa, Homo sapiens
MLVQPGMNLPHPGLHPHQTPAPLPNPGLYPPPVSMSPGQPPPQQLLAPTYFSAPGVMNFGNPSYPYAPGALPPPPPPHLYPNTQAPSQVYGGVTYYNPAQQQVQPKPSPPRRTPQPVTIKPPPPEVVSRGSS

SEQ ID NO: 872487 - protein, 85 aa, Homo sapiens
IEQCGRVGSAEGRGAALLGKGSYLSSLSMALNHFSAASVEEIPITAVHTSARGNLATVPVLLQNLRAKMVAVSLPGNVTVFIPSI

SEQ ID NO: 872488 - protein, 703 aa, Homo sapiens; identical to SEQ ID NO: 872482

SEQ ID NO: 872489 - protein, 851 aa, Homo sapiens
MADRRRQRASQDTEDEESGASGSDSGGSPLRGGGSCSGSAGGGGSGSLPSQRGGRTGALHLRRVESGGAKSAEESECESEDGIEGDAVLSDYESAEDSEGEEGEYSEEENSKVELKSEANDAVNSSTKEEKGEEKPDTKSTVTGERQSGDGQESTEPVENKVGKKGPKHLDDDEDRKNPAYIPRKGLFFEHDLRGQTQEEEVRPKGRQRKLWKDEGRWEHDKFREDEQAPKSRQELIALYGYDIRSAHNPDDIKPRRIRKPRYGSPPQRDPNWNGERLNKSHRHQGLGGTLPPRTFINRNAAGTGRMSAPRNYSRSGGFKEGRAGFRPVEAGGQHGGRSGETVKHEISYRSRRLEQTSVRDPSPEADAPVLGSPEKEEAASEPPAAAPDAAPPPPDRPIEKKSYSRARRTRTKVGDAVKLAEEVPPPPEGLIPAPPVPETTPTPPTKTGTWEAPVDSSTSGLEQDVAQLNIAEQNWSPGQPSFLQPRELRGMPNHIHMGAGPPPQFNRMEEMGVQGGRAKRYSSQRQRPVPEPPAPPVHISIMEGHYYDPLQFQGPIYTHGDSPAPLPPQGMLVQPGMNLPHPGLHPHQTPAPLPNPGLYPPPVSMSPGQPPPQQLLAPTYFSAPGVMNFGNPSYPYAPGALPPPPPPHLYPNTQAPSQVYGGVTYYNPAQQQVQPKPSPPRRTPQPVTIKPPPPEVVSRGSVNTSPEYMKILTSSKQEVTNQKRHTRWISTNKKGCKDIQERHLTTKQRHTGTPDSYGRQDHNEGKTKGHGPSTDDVKARRRRKRKRTQARRRAHKPSPNERRRQIGTKEASVPRDAPRDTTQQTQEKTRLHTTTKKTRDRRRRCRRINE

SEQ ID NO: 872490 - protein, 534 aa, Homo sapiens
MADRRRQRASQDTEDEESGASGSDSGGSPLRGGGSCSGSAGGGGSGSLPSQRGGRTGALHLRRVESGGAKSAEESECESEDGIEGDAVLSDYESAEDSEGEEGEYSEEENSKVELKSEANDAVNSSTKEEKGEEKPDTKSTVTGERQSGDGQESTEPVENKVGKKGPKHLDDDEDRKNPAYIPRKGLFFEHDLRGQTQEEEVRPKGRQRKLWKDEGRWEHDKFREDEQAPKSRQELIALYGYDIRSAHNPDDIKPRRIRKPRYGSPPQRDPNWNGERLNKSHRHQGLGGTLPPRTFINRNAAGTGRMSAPRNYSRSGGFKEGRAGFRPVEAGGQHGGRSGETVKHEISYRSRRLEQTSVRDPSPEADAPVLGSPEKEEAASEPPAAAPDAAPPPPDRPIEKKSYSRARRTRTKVGDAVKLAEEVPPPPEGLIPAPPVPETTPTPPTKTGTWEAPVDSSTSGLEQDVAQLNIAEQNWSPGQPSFLQPRELRGMPNHIHMGAGPPPQFNRMEEMLTLQISIKYLPCTKCFSTPKGR

SEQ ID NO: 872491 - protein, 633 aa, Homo sapiens [sequence omitted]

SEQ ID NO: 872492 - protein, 108 aa, Homo sapiens
TRHRYEAGLSMSPGQPPPQQLLAPTYFSAPGVMNFGNPSYPYAPGALPPPPPPHLYPNTQAPSQVYGGVTYYNPAQQQVQPKPSPPRRTPQPVTIKPPPPEVVSRGSS

SEQ ID NO: 872493 - protein, 703 aa, Homo sapiens; identical to SEQ ID NO: 872482

SEQ ID NO: 872494 - protein, 88 aa, Homo sapiens
  misc_feature (32)..(32): Xaa can be any naturally occurring amino acid
ESLPQRQQRSGLVPWIGRKDRSPCPEGDWLPXALNHFSAASVEEIPITAVHTSARGNLATVPVLLQNLRAKMVAVSLPGNVTVFIPSI

SEQ ID NO: 872495 - protein, 101 aa, Homo sapiens
LQGSPISGVGLGMVTPAGCLEGENQGPRKIPDTAFPPSSRAGQTRQVVSGAQVSSWRECQPCSGSPSCILGTDANVGTAGKLGLVPLPGFRKKPNKELSAE

SEQ ID NO: 872496 - protein, 101 aa, Homo sapiens; identical to SEQ ID NO: 872495

SEQ ID NO: 872497 - protein, 68 aa, Homo sapiens
DRAGLMAKATAGEGGTLISQAFDLQILAGELRCRIWVPENLLWPRRRGGVDQMGKDGDLYCPSNERAG

SEQ ID NO: 872498 - protein, 126 aa, Homo sapiens
LLGEASLTSPLALIPPSEPQHSPSKSRALCNRGLRSTSRCTQQGLPSVPPSPLTPLPPSPTAPRRSQYPSPGSRVGRGLGTGRGKLAHRVAPSKEPPERACGSRGRSTGWAASSPKTHAAGQAPAA

SEQ ID NO: 872499 - protein, 133 aa, Homo sapiens
SCRYMVRVRAVVMARDDSSGGWLPVGGGGLSQTTLECTLKPGLVYNKVNPIFHHWSLGDCKFGLTFQSPAEADEFQKSLLAALAALGRGSLTPSSSSSSSSPSQDTAETPCPLTVSVQDASLLGEGRGFVFIL

SEQ ID NO: 872500 - protein, 125 aa, Homo sapiens
SCRYMVRVRAVVMARDDSSGGWLPVGGGGLSQTTLECTLKPGLVYNKVNPIFHHWSLGDCKFGLTFQSPAEADEFQKSLLAALAALGRGSLTPSSSSSSSSPSQDTAETPCPLTLSQYFRHMLCP

SEQ ID NO: 872501 - protein, 255 aa, Homo sapiens
MARAKALLGGPGEELEADTEYLDPFDAQPHPAPPDDGYMEPYDAQWVMSELPGRGVQLYDTPYEEQDPETADGPPSGQKPRQSRMPQEDERPADEYDQPWEWKKDHISRAFAVQFDSPEWERTPGSAKELRRPPPRSPQPAERVDPALPLEKQPWFHGPLNRADAESLLSLCKEGSYLVRLSETNPQDCSLSLRSSQGFLHLKFARTRENQVVLGQHSGPFPSVPELVLHYSSRPLPVQGAEHLALLYPVVTQTP

SEQ ID NO: 872502 - protein, 179 aa, Homo sapiens
MTPLMRNRTQRQQMDPLLGRSLGRAGCPRKMNGQQMMQFDSPEWERTPGSAKELRRPPPRSPQPAERVDPALPLEKQPWFHGPLNRADAESLLSLCKEGSYLVRLSETNPQDCSLSLRSSQGFLHLKFARTRENQVVLGQHSGPFPSVPELVLHYSSRPLPVQGAEHLALLYPVVTQTP

SEQ ID NO: 872503 - protein, 282 aa, Homo sapiens
  misc_feature (174)..(174): Xaa can be any naturally occurring amino acid
  misc_feature (187)..(187): Xaa can be any naturally occurring amino acid
  misc_feature (197)..(197): Xaa can be any naturally occurring amino acid
  misc_feature (219)..(219): Xaa can be any naturally occurring amino acid
  misc_feature (221)..(221): Xaa can be any naturally occurring amino acid
  misc_feature (232)..(233): Xaa can be any naturally occurring amino acid
  misc_feature (247)..(247): Xaa can be any naturally occurring amino acid
  misc_feature (251)..(251): Xaa can be any naturally occurring amino acid
  misc_feature (255)..(256): Xaa can be any naturally occurring amino acid
  misc_feature (258)..(258): Xaa can be any naturally occurring amino acid
  misc_feature (274)..(274): Xaa can be any naturally occurring amino acid
MARAKALLGGPGEELEADTEYLDPFDAQPHPAPPDDGYMEPYDAQWVMSELPGRGVQLYDTPYEEQDPETADGPPSGQKPRQSRMPQEDERPADEYDQPWEWKKDHISRAFAVQFDSPEWERTPGSAKELRRPPPRSPQPAERVDPALPLEKQPWFHWPPCIMRQECMKMPSLXPSCKGKDAYPYVXASCEVHAPRXPASFFFFMVHAKGFPCILECSXRXPVMNPGGAWAXXHAGPFHTHAVPWGXSPSXNHVXXRXHARCKGARAFLASCLXPVVTQAQP

SEQ ID NO: 872504 - protein, 255 aa, Homo sapiens; identical to SEQ ID NO: 872501

SEQ ID NO: 872505 - protein, 153 aa, Homo sapiens
MARAKALLGGPGEELEADTEYLDPFDAQPHPAPPDDGYMEPYDAQWVMSELPGRGVQLYDTPYEEQDPETADGPPSGQKPRQSRMPQEGMISPGSGRKTTSPGRLQCSLTVQSGRGLQAQPRSSGDLRPEAPSLRSVWTQPCPWRNSRGFMAP

SEQ ID NO: 872506 - protein, 255 aa, Homo sapiens; identical to SEQ ID NO: 872501

SEQ ID NO: 872507 - protein, 202 aa, Homo sapiens
MSDAAEAPREATGENGETEMKEEEEPNPNYKEVEDPQQESKDDTIAWRESQEEERKTGEEEGEEEEKEEEGKEDKKIVMEETEEKAGEVQEKEASGIQEETTVEPQEVTASMIRLETQITDSQSITSGIFPKTQRGSKSKLSLQLEDAETDELLRDLSTQIEFLDLDQISPEEQQISSPERQPSGELEEKTDRMPQDELGQE

SEQ ID NO: 872508 - protein, 123 aa, Homo sapiens
CLTSPCARLLLSRFPSLPEDLLPLALPRRALPAHEEYLPASHGHYWASLYCRRQWLPCQAAPASAHWHTLFRLCGVPVLTAIFSTLVEWGPIISARAFLVPSLSKVSFRSPVKAALKCFLCQI

SEQ ID NO: 872509 - protein, 116 aa, Homo sapiens
GRVRLSREGFSAEPRRAAGVCCLTRAQLWGDTRGRLLQPRDPALQPAPRLPRARRCLSPAGAMSPALLGRCSRLCAPYLAPVLCLQFHSSRAGWAPPLCTVEEPGHWPISVVKLEV

SEQ ID NO: 872510 - protein, 410 aa, Homo sapiens
MVLKAEHTRSPSATLPSNVPSCRSLSSSEDGPSGPSSLADGGLAHNLQDSVRHRILYLSEQLRVEKASRDGNTVSYLKLVSKADRHQVPHIQQAFEKVNQRASATIAQIEHRLHQCHQQLQELEEGCRPEGLLLMAESDPANCEPPSEKALLSEPPEPGGEDGPVNLPHASRPFILESRFQSLQQGTCLETEDVAQQQNLLLQKVKAELEEAKRFHISLQESYHSLKERSLTDLQLLLESLQEEKCRQALMEEQVNGRLQGQLNEIYNLKHNLACSEERMAYLSYERAKEIWEITETFKSRISKLEMLQQVTQLEAAEHLQSRPPQMLFKFLSPRLSLATVLLVFVSTLCACPSSLISSRLCTCTMLMLIGLGVLAWQRWRAIPATDWQEWVPSRCRLYSKDSGPPADGP

SEQ ID NO: 872511 - protein, 410 aa, Homo sapiens; identical to SEQ ID NO: 872510

SEQ ID NO: 872512 - protein, 137 aa, Homo sapiens
KIMTKTFPCHFVVPKGSPAIPQATVVSFPKTRLTSEPQVIFLPWWTSVAPLLRDEQGLPDKDDSGILLGVKVRNEKSCSLLLIFSVSVISAVATVSSSLLPRAPWRYVYREALSLLSCGSLKPHFPQHHACTCLSRL

SEQ ID NO: 872513 - protein, 112 aa, Homo sapiens
MVEKYSVATQIVMGGVTGWCAGFLFQKVGKLAATAVGGGFLLLQIASHSGYVQIDWKRVEKDVNKAKRQIKKRANKAAPEINNLIEEATEFIKQNIVISSGFVGGFLLGLAS

SEQ ID NO: 872514 - protein, 155 aa, Homo sapiens
MATRNPPPQDYESDDDSYEVLDLTEYARRHQWWNRVFGHSSGPMVEKYSVATQIVMGGVTGWCAGFLFQKVGKLAATAVGGGFLLLQIASHSGYVQIDWKRVEKDVNKAKRQIKKRANKAAPEINNLIEEATEFIKQNIVISSGFVGGFLLGLAS

SEQ ID NO: 872515 - protein, 142 aa, Homo sapiens
MNTTFLVGMIINFSAKTACILGSGKQYISQESELTARYPTSWLPDYCSRFPQEQSSFTGCLAGPRNRVTLVATANRPNTASRQEGQSCSAGCTCRLEADRAGRAQICWLCPTHRCLHTHPSDPGCTLSANPRTLFFLICTDS

SEQ ID NO: 872516 - protein, 108 aa, Homo sapiens
RSSPSGGNQPIHVEVLKSQEPAHRRLPGFESWQVLNSLSLSYSICNRTCLPGIAGKIQGENLGQAIGSQISKSSTGEVPRLGLEPREVRTPGEVRGNPHTGLFHVLFL

SEQ ID NO: 872517 - protein, 218 aa, Homo sapiens; identical to SEQ ID NO: 787569

SEQ ID NO: 872518 - protein, 83 aa, Homo sapiens
LKLKIGTSLNRMLSFSPTAQPRAAKPSMFTEPKGCRRPWKLKIKTGCCKADHLRRILIPDKYPPTSRTGRHMATRASCQNLSL

SEQ ID NO: 872519 - protein, 72 aa, Homo sapiens
GAESMCKGPWTDRIACCCASEAEIPEGELKYGWRVPRIQFAADEYGRLPAGVVAHPQGALVLRRLLISPIPH

SEQ ID NO: 872520 - protein, 544 aa, Homo sapiens
MATAPGPAGIAMGSVGSLLERQDFSPEELRAALAGSRGSRQPDGLLRKGLGQREFLSYLHLPKKDSKSTKNTKRAPRNEPADYATLYYREHSRAGDFSKTSLPERGRFDKCRIRPSVFKPTAGNGKGFLSMQSLASHKGQKLWRSNGSLHTLACHPPLSPGPRASQARAQLLHALSLDEGGPEPEPSLSDSSSGGSFGRSPGTGPSPFSSSLGHLNHLGGSLDRASQGPKEAGPPAVLSCLPEPPPPYEFSCSSAEEMGAVLPETCEELKRGLGDEDGSNPFTQVLEERQRLWLAELKRLYVERLHEVTQKAERSERNLQLQLFMAQQEQRRLRKELRAQQGLAPEPRAPGTLPEADPSARPEEEARWEVCQKTAEISLLKQQLREAQAELAQKLAEIFSLKTQLRGSRAQAQAQDAELVRLREAVRSLQEQAPREEAPGSCETDDCKSRGLLGEAGGSEARDSAEQLRAELLQERLRGQEQALRFEQERRTWQEEKERVLRYQREIQGGYMDMYRRNQALEQELRALREPPTPWSPRLESSKI

SEQ ID NO: 872521 - protein, 81 aa, Homo sapiens
TRDPAPIARQAPTSPCSPLSPHPAGRAPQCSEKPALNSPPPLPGHSLLPAPTAPMPISVSSFCAAVIVGLPVSFELWALPG

SEQ ID NO: 872522 - protein, 104 aa, Homo sapiens [sequence omitted]

SEQ ID NO: 872523 - protein, 104 aa, Homo sapiens [sequence omitted]

SEQ ID NO: 872524 - protein, 112 aa, Homo sapiens
SVLTLKTEVNAKLSSVYKNKPQGHQKTPYLHLLTGIANILPLFCPKSTGDTTNELQHTYFWLRKLPEHSIPSSSSITWRWHKMEPPALSFSHVCMHSCTHAFISWKLQQCPA

SEQ ID NO: 872525 - protein, 111 aa, Homo sapiens
MKTHTCACGGARGAPKMVKRGEQVWPKSAGLPRGEKLRGHKTKGAAEDFSTPNKKKRPRGGNTGERFVETNFRERGGSGGANYGGDLLQRGAFQRETVIIQKLHPAERGMK

SEQ ID NO: 872526 - protein, 105 aa, Homo sapiens
  misc_feature (81)..(81): Xaa can be any naturally occurring amino acid
GSHCGSGRLRGPSDPQGRRGFEGTSSRPTWSTWVKKKKKKRHENNHKKGRRGACGRFCRPIVGIGIFFLGKNSVPVSAVLXWACHLDDQNESLLCLLPARICGGT

SEQ ID NO: 872527 - protein, 189 aa, Homo sapiens
MTLAAYKEKMKELPLVSLFCSCFLADPLNKSSYKYEADTVDLNWCVISDMEVIELNKCTSGQSFEVILKPPSFDGVPEFNASLPRRRDPSLEEIQKKLEAAEERRKYQEAELLKHLAEKREHEREVIQKAIEENNNFIKMAKEKLAQKMESNKENREAHLAAMLERLQEKDKHAEEVRKNKELKEEASR

SEQ ID NO: 872528 - protein, 216 aa, Homo sapiens
MTLAAYKEKMKELPLVSLFCSCFLADPLNKSSYKYEGWCGRQCRRKDESQRKDSADWRERRAQADTVDLNWCVISDMEVIELNKCTSGQSFEVILKPPSFDGVPEFNASLPRRRDPSLEEIQKKLEAAEERRKYQEAELLKHLAEKREHEREVIQKAIEENNNFIKMAKEKLAQKMESNKENREAHLAAMLERLQEKDKHAEEVRKNKELKEEASR

SEQ ID NO: 872529 - protein, 197 aa, Homo sapiens
MTLAAYKEKMKELPLVSLFCSCFLADPLNKSSYKYEADTVDLNWCVISDMEVIELNKCTSGQSFEVILKPPSFDGVPEFNASLPRRRDPSLEEIQKKLEAAEERRKYQEAELLKHLAEKREHEREVIQKAIEENNNFIKMAKEKLAQKMESNKENREAHLAAMLERLQEKRLQGAPENPARGGVSTSGVASTLQQVG

SEQ ID NO: 872530 - protein, 176 aa, Homo sapiens
MTLAAYKEKMKELPLVSLFCSCFLADPLNKSSYKYEADTVDLNWCVISDMEVIELNKCTSGQSFEVILKPPSFDGVPEFNASLPRRRDPSLEEIQKKLEAAEERRKYQEAELLKHLAEKREHEREVIQKAIEENNNFIKMAKEKLAQKMESNKENREAHLAAMLERLQEKEPPAAR

SEQ ID NO: 872531 - protein, 157 aa, Homo sapiens
ICHPFHYTMILTRMLCVKMVVMCHALSHLHAMLHTFLIGQLIFCADNRIPHFFCDLYALMKISCTSTYLNTLMIHTEGAVVISGALAFITASYACIILVVLRIPSAKGRWKTFSTCGSHLTVVAIFYGTLSWVYFRPLSSYSVTKGRIITVVYTVVT

SEQ ID NO: 872532 - protein, 131 aa, Homo sapiens [sequence omitted]

SEQ ID NO: 872533 - protein, 654 aa, Homo sapiens
DDLEVTRKKLVDDCHHFRLEEPNFSLASSNSKDIESCAQIWAFYEEFQQGFQEMANEDWITFRTKTYLFEEFLMNWHVRLRKVEEHSVMTVKLQSEVDKYKIVIPILKYVRGEHLSPDHWLDLFRLLGLPRGTSLEKLLFGDLLRVADTIVAKAADLKDLNSRAQGEVTIREALRELDLWGVGAVFTLIDYEDSQSRTMKLIKDWKDIVNQVGDNRCLLQSLKDSPYYKGFEDKVSIWERKLAELDEYLQNLNHIQRKWVYLEPIFGRGALPKEQTRFNRVDEDFRSIMTDIKKDNRVTTLTTHAGIRNSLLTILDQLQRCQRSLNEFLEEKRSAFPRFYFIGDDDLLEILGQSTNPSVIQSHLKKLFAGINSVCFDEKSKHITAMKSLEGEVVPFKNKVPLSNNVETWLNDLALEMKKTLEQLLKECVTTGRSSQGAVDPSLFPSQILCLAEQIKFTEDVENAIKDHSLHQIETQLVNKLEQYTNIDTSSEDPGNTESGILELKLKALILDIIHNIDVVKQLNQIQVHTTEDWAWKKQLRFYMKSDHTCCVQMVDSEFQYTYEYQGNASKLVYTPLTDKCYLTLTQAMKMGLGGNPYGPAGTGKTESVKALGGLLGRQVLVFNCDEGIDVKSMGRIFVGLVKCGAWGCFDEFN

SEQ ID NO: 872534 - protein, 524 aa, Homo sapiens
KRELYMEKLQEHLIKAKAFTIKKTLEIYVPIKQFFYNLIHPEYSAVTDVYVLMFLADTVDFIIIVFGFWAFGKHSAAADITSSLSEDQVPGPFLVMVLIQFGTMVVDRALYLRKTVLGKVIFQVILVFGIHFWMFFILPGVTERKFSQNLVAQLWYFVKCVYFGLSAYQIRCGYPTRVLGNFLTKSYNYVNLFLFQGFRLVPFLTELRAVMDWVWTDTTLSLSSWICVEDIYAHIFILKCWRESEKPIFTMSAQQSQLKVMDQQSFNKFIQAFSRDTGAMQFLENYEKEDINSSRTGRKLKFFVDHQPTQNLSLGAKSEIATDKLSFPLKNITRKNIAKMIAGNSTESSKTPVTIEKIYPYYVKAPSDSNSKPIKQLLSENNFMDITIILSRDNTTKYNSEWWVLNLTGNRIYNPNSQALELVVFNDKVSPPSLGFLAGYGIMGLYASVVLVIGKFVREFFSGISHSIMFEELPNVDRILKLCTDIFLVRETGELELEEDLYAKLIFLYRSPETMIKWTREKTN

SEQ ID NO: 872535 - protein, 378 aa, Homo sapiens
KRELYMEKLQEHLIKAKAFTIKKTLEIYVPIKQFFYNLIHPEYSAVTDVYVLMFLADTVDFIIIVFGFWAFGKHSAAADITSSLSEDQVPGPFLVMVLIQFGTMVVDRALYLRKTVLGKVIFQVILVFGIHFWMFFILPGVTERKFSQNLVAQLWYFVKCVYFGLSAYQIRCGYPTRVLGNFLTKSYNYVNLFLFQGFRLVPFLTELRAVMDWVWTDTTLSLSSWICVEDIYAHIFILKCWRESEKPIFTMSAQQSQLKVMDQQSFNKFIQAFSRDTGAMQFLENYEKEDITVAELEGNSNSLWTISPPSKQKMIHELLDPNSSFSVVFSWSIQRNLSLGAKSEIATDKLSFPLKNITRKNIAKMIAGNSTESSKTPV

SEQ ID NO: 872536 - protein, 549 aa, Homo sapiens
KRELYMEKLQEHLIKAKAFTIKKTLEIYVPIKQFFYNLIHPEYSAVTDVYVLMFLADTVDFIIIVFGFWAFGKHSAAADITSSLSEDQVPGPFLVMVLIQFGTMVVDRALYLRKTVLGKVIFQVILVFGIHFWMFFILPGVTERKFSQNLVAQLWYFVKCVYFGLSAYQIRCGYPTRVLGNFLTKSYNYVNLFLFQGFRLVPFLTELRAVMDWVWTDTTLSLSSWICVEDIYAHIFILKCWRESEKPIFTMSAQQSQLKVMDQQSFNKFIQAFSRDTGAMQFLENYEKEDITVAELEGNSNSLWTISPPSKQKMIHELLDPNSSFSVVFSWSIQRNLSLGAKSEIATDKLSFPLKNITRKNIAKMIAGNSTESSKTPVTIEKIYPYYVKAPSDSNSKPIKQLLSENNFMDITIILSRDNTTKYNSEWWVLNLTGNRIYNPNSQALELVVFNDKVSPPSLGFLAGYGIMGLYASVVLVIGKFVREFFSGISHSIMFEELPNVDRILKLCTDIFLVRETGELELEEDLYAKLIFLYRSPETMIKWTREKTN

SEQ ID NO: 872537 - protein, 467 aa, Homo sapiens
KRELYMEKLQEHLIKAKAFTIKKTLEIYVPIKQFFYNLIHPEYSAVTDVYVLMFLADTVDFIIIVFGFWAFGKHSAAADITSSLSEDQVPGPFLVMVLIQFGTMVVDRALYLRKTVLGKVIFQVILVFGIHFWMFFILPGVTERKFSQNLVAQLWYFVKCVYFGLSAYQIRCGYPTRVLGNFLTKSYNYVNLFLFQGFRLVPFLTELRAVMDWVWTDTTLSLSSWICVEDIYAHIFILKCWRESEKPIFTMSAQQSQLKVMDQQSFNKFIQAFSRDTGAMQFLENYEKEDITVAELEGNSNSLWTISPPSKQKMIHELLDPNSSFSVVFSWSIQRNLSLGAKSEIATDKLSFPLKNITRKNIAKMIAGNSTESSKTPVTIEKIYPYYVKAPSDSNSKPIKQLLSENNFMDITIILSRDNTTKYNSEWWVLNLTGNRIYNPNSQALELVVFNDKVSPPSLGFLAGYGF

SEQ ID NO: 872538 - protein, 78 aa, Homo sapiens
MTYSSCLYLFLFFSDLSYFLYSDEHLNLGAPSPTSSRTSSQASLAPHPLGSPGTTSFFMVAKPGPWAPTLPQGEALAG

SEQ ID NO: 872539 - protein, 114 aa, Homo sapiens
QQRNPGDRTASTTTRRRRRRHTALGKSEVLSDHSHHDSRAGRGARKQRWETWRHPKKRLPQKHCCARTCKSLRRLCPMAPAPCSEVAQVSKARRGTEETKKKQHSSWGGRNSRV

SEQ ID NO: 872540 - protein, 81 aa, Homo sapiens
LLRSPLDGSRSDETRLLLVLIDRSNLGLPKCWDYRREPPCLACPWVLEIRELVVTLNEHAAFKHLFNKAHLAQPLIHLTLS

SEQ ID NO: 872541 - protein, 562 aa, Homo sapiens
MLACLPGPGDLSFQLLSHTQMNTGLQKWDTTQKMRTAHYPTPAELDAYAKKVANNPLTIKIFPNSVKVPQRKHVRRTVNGLDTSAQRYSPYPTQAATKAGLLAIVKVPAKSILKDFDGTRARLLPEAIMNPPVAPYATVAPSTLAHPQAQALARQQALQHAQTLAHAPPQTLQHPQGIPPPQALSHPQSLQQPQGLGHPQPMAQTQGLVHPQALAHQGLQHPHNPLLHGGRKMPDSDAPPNVTVSTSTIPLSMAATLQHSQPPDLSSIVHQINQFCQTRAGISTTSVCEGQIANPSPISRSLLINASTRVSTHSVPTPMPSCVVNPMEHTHAATAALPAAGPVNLPTGISRVPTGYPSDLKPVTWNQHQLAHLQQMCSEASGTPAPGLTGKHAAGRELAGPGFVGKAPAYPQELCLAQSFHLKPPLEKPTPSPPVNGMAAPLAYPNGHYFQPLWNNILPTPNSDSSGSQDLAMPFHGGQPTGAPLDCAAAPGAHYRAGTGGGPVASQNSLMQTVDYLSGDFQQACFREQSLAMLSKAHRAPGNRAPDPTESRSLHIQHPGYR

SEQ ID NO: 872542 - protein, 581 aa, Homo sapiens [sequence omitted]

SEQ ID NO: 872543 - protein, 434 aa, Homo sapiens
MNPPVAPYATVAPSTLAHPQAQALARQQALQHAQTLAHAPPQTLQHPQGIPPPQALSHPQSLQQPQGLGHPQPMAQTQGLVHPQALAHQGLQHPHNPLLHGGRKMPDSDAPPNVTVSTSTIPLSMAATLQHSQPPDLSSIVHQINQFCQTRAGISTTSVCEGQIANPSPISRSLLINASTRVSTHSVPTPMPSCVVNPMEHTHAATAALPAAGPVNLPTGISRVPTGYPSDLKPVTWNQHQLAHLQQMCSEASGTPAPGLTGKHAAGRELAGPGFVGKAPAYPQELCLAQSFHLKPPLEKPTPSPPVNGMAAPLAYPNGHYFQPLWNNILPTPNSDSSGSQDLAMPFHGGQPTGAPLDCAAAPGAHYRAGTGGGPVASQNSLMQTVDYLSGDFQQACFREQSLAMLSKAHRAPGNRAPDPTESRSLHIQHPGYR

SEQ ID NO: 872544 - protein, 562 aa, Homo sapiens; identical to SEQ ID NO: 872541

SEQ ID NO: 872545 - protein, 562 aa, Homo sapiens; identical to SEQ ID NO: 872541

SEQ ID NO: 872546 - protein, 562 aa, Homo sapiens; identical to SEQ ID NO: 872541

SEQ ID NO: 872547 - protein, 434 aa, Homo sapiens; identical to SEQ ID NO: 872543

SEQ ID NO: 872548 - protein, 562 aa, Homo sapiens; identical to SEQ ID NO: 872541

SEQ ID NO: 872549 - protein, 562 aa, Homo sapiens; identical to SEQ ID NO: 872541

SEQ ID NO: 872550 - protein, 45 aa, Homo sapiens
SRGNKSTIKALIDSVSSEASLPDLWTATFSLCPFMIFPQCMCSER

SEQ ID NO: 872551 - protein, 116 aa, Homo sapiens
MSKKSEASKKKTAQTVLVVVVVFGISWLPHHIIHLWAEFGVFPLTPASFLFRITAHCLAYSNSSVNPIIYAFLSENFRKAYKQVFKCHIRKDSHLSDTKENKSRIDTPPSTNCTHV

SEQ ID NO: 872552 - protein, 349 aa, Homo sapiens
MELAVGNLSEGNASWPEPPAPEPGPLFGIGVENFVTLVVFGLIFALGVLGNSLVITVLARSKPGKPRSTTNLFILNLSIADLAYLLFCIPFQATVYALPTWVLGAFICKFIHYFFTVSMLVSIFTLAAMSVDRYVAIVHSRRSSSLRVSRNALLGVGCIWALSIAMASPVAYHQGLFHPRASNQTFCWEQWPDPRHKKAYVVCTFVFGYLLPLLLICFCYAKVLNHLHKKLKNMSKKSEASKKKTAQTVLVVVVVFGISWLPHHIIHLWAEFGVFPLTPASFLFRITAHCLAYSNSSVNPIIYAFLSENFRKAYKQVFKCHIRKDSHLSDTKENKSRIDTPPSTNCTHV

SEQ ID NO: 872553 - protein, 34 aa, Homo sapiens
MLWGRPADVCCVPAVGHQPSVVSIKFELRKKIKE

SEQ ID NO: 872554 - protein, 68 aa, Homo sapiens
HSAHGPLLYINTCYYNILVHKRVGVLLEFMYLRQQMSNQLKQRLYLIAKNKTGIFPLLINVNPTIFQH

SEQ ID NO: 872555 - protein, 69 aa, Homo sapiens
LLHCQNGGTCHNNVRCLCPAAYTGILCEKLRCEEAGSCGSDSGQGAPPHGSPALLLLTTLLGTASPLVF

SEQ ID NO: 872556 - protein, 275 aa, Homo sapiens
MVMLQGVVPLDAHRFQVDFQCGCSLCPRPDIAFHFNPRFHTTKPHVICNTLHGGRWQREARWPHLALRRGSSFLILFLFGNEEVKVSVNGQHFLHFRYRLPLSHVDTLGIFGDILVEAVGFLNINPFVEGSREYPAGHPFLLMSPRLEVPCSHALPQGLSPGQVIIVRGLVLQEPKHFTVSLRDQAAHAPVTLRASFADRTLAWISRWGQKKLISAPFLFYPQRFFEVLLLFQEGGLKLALNGQGLGATSMNQQALEQLRELRISGSVQLYCVHS

SEQ ID NO: 872557 - protein, 305 aa, Homo sapiens
MSPGEKLDPIPDSFILQPPVFHPVVPYVTTIFGGLHAGKMVMLQGVVPLDAHRFQVDFQCGCSLCPRPDIAFHFNPRFHTTKPHVICNTLHGGRWQREARWPHLALRRGSSFLILFLFGNEEVKVSVNGQHFLHFRYRLPLSHVDTLGIFGDILVEAVGFLNINPFVEGSREYPAGHEVPCSHALPQGLSPGQVIIVRGLVLQEPKHFTVSLRDQAAHAPVTLRASFADRTLAWISRWGQKKLISAPFLFYPQRFFEVLLLFQEGGLKLALNGQGLGATSMNQQALEQLRELRISGSVQLYCVHS

SEQ ID NO: 872558 - protein, 314 aa, Homo sapiens
MSPGEKLDPIPDSFILQPPVFHPVVPYVTTIFGGLHAGKMVMLQGVVPLDAHRFQVDFQCGCSLCPRPDIAFHFNPRFHTTKPHVICNTLHGGRWQREARWPHLALRRGSSFLILFLFGNEEVKVSVNGQHFLHFRYRLPLSHVDTLGIFGDILVEAVGFLNINPFVEGSREYPAGHPFLLMSPRLEVPCSHALPQGLSPGQVIIVRGLVLQEPKHFTVSLRDQAAHAPVTLRASFADRTLAWISRWGQKKLISAPFLFYPQRFFEVLLLFQEGGLKLALNGQGLGATSMNQQALEQLRELRISGSVQLYCVHS

SEQ ID NO: 872559 - protein, 314 aa, Homo sapiens; identical to SEQ ID NO: 872558

SEQ ID NO: 872560 - protein, 266 aa, Homo sapiens
MVMLQGVVPLDAHRFQVDFQCGCSLCPRPDIAFHFNPRFHTTKPHVICNTLHGGRWQREARWPHLALRRGSSFLILFLFGNEEVKVSVNGQHFLHFRYRLPLSHVDTLGIFGDILVEAVGFLNINPFVEGSREYPAGHEVPCSHALPQGLSPGQVIIVRGLVLQEPKHFTVSLRDQAAHAPVTLRASFADRTLAWISRWGQKKLISAPFLFYPQRFFEVLLLFQEGGLKLALNGQGLGATSMNQQALEQLRELRISGSVQLYCVHS

SEQ ID NO: 872561 - protein, 109 aa, Homo sapiens
MVSGETPDHWRPSSMCQLSPTPASFQQPYFERGTYMSPVIRRLKLASWGRYLLGPPFPLTNPSDFFLTFSSPEPAKRTVLKIPAISIYGVTTVYLCAHPPFHPNLPAQP

SEQ ID NO: 872562 - protein, 495 aa, Homo sapiens
MRVGAEYQARIPEFDPGATKYTDKDNGGMLVWSPYHSIPDAKLDEYIAIAKEKHGYNVEQALGMLFWHKHNIEKSLADLPNFTPFPDEWTVEDKVLFEQAFSFHGKSFHRIQQMLPDKTIASLVKYYYSWKKTRSRTSLMDRQARKLANRHNQGDSDDDVEETHPMDGNDSDYDPKKEAKKEGNTEQPVQTSKIGLGRREYQSLQHRHHSQRSKCRPPKGMYLTQEDVVAVSCSPNAANTILRQLDMELISLKRQVQNAKQVNSALKQKMEGGIEEFKPPESNQKINARWTTEEQLLAVQGVRKYGKDFQAIADVIGNKTVGQVKNFFVNYRRRFNLEEVLQEWEAEQGTQASNGDASTLGEETKSASNVPSGKSTDEEEEAQTPQAPRTLGPSPPAPSSTPTPTAPIATLNQPPPLLRPTLPAAPALHRQPPPLQQQARFIQPRPTLNQPPPPLIRPANSMPPRLNPRPVLSTVGGQQPPSLIGIQTDSQSSLH

SEQ ID NO: 872563 - protein, 391 aa, Homo sapiens [sequence omitted]

SEQ ID NO: 872564 - protein, 307 aa, Homo sapiens [sequence omitted]

SEQ ID NO: 872565 - protein, 378 aa, Homo sapiens
MRVGAEYQARIPEFDPGATKYTDKDNGGMLVWSPYHSIPDAKLDEYIAIAKEKHGYNVEQALGMLFWHKHNIEKSLADLPNFTPFPDEWTVEDKVLFEQAFSFHGKSFHRIQQMLPDKTIASLVKYYYSWKKTRSRTSLMDRQARKLANRHNQGDSDDDVEETHPMDGNDSDYDPKKEAKKEGNTEQPVQTSKIGLGRREYQSLQHRHHSQRSKCRPPKGMYLTQEDVVAVSCSPNAANTILRQLDMELISLKRQVQNAKQVNSALKQKMEGGIEEFKPPESNQKINARWTTEEQLLAVQGTDPTGSSDTGSITSCPIIHSNTNSPYCHSEPASTTSSSNTACCPGSSPAASSTPAAGSVHPAPANFKSASTTSYSPC

SEQ ID NO: 872566 - protein, 391 aa, Homo sapiens [sequence omitted]

SEQ ID NO: 872567 - protein, 495 aa, Homo sapiens; identical to SEQ ID NO: 872562

SEQ ID NO: 872568 - protein, 135 aa, Homo sapiens
KFLAKYTGHLTKKGKVDLKNSTLLSQFRNLMPRWTPEKQFPAVQGVRKYGKDFQAIADVIGNKTVGQVKNFFVNYRRRFNLEEVLQEWEAEQGTQASNGDASTLGEETKSASNVPSGKSTDEEEEVCLCMEFELI

SEQ ID NO: 872569 - protein, 230 aa, Homo sapiens
MDGNDSDYDPKKEAKKEGNTEQPVQTSKIGLGRREYQSLQHRHHSQRSKCRPPKGMYLTQEDVVAVSCSPNAANTILRQLDMELISLKRQVQNAKQVNSALKQKMEGGIEEFKPPEAQTPQAPRTLGPSPPAPSSTPTPTAPIATLNQPPPLLRPTLPAAPALHRQPPPLQQQARFIQPRPTLNQPPPPLIRPANSMPPRLNPRPVLSTVGGQQPPSLIGIQTDSQSSLH

SEQ ID NO: 872570 - protein, 211 aa, Homo sapiens
MRVGAEYQARIPEFDPGATKYTDKDNGGMLVWSPYHSIPDAKLDEYIAIAKEKHGYNVEQALGMLFWHKHNIEKSLADLPNFTPFPDEWTVEDKVLFEQAFSFHGKSFHRIQQMLPDKTIASLVKYYYSWKKTRSRTSLMDRQARKLANRHNQGDSDDDVEETHPMDGNDSDYDPKKEAKKEVMMITRSTCDCSTNLLKKNEQYFVLRKTF

SEQ ID NO: 872571 - protein, 77 aa, Homo sapiens
PPELALIRVRPTRSTPRNRPHREEVRWQALGAHSLVLLNSVSKPRLPAADPGHVLQDCSHTSLPTPALALSSLTLLK

SEQ ID NO: 872572 - protein, 141 aa, Homo sapiens [sequence omitted]

SEQ ID NO: 872573 - protein, 682 aa, Homo sapiens
MLHLLALFLHCLPLASGDYDICKSWVTTDEGPTWEFYACQPKVMRLKDYVKVKVEPSGITCGDPPERFCSHENPYLCSNECDASNPDLAHPPRLMFDKEEEGLATYWQSITWSRYPSPLEANITLSWNKTVELTDDVVMTFEYGRPTVMVLEKSLDNGRTWQPYQFYAEDCMEAFGMSARRARDMSSSSAHRVLCTEEYSRWAGSKKEKHVRFEVRDRFAIFAGPDLRNMDNLYTRLESAKGLKEFFTLTDLRMRLLRPALGGTYVQRENLYKYFYAISNIEVIGRCKCNLHANLCSMREGSLQCECEHNTTGPDCGKCKKNFRTRSWRAGSYLPLPHGSPNACAAAGSFGTTLRLSQELHQCCFGKRDRTFCRSLGPWVGSLLLLPPSHFSHLDLGEQSLLPVKSGVTFPHQGQNPPPSLTMGAASLWAASAASLSQGSARPGQLRSQGSRTREGHLQEVGVLRVPQEGEGDMAPTGYQYMSSRLSPDTHRVPGTVSPFSLANPSPWEVAICSARQQERTGQCQRASREQTPNLRDASGVHRHPPPGLCGAPHPTQVVPPGPRGPLAGKPVSREGARKKLDPAGTLVCTAVVSCFSVVSPPRQPPNPLLLFPSLTRHQQVPERPRPQRPCGHCGHHSHDRGPYYSCPLHVHCLGPHGAQHPTAHRWVPGYSDPCHPTLSCF

SEQ ID NO: 872574 - protein, 530 aa, Homo sapiens
MLHLLALFLHCLPLASGDYDICKSWVTTDEGPTWEFYACQPKVMRLKDYVKVKVEPSGITCGDPPERFCSHENPYLCSNECDASNPDLAHPPRLMFDKEEEGLATYWQSITWSRYPSPLEANITLSWNKTVELTDDVVMTFEYGRPTVMVLEKSLDNGRTWQPYQFYAEDCMEAFGMSARRARDMSSSSAHRVLCTEEYSRWAGSKKEKHVRFEVRDRFAIFAGPDLRNMDNLYTRLESAKGLKEFFTLTDLRMRLLRPALGGTYVQRENLYKYFYAISNIEVIGRCKCNLHANLCSMREGSLQCECEHNTTGPDCGKCKKNFRTRSWRAGSYLPLPHGSPNACAAAGSFGNCECYGHSNRCSYIDFLNVVTCVSCKHNTRGQHCQHCRLGYYRNGSAELDDENVCIECNCNQIGSVHDRCNETGFCECREGAAGPKCDDCLPTHYWRQGCYPNVCDDDQLLCQNGGTCLQNQRCACPRGYTGVRCEQPRCDPADDDGGLDCDRAPGAAPRPATLLGCLLLLGLAARLGR

SEQ ID NO: 872575 - protein, 88 aa, Homo sapiens
EKDRAGVGWKANVCDDDQLLCQNGGTCLQNQRCACPRGYTGVRCEQPRCDPADDDGGLDCDRAPGAAPRPATLLGCLLLLGLAARLGR

SEQ ID NO: 872576 - protein, 246 aa, Homo sapiens
MTTGDCCHLPGSLCDCSGSPAFSKVVEATGLGPPQYVAQVTSRDGRLLSTVIRALDTPSDGPFCRICHEGANGECLLSPCGCTGTLGAVHKSCLEKWLSSSNTSYCELCHTEFAVEKRPRPLTEWLKDPGPRTEKRTLCCDMVCFLFITPLAAISGWLCLRGAQDHLRLHSQLEAVGLIALTIALFTIYVLWTLVSFRYHCQLYSEWRKTNQKVRLKIREADSPEGPQHSPLAAGLLKKVAEETPV

SEQ ID NO: 872577 - protein, 246 aa, Homo sapiens; identical to SEQ ID NO: 872576

SEQ ID NO: 872578 - protein, 246 aa, Homo sapiens; identical to SEQ ID NO: 872576

SEQ ID NO: 872579 - protein, 176 aa, Homo sapiens
MTTGDCCHLPGSLCDCSGSPAFSKVVEATGLGPPQYVAQVTSRDGRLLSTVIRALDTPSDGPFCRICHEGANGECLLSPCGCTGTLGAVHKSCLEKWLSSSNTSYCELCHTEFAVEKRPRPLTEVSFRYHCQLYSEWRKTNQKVRLKIREADSPEGPQHSPLAAGLLKKVAEETPV

SEQ ID NO: 872580 - protein, 202 aa, Homo sapiens
MTTGDCCHLPGSLCDCSGSPAFSKVVEATGLGPPQYVAQVTSRDGRLLSTVIRALDTPSDGPFCRICHEGANGECLLSPCGCTGTLGAVHKSCLEKWLSSSNTSYCELCHTEFAVEKRPRPLTEWLKDPGPRTEKRTLCCDMVCFLFITPLAAISGWLCLRGAQDHLRLHSQLEAVGLIALTIALFTIYVLWTLVSGCGCAA

SEQ ID NO: 872581 - protein, 143 aa, Homo sapiens
AAGGARTQVPAGAELVAPTGRAGPGPGPRRTEGPVRPPGPAADQGRHGPAGRAGGRQSAGRPRVRGRSSAPGRDGWARSLGHSLLGDAGTSVPVSRPVGGLRGPAHIGASPSLGFPTCETGSSHCQPDGASGRIQEVAGAENA

SEQ ID NO: 872582 - protein, 143 aa, Homo sapiens; identical to SEQ ID NO: 872581

SEQ ID NO: 872583 - protein, 246 aa, Homo sapiens; identical to SEQ ID NO: 872576

SEQ ID NO: 872584 - protein, 76 aa, Homo sapiens
SGGRCPDAGAGRSGASGADGPGRAGTGAEANRGACAAARPGRGSGDWRLGLALLPRLECSGVIIAHYSLELLGSRG

SEQ ID NO: 872585 - protein, 75 aa, Homo sapiens
RSTGKGCLRSCEISRDGLSFVIPQPLSPSSFTQQEYGSLFSVLWTLDTVGSLIVIRKTERISDLMLSKSRLQSPP

SEQ ID NO: 872586 - protein, 70 aa, Homo sapiens
VDRGTNCTLVLVFEFKDGARVDMVGRGTRVLTQQLEELTAPWSSPQSPVHPPSLTFLHSKGYQHCPAQGP

SEQ ID NO: 872587 - protein, 105 aa, Homo sapiens
AWSWLGWAEDHRGKMDGKLDLLGPRMMPMGEEGGSANPPFCPLPSPFSFPSCFGVQTQRRNSSAASRARTHSATVKTTSRSSCRSAAVTCSPVAQQPSAPCVPTS

SEQ ID NO: 872588 - protein, 781 aa, Homo sapiens
AWSWLGWAEDHRGKMDGKLDLLGPRMMPMGEEGGSANPPFCPLTFPFLIPQLLWGADAEKKQQCSFKGKDPQRDCQNYIKILLPLSGSHLFTCGTAAFSPMCTYINMENFTLARDEKGNVLLEDGKGRCPFDPNFKSTALVVDGELYTGTVSSFQGNDPAISRSQSLRPTKTESSLNWLQDPAFVASAYIPESLGSLQGDDDKIYFFFSETGQEFEFFENTIVSRIARICKGDEGGERVLQQRWTSFLKAQLLCSRPDDGFPFNVLQDVFTLSPSPQDWRDTLFYGVFTSQWHRGTTEGSAVCVFTMKDVQRVFSGLYKEVNRETQQWYTVTHPVPTPRPGACITNSARERKINSSLQLPDRVLNFLKDHFLMDGQVRSRMLLLQPQARYQRVAVHRVPGLHHTYDVLFLGTGDGRLHKAVSVGPRVHIIEELQIFSSGQPVQNLLLDTHRGLLYAASHSGVVQVPMANCSLYRSCGDCLLARDPYCAWSGSSCKHVSLYQPQLATRPWIQDIEGASAKDLCSASSVVSPSFVPTGEKPCEQVQFQPNTVNTLACPLLSNLATRLWLRNGAPVNASASCHVLPTGDLLLVGTQQLGEFQCWSLEEGFQQLVASYCPEVVEDGVADQTDEGGSVPVIISTSRVSAPAGGKASWGADRSYWKEFLVMCTLFVLAVLLPVLFLLYRHRNSMKVFLKQGECASVHPKTCPVVLPPETRPLNGLGPPSTPLDHRGYQSLSDSPPGARVFTESEKRPLSIQDSFVEVSPVCPRPRVRLGSEIRDSVV

SEQ ID NO: 872589 - protein, 943 aa, Homo sapiens
GPAWQGGRVSGHSRKSGPAGGDDRALTLTHSRSGGGGPRGDSGADRGAELPPVSPAEPPEPEPRDTVAPALRMLRTAMGLRSWLAAPWGALPPRPPLLLLLLLLLLLQPPPPTWALSPRISLPLGSEERPFLRFEAEHISNYTALLLSRDGRTLYVGAREALFALSSNLSFLPGGEYQELLWGADAEKKQQCSFKGKDPQRDCQNYIKILLPLSGSHLFTCGTAAFSPMCTYINMENFTLARDEKGNVLLEDGKGRCPFDPNFKSTALVVDGELYTGTVSSFQGNDPAISRSQSLRPTKTESSLNWLQDPAFVASAYIPESLGSLQGDDDKIYFFFSETGQEFEFFENTIVSRIARICKGDEGGERVLQQRWTSFLKAQLLCSRPDDGFPFNVLQDVFTLSPSPQDWRDTLFYGVFTSQWHRGTTEGSAVCVFTMKDVQRVFSGLYKEVNRETQQWYTVTHPVPTPRPGACITNSARERKINSSLQLPDRVLNFLKDHFLMDGQVRSRMLLLQPQARYQRVAVHRVPGLHHTYDVLFLGTGKCCSPAGSGEGVHVAGGSWAVGSTQGLSPVHTPGDGRLHKAVSVGPRVHIIEELQIFSSGQPVQNLLLDTHRGLLYAASHSGVVQVPMANCSLYRSCGDCLLARDPYCAWSGSSCKHVSLYQPQLATRPWIQDIEGASAKDLCSASSVVSPSFVPTGEKPCEQVQFQPNTVNTLACPLLSNLATRLWLRNGAPVNASASCHVLPTGDLLLVGTQQLGEFQCWSLEEGFQQLVASYCPEVVEDGVADQTDEGGSVPVIISTSRVSAPAGGKASWGADRSYWKEFLVMCTLFVLAVLLPVLFLLYRHRNSMKVFLKQGECASVHPKTCPVVLPPETRPLNGLGPPSTPLDHRGYQSLSDSPPGARVFTESEKRPLSIQDSFVEVSPVCPRPRVRLGSEIRDSVV

SEQ ID NO: 872590 - protein, 400 aa, Homo sapiens
TRRQPQDTDERRARQRVPGLHHTYDVLFLGTGDGRLHKAVSVGPRVHIIEELQIFSSGQPVQNLLLDTHRGLLYAASHSGVVQVPMANCSLYRSCGDCLLARDPYCAWSGSSCKHVSLYQPQLATRPWIQDIEGASAKDLCSASSVVSPSFVPTGEKPCEQVQFQPNTVNTLACPLLSNLATRLWLRNGAPVNASASCHVLPTGDLLLVGTQQLGEFQCWSLEEGFQQLVASYCPEVVEDGVADQTDEGGSVPVIISTSRVSAPAGGKASWGADRSYWKEFLVMCTLFVLAVLLPVLFLLYRHRNSMKVFLKQGECASVHPKTCPVVLPPETRPLNGLGPPSTPLDHRGYQSLSDSPPGARVFTESEKRPLSIQDSFVEVSPVCPRPRVRLGSEIRDSVV

SEQ ID NO: 872591 - protein, 382 aa, Homo sapiens
DKGSSHELLESGVACYVTGLLGVALGGIQAGWPWVMALAAHARFSSPCLAVQGLLYAASHSGVVQVPMANCSLYRSCGDCLLARDPYCAWSGSSCKHVSLYQPQLATRPWIQDIEGASAKDLCSASSVVSPSFVPTGEKPCEQVQFQPNTVNTLACPLLSNLATRLWLRNGAPVNASASCHVLPTGDLLLVGTQQLGEFQCWSLEEGFQQLVASYCPEVVEDGVADQTDEGGSVPVIISTSRVSAPAGGKASWGADRSYWKEFLVMCTLFVLAVLLPVLFLLYRHRNSMKVFLKQGECASVHPKTCPVVLPPETRPLNGLGPPSTPLDHRGYQSLSDSPPGARVFTESEKRPLSIQDSFVEVSPVCPRPRVRLGSEIRDSVV

SEQ ID NO: 872592 - protein, 318 aa, Homo sapiens
MLTPVGGESAQERPLPRPKSAGGVRECELRGLPGPIPEFSLALRPWIQDIEGASAKDLCSASSVVSPSFVPTGEKPCEQVQFQPNTVNTLACPLLSNLATRLWLRNGAPVNASASCHVLPTGDLLLVGTQQLGEFQCWSLEEGFQQLVASYCPEVVEDGVADQTDEGGSVPVIISTSRVSAPAGGKASWGADRSYWKEFLVMCTLFVLAVLLPVLFLLYRHRNSMKVFLKQGECASVHPKTCPVVLPPETRPLNGLGPPSTPLDHRGYQSLSDSPPGARVFTESEKRPLSIQDSFVEVSPVCPRPRVRLGSEIRDSVV

SEQ ID NO: 872593 - protein, 814 aa, Homo sapiens
GPAWQGGRVSGHSRKSGPAGGDDRALTLTHSRSGGGGPRGDSGADRGAELPPVSPAEPPEPEPRDTVAPALRMLRTAMGLRSWLAAPWGALPPRPPLLLLLLLLLLLQPPPPTWALSPRISLPLGSEERPFLRFEAEHISNYTALLLSRDGRTLYVGAREALFALSSNLSFLPGGEYQELLWGADAEKKQQCSFKGKDPQRDCQNYIKILLPLSGSHLFTCGTAAFSPMCTYINMENFTLARDEKGNVLLEDGKGRCPFDPNFKSTALVVDGELYTGTVSSFQGNDPAISRSQSLRPTKTESSLNWLQDPAFVASAYIPESLGSLQGDDDKIYFFFSETGQEFEFFENTIVSRIARICKGDEGGERVLQQRWTSFLKAQLLCSRPDDGFPFNVLQDVFTLSPSPQDWRDTLFYGVFTSQWHRGTTEGSAVCVFTMKDVQRVFSGLYKEVNRETQQWYTVTHPVPTPRPGACITNSARERKINSSLQLPDRVLNFLKDHFLMDGQVRSRMLLLQPQARYQRVAVHRVPGLHHTYDVLFLGTGDGRLHKAVSVGPRVHIIEELQIFSSGQPVQNLLLDTHRGLLYAASHSGVVQVPMANCSLYRSCGDCLLARDPYCAWSGSSCKHVSLYQPQLATRPWIQDIEGASAKDLCSASSVVSPSFVPTGEKPCEQVQFQPNTVNTLACPLLSNLATRLWLRNGAPVNASASCHVLPTGDLLLVGTQQLGEFQCWSLEEGFQQLVASYCPEVVEDGVADQTDEGGSVPVIISTSRVSAPAGGKASWGADRSWARTQLLDLSSLYQAVATREDSASSGEIS

SEQ ID NO: 872594 - protein, 201 aa, Homo sapiens [sequence omitted]

SEQ ID NO: 872595 - protein, 201 aa, Homo sapiens [sequence omitted]

SEQ ID NO: 872596 - protein, 143 aa, Homo sapiens
TPSVPHTSPACRVAFSCTPLSFSPSLLLIPWSAPEPMCPPSCRTWRTSPWQGTRRGMSSWKMARAVVPSTRISSPLPWWLVSVEGRMASLRFHVGAHRARGLALDRLSPCHAYFQGDRMARGLPWVWFFQVPASFSAHHRQNG

SEQ ID NO: 872597 - protein, 832 aa, Homo sapiens
MGLRSWLAAPWGALPPRPPLLLLLLLLLLLQPPPPTWALSPRISLPLGSEERPFLRFEAEHISNYTALLLSRDGRTLYVGAREALFALSSNLSFLPGGEYQELLWGADAEKKQQCSFKGKDPQRDCQNYIKILLPLSGSHLFTCGTAAFSPMCTYINMENFTLARDEKGNVLLEDGKGRCPFDPNFKSTALVVDGELYTGTVSSFQGNDPAISRSQSLRPTKTESSLNWLQDPAFVASAYIPESLGSLQGDDDKIYFFFSETGQEFEFFENTIVSRIARICKGDEGGERVLQQRWTSFLKAQLLCSRPDDGFPFNVLQDVFTLSPSPQDWRDTLFYGVFTSQWHRGTTEGSAVCVFTMKDVQRVFSGLYKEVNRETQQWYTVTHPVPTPRPGACITNSARERKINSSLQLPDRVLNFLKDHFLMDGQVRSRMLLLQPQARYQRVAVHRVPGLHHTYDVLFLGTGDGRLHKAVSVGPRVHIIEELQIFSSGQPVQNLLLDTHRGLLYAASHSGVVQVPMANCSLYRSCGDCLLARDPYCAWSGSSCKHVSLYQPQLATRPWIQDIEGASAKDLCSASSVVSPSFVPTGEKPCEQVQFQPNTVNTLACPLLSNLATRLWLRNGAPVNASASCHVLPTGDLLLVGTQQLGEFQCWSLEEGFQQLVASYCPEVVEDGVADQTDEGGSVPVIISTSRVSAPAGGKASWGADRSYWKEFLVMCTLFVLAVLLPVLFLLYRHRNSMKVFLKQGECASVHPKTCPVVLPPETRPLNGLGPPSTPLDHRGYQSLSDSPPGARVFTESEKRPLSIQDSFVEVSPVCPRPRVRLGSEIRDSVV

SEQ ID NO: 872598 - protein, 909 aa, Homo sapiens
GPAWQGGRVSGHSRKSGPAGGDDRALTLTHSRSGGGGPRGDSGADRGAELPPVSPAEPPEPEPRDTVAPALRMLRTAMGLRSWLAAPWGALPPRPPLLLLLLLLLLLQPPPPTWALSPRISLPLGSEERPFLRFEAEHISNYTALLLSRDGRTLYVGAREALFALSSNLSFLPGGEYQELLWGADAEKKQQCSFKGKDPQRDCQNYIKILLPLSGSHLFTCGTAAFSPMCTYINMENFTLARDEKGNVLLEDGKGRCPFDPNFKSTALVVDGELYTGTVSSFQGNDPAISRSQSLRPTKTESSLNWLQDPAFVASAYIPESLGSLQGDDDKIYFFFSETGQEFEFFENTIVSRIARICKGDEGGERVLQQRWTSFLKAQLLCSRPDDGFPFNVLQDVFTLSPSPQDWRDTLFYGVFTSQWHRGTTEGSAVCVFTMKDVQRVFSGLYKEVNRETQQWYTVTHPVPTPRPGACITNSARERKINSSLQLPDRVLNFLKDHFLMDGQVRSRMLLLQPQARYQRVAVHRVPGLHHTYDVLFLGTGDGRLHKAVSVGPRVHIIEELQIFSSGQPVQNLLLDTHRGLLYAASHSGVVQVPMANCSLYRSCGDCLLARDPYCAWSGSSCKHVSLYQPQLATRPWIQDIEGASAKDLCSASSVVSPSFVPTGEKPCEQVQFQPNTVNTLACPLLSNLATRLWLRNGAPVNASASCHVLPTGDLLLVGTQQLGEFQCWSLEEGFQQLVASYCPEVVEDGVADQTDEGGSVPVIISTSRVSAPAGGKASWGADRSYWKEFLVMCTLFVLAVLLPVLFLLYRHRNSMKVFLKQGECASVHPKTCPVVLPPETRPLNGLGPPSTPLDHRGYQSLSDSPPGARVFTESEKRPLSIQDSFVEVSPVCPRPRVRLGSEIRDSVV

SEQ ID NO: 872599 - protein, 675 aa, Homo sapiens [sequence omitted]

SEQ ID NO: 872600 - protein, 919 aa, Homo sapiens
GPAWQGGRVSGHSRKSGPAGGDDRALTLTHSRSGGGGPRGDSGADRGAELPPVSPAEPPEPEPRDTVAPALRMLRTAMGLRSWLAAPWGALPPRPPLLLLLLLLLLLQPPPPTWALSPRISLPLGSEERPFLRFEAEHISNYTALLLSRDGRTLYVGAREALFALSSNLSFLPGGEYQELLWGADAEKKQQCSFKGKDPQRDCQNYIKILLPLSGSHLFTCGTAAFSPMCTYINMENFTLARDEKGNVLLEDGKGRCPFDPNFKSTALVVDGELYTGTVSSFQGNDPAISRSQSLRPTKTESSLNWLQDPAFVASAYIPESLGSLQGDDDKIYFFFSETGQEFEFFENTIVSRIARICKGDEGGERVLQQRWTSFLKAQLLCSRPDDGFPFNVLQDVFTLSPSPQDWRDTLFYGVFTSQWHRGTTEGSAVCVFTMKDVQRVFSGLYKEVNRETQQWYTVTHPVPTPRPGACITNSARERKINSSLQLPDRVLNFLKDHFLMDGQVRSRMLLLQPQARYQRVAVHRVPGLHHTYDVLFLGTGDGRLHKAVSVGPRVHIIEELQIFSSGQPVQNLLLDTHRVSRPTRNPGRGLLYAASHSGVVQVPMANCSLYRSCGDCLLARDPYCAWSGSSCKHVSLYQPQLATRPWIQDIEGASAKDLCSASSVVSPSFVPTGEKPCEQVQFQPNTVNTLACPLLSNLATRLWLRNGAPVNASASCHVLPTGDLLLVGTQQLGEFQCWSLEEGFQQLVASYCPEVVEDGVADQTDEGGSVPVIISTSRVSAPAGGKASWGADRSYWKEFLVMCTLFVLAVLLPVLFLLYRHRNSMKVFLKQGECASVHPKTCPVVLPPETRPLNGLGPPSTPLDHRGYQSLSDSPPGARVFTESEKRPLSIQDSFVEVSPVCPRPRVRLGSEIRDSVV

SEQ ID NO: 872601 - protein, 360 aa, Homo sapiens
GSTLTVQGSEAGWPVQNLLLDTHRGLLYAASHSGVVQVPMANCSLYRSCGDCLLARDPYCAWSGSSCKHVSLYQPQLATRILSGLRPWIQDIEGASAKDLCSASSVVSPSFVPTGEKPCEQVQFQPNTVNTLACPLLSNLATRLWLRNGAPVNASASCHVLPTGDLLLVGTQQLGEFQCWSLEEGFQQLVASYCPEVVEDGVADQTDEGGSVPVIISTSRVSAPAGGKASWGADRSYWKEFLVMCTLFVLAVLLPVLFLLYRHRNSMKVFLKQGECASVHPKTCPVVLPPETRPLNGLGPPSTPLDHRGYQSLSDSPPGARVFTESEKRPLSIQDSFVEVSPVCPRPRVRLGSEIRDSVV

SEQ ID NO: 872602 - protein, 909 aa, Homo sapiens; identical to SEQ ID NO: 872598

SEQ ID NO: 872603 - protein, 201 aa, Homo sapiens [sequence omitted]

SEQ ID NO: 872604 - protein, 643 aa, Homo sapiens
GPAWQGGRVSGHSRKSGPAGGDDRALTLTHSRSGGGGPRGDSGADRGAELPPVSPAEPPEPEPRDTVAPALRMLRTAMGLRSWLAAPWGALPPRPPLLLLLLLLLLLQPPPPTWALSPRISLPLGSEERPFLRFEAEHISNYTALLLSRDGRTLYVGAREALFALSSNLSFLPGGEYQELLWGADAEKKQQCSFKGKDPQRDCQNYIKILLPLSGSHLFTCGTAAFSPMCTYINMENFTLARDEKGNVLLEDGKGRCPFDPNFKSTALVVDGELYTGTVSSFQGNDPAISRSQSLRPTKTESSLNWLQDPAFVASAYIPESLGSLQGDDDKIYFFFSETGQEFEFFENTIVSRIARICKGDEGGERVLQQRWTSFLKAQLLCSRPDDGFPFNVLQDVFTLSPSPQDWRDTLFYGVFTSQWHRGTTEGSAVCVFTMKDVQRVFSGLYKEVNRETQQWYTVTHPVPTPRPGACITNSARERKINSSLQLPDRVLNFLKDHFLMDGQVRSRMLLLQPQARYQRVAVHRVPGLHHTYDVLFLGTGKCCSPAGSGEGVHVAGGSWAVGSTQGLSPVHTPGDGRLHKAVSVGPRVHIIEELQIFSSGQPVQNLLLDTHRVSRPTRNPGRVLGGCPPLAPSSPHPASPPL

SEQ ID NO: 872605 - protein, 545 aa, Homo sapiens
MSCKDGKASFTCTCKPGWQGEKCEFDINECKDPSNINGGCSQICDNTPGSYHCSCKNGFVMLSNKKDCKDVDECSLKPSICGTAVCKNIPGDFECECPEGYRYNLKSKSCEDIDECSENMCAQLCVNYPGGYTCYCDGKKGFKLAQDQKSCEVVSVCLPLNLDTKYELLYLAEQFAGVVLYLKFRLPEISRFSAEFDFRTYDSEGVILYAESIDHSAWLLIALRGGKIEVQLKNEHTSKITTGGDVINNGLWNMVSVEELEHSISIKIAKEAVMDINKPGPLFKPENGLLETKVYFAGFPRKVESELIKPINPRLDGCIRSWNLMKQGASGIKEIIQEKQNKHCLVTVEKGSYYPGSGIAQFHIDYNNVSSAEGWHVNVTLNIRPSTGTGVMLALVSGNNTVPFAVSLVDSTSEKSQDILLSVENTVIYRIQALSLCSDQQSHLEFRVNRNNLELSTPLKIETISHEDLQRQLAVLDKAMKAKVATYLGGLPDVPFSATPVNAFYNGCMEVNINGVQLDLDEAISKHNDIRAHSCPSVWKKTKNS

SEQ ID NO: 872606 - protein, 708 aa, Homo sapiens
MRVLGGRCGALLACLLLVLPVSEANFFLYFRNDSIYNHTCISVLVGLSGCYFFYSLCFLSKQQASQVLVRKRRANSLLEETKQGNLERECIEELCNKEEAREVFENDPETDYFYPKYLVCLRSFQTGLFTAARQSTNAYPDLRSCVNAIPDQCSPLPCNEDGYMSCKDGKASFTCTCKPGWQGEKCEFDINECKDPSNINGGCSQICDNTPGSYHCSCKNGFVMLSNKKDCKDVDECSLKPSICGTAVCKNIPGDFECECPEGYRYNLKSKSCEDIDECSENMCAQLCVNYPGGYTCYCDGKKGFKLAQDQKSCEVVSVCLPLNLDTKYELLYLAEQFAGVVLYLKFRLPEISRFSAEFDFRTYDSEGVILYAESIDHSAWLLIALRGGKIEVQLKNEHTSKITTGGDVINNGLWNMVSVEELEHSISIKIAKEAVMDINKPGPLFKPENGLLETKVYFAGFPRKVESELIKPINPRLDGCIRSWNLMKQGASGIKEIIQEKQNKHCLVTVEKGSYYPGSGIAQFHIDYNNVSSAEGWHVNVTLNIRPSTGTGVMLALVSGNNTVPFAVSLVDSTSEKSQDILLSVENTVIYRIQALSLCSDQQSHLEFRVNRNNLELSTPLKIETISHEDLQRQLAVLDKAMKAKVATYLGGLPDVPFSATPVNAFYNGCMEVNINGVQLDLDEAISKHNDIRAHSCPSVWKKTKNS

SEQ ID NO: 872607 - protein, 725 aa, Homo sapiens
AGGGGGGGGGGGRSTAQTEAHRLAAPRRLALRSPPRRATVPAGASARFEMRVLGGRCGALLACLLLVLPVSEANFLSKQQASQVLVRKRRANSLLEETKQGNLERECIEELCNKEEAREVFENDPETDYFYPKYLVCLRSFQTGLFTAARQSTNAYPDLRSCVNAIPDQCSPLPCNEDGYMSCKDGKASFTCTCKPGWQGEKCEFDINECKDPSNINGGCSQICDNTPGSYHCSCKNGFVMLSNKKDCKDVDECSLKPSICGTAVCKNIPGDFECECPEGYRYNLKSKSCEDIDECSENMCAQLCVNYPGGYTCYCDGKKGFKLAQDQKSCEVVSVCLPLNLDTKYELLYLAEQFAGVVLYLKFRLPEISRFSAEFDFRTYDSEGVILYAESIDHSAWLLIALRGGKIEVQLKNEHTSKITTGGDVINNGLWNMVSVEELEHSISIKIAKEAVMDINKPGPLFKPENGLLETKVYFAGFPRKVESELIKPINPRLDGCIRSWNLMKQGASGIKEIIQEKQNKHCLVTVEKGSYYPGSGIAQFHIDYNNVSSAEGWHVNVTLNIRPSTGTGVMLALVSGNNTVPFAVSLVDSTSEKSQDILLSVENTVIYRIQALSLCSDQQSHLEFRVNRNNLELSTPLKIETISHEDLQRQLAVLDKAMKAKVATYLGGLPDVPFSATPVNAFYNGCMEVNINGVQLDLDEAISKHNDIRAHSCPSVWKKTKNS

SEQ ID NO: 872608 - protein, 676 aa, Homo sapiens
MRVLGGRCGALLACLLLVLPVSEANFLSKQQASQVLVRKRRANSLLEETKQGNLERECIEELCNKEEAREVFENDPETDYFYPKYLVCLRSFQTGLFTAARQSTNAYPDLRSCVNAIPDQCSPLPCNEDGYMSCKDGKASFTCTCKPGWQGEKCEFDINECKDPSNINGGCSQICDNTPGSYHCSCKNGFVMLSNKKDCKDVDECSLKPSICGTAVCKNIPGDFECECPEGYRYNLKSKSCEDIDECSENMCAQLCVNYPGGYTCYCDGKKGFKLAQDQKSCEVVSVCLPLNLDTKYELLYLAEQFAGVVLYLKFRLPEISRFSAEFDFRTYDSEGVILYAESIDHSAWLLIALRGGKIEVQLKNEHTSKITTGGDVINNGLWNMVSVEELEHSISIKIAKEAVMDINKPGPLFKPENGLLETKVYFAGFPRKVESELIKPINPRLDGCIRSWNLMKQGASGIKEIIQEKQNKHCLVTVEKGSYYPGSGIAQFHIDYNNVSSAEGWHVNVTLNIRPSTGTGVMLALVSGNNTVPFAVSLVDSTSEKSQDILLSVENTVIYRIQALSLCSDQQSHLEFRVNRNNLELSTPLKIETISHEDLQRQLAVLDKAMKAKVATYLGGLPDVPFSATPVNAFYNGCMEVNINGVQLDLDEAISKHNDIRAHSCPSVWKKTKNS

SEQ ID NO: 872609 - protein, 57 aa, Homo sapiens [sequence omitted]

SEQ ID NO: 872610 - protein, 96 aa, Homo sapiens
KKGQLPRCTSGPHARGPLQAADTALVDMTHLCCRKRTLSPPPPHGGQMPQWGWSRAAQSHALTQIKRNTQSLKRKGVPTPGDKPALAVRPCLHLSV

SEQ ID NO: 872611 - protein, 129 aa, Homo sapiens
MSRRGGEGRGTERAEGEAGARGERADRRGGGRGTGSEQRDSLRRKRWTSEQSGARRGERRDAERGGGVAGRERRDRRARTHNSGRRVSRGTGSEHGDKDGAEDRARASEEERRTRRYGEHTDTSTPNST

SEQ ID NO: 872612 - protein, 134 aa, Homo sapiens
NTCSSVDLKLHDPQTRITSAPLQVSSCSILKREHQLLPESSAARPSNYNISSSPGLQLQDTHTRKIPAPPGFYSCTAIKLKKHQLLSGSPAAGPSNQNIRFSRVLQLPNPQTKETPAPPRVYSCMTLKLKNTSS

SEQ ID NO: 872613 - protein, 732 aa, Homo sapiens
VERGLVPALSRRRRRRLLSFSLRARPGPAAPCRTTAGPGGGSAGGPSQPPGGGGPGIRKDAFADAVQRARQIAAKIGGDAATTVNNSTPDFGFGGQKRQLEDGDQPESKKLASQGDSISSQLGPIHPPPRTSMTEEYRVPDGMVGLIIGRGGEQINKIQQDSGCKVQISPDSGGLPERSVSLTGAQKKAKMMLDDIVSRGRGGPPGQFHDNANGGQNGTVQEIMIPAGKAGLVIGKGGETIKQLQERAGVKMILIQDGSQNTNVDKPLRIIGDPYKVQQACEMVMDILRERDQGGFGDRNEYGSRIGGGIDVPVPRHSVGVVIGRSGEMIKKIQNDAGVRIQFKQDDGTGPEKIAHIMGPPDRCEHAARIINDLLQSLRSGPPGPPGGPGMPPGGRGRGRGQGNWGPPGGEMTFSIPTHKCGLVIGRGGENVKAINQQTGAFVEISRQLPPNGDPNFKLFIIRGSPQQIDHAKQLIEEKIEGPLCPVGPGPGGPGPAGPMGPFNPGPFNQGPPGAPPHAGGPPPHQYPPQGWGNTYPQWQPPAPHDPSKAAAAAADPNAAWAAYYSHYYQQPPGPVPGPAPAPAAPPAQGEPPQPPPTGQSDYTKAWEEYYKKIGQQPQQPGAPPQQDYTKAWEEYYKKQAQVATGGGPGAPPGSQPDYSAAWAEYYRQQAAYYGQTPGPGGPQPPPTQQGQQQASGNCHPPPPPFSFQPPATVHPALVGSAGNPFPCGVCP

SEQ ID NO: 872614 - protein, 757 aa, Homo sapiens
VERGLVPALSRRRRRRLLSFSLRARPGPAAPCRTTAGPGGGSAGGPSQPPGGGGPGIRKDAFADAVQRARQIAAKIGGDAATTVNNSTPDFGFGGQKRQLEDGDQPESKKLASQGDSISSQLGPIHPPPRTSMTEEYRVPDGMVGLIIGRGGEQINKIQQDSGCKVQISPDSGGLPERSVSLTGAQKKAKMMLDDIVSRGRGGPPGQFHDNANGGQNGTVQEIMIPAGKAGLVIGKGGETIKQLQERAGVKMILIQDGSQNTNVDKPLRIIGDPYKVQQACEMVMDILRERDQGGFGDRNEYGSRIGGGIDVPVPRHSVGVVIGRSGEMIKKIQNDAGVRIQFKQDDGTGPEKIAHIMGPPDRCEHAARIINDLLQSLRSGPPGPPGGPGMPPGGRGRGRGQGNWGPPGGEMTFSIPTHKCGLVIGRGGENVKAINQQTGAFVEISRQLPPNGDPNFKLFIIRGSPQQIDHAKQLIEEKIEGPLCPVGPGPGGPGPAGPMGPFNPGPFNQGPPGAPPHAGGPPPHQYPPQGWGNTYPQWQPPAPHDPSKAAAAAADPNAAWAAYYSHYYQQPPGPVPGPAPAPAAPPAQGEPPQPPPTGQSDYTKAWEEYYKKIGESAGGGGAPALPGEWFLTCLGARTGQQPQQPGAPPQQDYTKAWEEYYKKQAQVATGGGPGAPPGSQPDYSAAWAEYYRQQAAYYGQTPGPGGPQPPPTQQGQQQASGNCHPPPPPFSFQPPATVHPALVGSAGNPFPCGVCP

SEQ ID NO: 872615 - protein, 303 aa, Homo sapiens
CGARPCSRVEPGPGGGSAGGPSQPPGGGGPGIRKDAFADAVQRARQIAAKIGGDAATTVNNSTPDFGFGGQKRQLEDGDQPESKKLASQGDSISSQLGPIHPPPRTSMTEEYRVPDGMVGLIIGRGGEQINKIQQDSGCKVQISPDSGGLPERSVSLTGAPEPPQPPPTGQSDYTKAWEEYYKKIGQQPQQPGAPPQQDYTKAWEEYYKKQAQVATGGGPGAPPGSQPDYSAAWAEYYRQQAAYYGQTPGPGGPQPPPTQQGQQQASGNCHPPPPPFSFQPPATVHPALVGSAGNPFPCGVCP

SEQ ID NO: 872616 - protein, 696 aa, Homo sapiens
VERGLVPALSRRRRRRLLSFSLRARPGPAAPCRTTAGPGGGSAGGPSQPPGGGGPGIRKDAFADAVQRARQIAAKIGGDAATTVNNSTPDFGFGGQKRQLEDGDQPESKKLASQGDSISSQLGPIHPPPRTSMTEEYRVPDGMVGLIIGRGGEQINKIQQDSGCKVQISPDSGGLPERSVSLTGAQKKAKMMLDDIVSRGRGGPPGQFHDNANGGQNGTVQEIMIPAGKAGLVIGKGGETIKQLQERAGVKMILIQDGSQNTNVDKPLRIIGDPYKVQQACEMVMDILRERDQGGFGDRNEYGSRIGGGIDVPVPRHSVGVVIGRSGEMIKKIQNDAGVRIQFKQDDGTGPEKIAHIMGPPDRCEHAARIINDLLQSLRSGPPGPPGGPGMPPGGRGRGRGQGNWGPPGGEMTFSIPTHKCGLVIGRGGENVKAINQQTGAFVEISRQLPPNGDPNFKLFIIRGSPQQIDHAKQLIEEKIEGPLCPVGPGPGGPGPAGPMGPFNPGPFNQGPPGAPPHAGGPPPHQYPPQGWGNTYPQWQPPAPHDPSKAAAAAADPNAAWAAYYSHYYQQPPGPVPGPAPAPAAPPAQGEPPQPPPTGQSDYTKAWEEYYKKIGQQPQQPGAPPQQDYTKAWEEYYKKQAQVATGGGPGAPPGSQPDYSAAWAEYYRQQAAYYGQTPGPGGPQPPPTQQGQQQPS

SEQ ID NO: 872617 - protein, 732 aa, Homo sapiens; identical to SEQ ID NO: 872613

SEQ ID NO: 872618 - protein, 687 aa, Homo sapiens
VERGLVPALSRRRRRRLLSFSLRARPGPAAPCRTTAGPGGGSAGGPSQPPGGGGPGIRKDAFADAVQRARQIAAKIGGDAATTVNNSTPDFGFGGQKRQLEDGDQPESKKLASQGDSISSQLGPIHPPPRTSMTEEYRVPDGMVGLIIGRGGEQINKIQQDSGCKVQISPDSGGLPERSVSLTGAQKKAKMMLDDIVSRGRGGPPGQFHDNANGGQNGTVQEIMIPAGKAGLVIGKGGETIKQLQERAGVKMILIQDGSQNTNVDKPLRIIGDPYKVQQACEMVMDILRERDQGGFGDRNEYGSRIGGGIDVPVPRHSVGVVIGRSGEMIKKIQNDAGVRIQFKQDDGTGPEKIAHIMGPPDRCEHAARIINDLLQSLRSGPPGPPGGPGMPPGGRGRGRGQGNWGPPGGEMTFSIPTHKCGLVIGRGGENVKAINQQTGAFVEISRQLPPNGDPNFKLFIIRGSPQQIDHAKQLIEEKIEGPLCPVGPGPGGPGPAGPMGPFNPGPFNQGPPGAPPHAGGPPPHQYPPQGWGNTYPQWQPPAPHDPSKAAAAAADPNAAWAAYYSHYYQQPPGPVPGPAPAPAAPPAQGEASSPSSPERPHSRTTRRLGRSTTRSKRKWPPEGVQELPQAPSQTTVPPGRNITDSRPLTTDWSVVFSSVQEEIETENKMRTTKKIVWQFLLFIARF

SEQ ID NO: 872619 - protein, 696 aa, Homo sapiens
VERGLVPALSRRRRRRLLSFSLRARPGPAAPCRTTAGPGGGSAGGPSQPPGGGGPGIRKDAFADAVQRARQIAAKIGGDAATTVNNSTPDFGFGGQKRQLEDGDQPESKKLASQGDSISSQLGPIHPPPRTSMTEEYRVPDGMVGLIIGRGGEQINKIQQDSGCKVQISPDSGGLPERSVSLTGAQKKAKMMLDDIVSRGRGGPPGQFHDNANGGQNGTVQEIMIPAGKAGLVIGKGGETIKQLQERAGVKMILIQDGSQNTNVDKPLRIIGDPYKVQQACEMVMDILRERDQGGFGDRNEYGSRIGGGIDVPVPRHSVGVVIGRSGEMIKKIQNDAGVRIQFKQDDGTGPEKIAHIMGPPDRCEHAARIINDLLQSLRSGPPGPPGGPGMPPGGRGRGRGQGNWGPPGGEMTFSIPTHKCGLVIGRGGENVKAINQQTGAFVEISRQLPPNGDPNFKLFIIRGSPQQIDHAKQLIEEKIEGPLCPVGPGPGGPGPAGPMGPFNPGPFNQGPPGAPPHAGGPPPHQYPPQGWGNTYPQWQPPAPHDPSKAAAAAADPNAAWAAYYSHYYQQPPGPVPGPAPAPAAPPAQGEPPQPPPTGQSDYTKAWEEYYKKIGQQPQQPGAPPQQDYTKAWEEYYKKQAQVATGGGPGAPPGSQPDYSAAWAEYYRQQAAYYGQTPGPGGPQPPPTQQGQQQAQ

SEQ ID NO: 872620 - protein, 694 aa, Homo sapiens
VERGLVPALSRRRRRRLLSFSLRARPGPAAPCRTTAGPGGGSAGGPSQPPGGGGPGIRKDAFADAVQRARQIAAKIGGDAATTVNNSTPDFGFGGQKRQLEDGDQPESKKLASQGDSISSQLGPIHPPPRTSMTEEYRVPDGMVGLIIGRGGEQINKIQQDSGCKVQISPDSGGLPERSVSLTGAQKKAKMMLDDIVSRGRGGPPGQFHDNANGGQNGTVQEIMIPAGKAGLVIGKGGETIKQLQERAGVKMILIQDGSQNTNVDKPLRIIGDPYKVQQACEMVMDILRERDQGGFGDRNEYGSRIGGGIDVPVPRHSVGVVIGRSGEMIKKIQNDAGVRIQFKQDDGTGPEKIAHIMGPPDRCEHAARIINDLLQSLRSGPPGPPGGPGMPPGGRGRGRGQGNWGPPGGEMTFSIPTHKCGLVIGRGGENVKAINQQTGAFVEISRQLPPNGDPNFKLFIIRGSPQQIDHAKQLIEEKIEGPLCPVGPGPGGPGPAGPMGPFNPGPFNQGPPGAPPHAGGPPPHQYPPQGWGNTYPQWQPPAPHDPSKAAAAAADPNAAWAAYYSHYYQQPPGPVPGPAPAPAAPPAQGEASSPSSPERPHSRTTRRLGRSTTRSKRKWPPEGVQELPQAPSQTTVPPGRNITDSRPLTTDRPQVLAAPSRRPRSRDSSRQVGIATLLLLLSPSNPRPPSILP

SEQ ID NO: 872621 - protein, 162 aa, Homo sapiens
VERGLVPALSRRRRRRLLSFSPPQPPPTGQSDYTKAWEEYYKKIGQQPQQPGAPPQQDYTKAWEEYYKKQAQVATGGGPGAPPGSQPDYSAAWAEYYRQQAAYYGQTPGPGGPQPPPTQQGQQQASGNCHPPPPPFSFQPPATVHPALVGSAGNPFPCGVCP

SEQ ID NO: 872622 - protein, 683 aa, Homo sapiens
VERGLVPALSRRRRRRLLSFSLRARPGPAAPCRTTAGPGGGSAGGPSQPPGGGGPGIRKDAFADAVQRARQIAAKIGGDAATTVNNSTPDFGFGGQKRQLEDGDQPESKKLASQGDSISSQLGPIHPPPRTSMTEEYRVPDGMVGLIIGRGGEQINKIQQDSGCKVQISPDSGGLPERSVSLTGAQKKAKMMLDDIVSRGRGGPPGQFHDNANGGQNGTVQEIMIPAGKAGLVIGKGGETIKQLQERAGVKMILIQDGSQNTNVDKPLRIIGDPYKVQQACEMVMDILRERDQGGFGDRNEYGSRIGGGIDVPVPRHSVGVVIGRSGEMIKKIQNDAGVRIQFKQDDGTGPEKIAHIMGPPDRCEHAARIINDLLQSLRSGPPGPPGGPGMPPGGRGRGRGQGNWGPPGGEMTFSIPTHKCGLVIGRGGENVKAINQQTGAFVEISRQLPPNGDPNFKLFIIRGSPQQIDHAKQLIEEKIEGPLCPVGPGPGGPGPAGPMGPFNPGPFNQGPPGAPPHAGGPPPHQYPPQGWGNTYPQWQPPAPHDPSKAAAAAADPNAAWAAYYSHYYQQPPGPVPGPAPAPAAPPAQGEASSPSSPERPHSRTTRRLGRSTTRSKRKWPPEGVQELPQAPSQTTVPPGRNITDSRPLTTDRPQVLAAPSRRPRSRDSSRLNESNECELLHL

SEQ ID NO: 872623 - protein, 674 aa, Homo sapiens
VERGLVPALSRRRRRRLLSFSLRARPGPAAPCRTTAGPGGGSAGGPSQPPGGGGPGIRKDAFADAVQRARQIAAKIGGDAATTVNNSTPDFGFGGQKRQLEDGDQPESKKLASQGDSISSQLGPIHPPPRTSMTEEYRVPDGMVGLIIGRGGEQINKIQQDSGCKVQISPDSGGLPERSVSLTGAQKKAKMMLDDIVSRGRGGPPGQFHDNANGGQNGTVQEIMIPAGKAGLVIGKGGETIKQLQERAGVKMILIQDGSQNTNVDKPLRIIGDPYKVQQACEMVMDILRERDQGGFGDRNEYGSRIGGGIDVPVPRHSVGVVIGRSGEMIKKIQNDAGVRIQFKQDDGTGPEKIAHIMGPPDRCEHAARIINDLLQSLRSGPPGPPGGPGMPPGGRGRGRGQGNWGPPGGEMTFSIPTHKCGLVIGRGGENVKAINQQTGAFVEISRQLPPNGDPNFKLFIIRGSPQQIDHAKQLIEEKIEGPLCPVGPGPGGPGPAGPMGPFNPGPFNQGPPGAPPHAGGPPPHQYPPQGWGNTYPQWQPPAPHDPSKAAAAAADPNAAWAAYYSHYYQQPPGPVPGPAPAPAAPPAQGEPPQPPPTGQSDYTKAWEEYYKKIGQQPQQPGAPPQQDYTKAWEEYYKKQAPSSLPPALAQLPRPRPSPLPGLVCCLFICSRGD

SEQ ID NO: 872624 - protein, 716 aa, Homo sapiens
VERGLVPALSRRRRRRLLSFSLRARPGPAAPCRTTAGPGGGSAGGPSQPPGGGGPGIRKDAFADAVQRARQIAAKIGGDAATTVNNSTPDFGFGGQKRQLEDGDQPESKKLASQGDSISSQLGPIHPPPRTSMTEEYRVPDGMVGLIIGRGGEQINKIQQDSGCKVQISPDSGGLPERSVSLTGAQKKAKMMLDDIVSRGRGGPPGQFHDNANGGQNGTVQEIMIPAGKAGLVIGKGGETIKQLQERAGVKMILIQDGSQNTNVDKPLRIIGDPYKVQQACEMVMDILRERDQGGFGDRNEYGSRIGGGIDVPVPRHSVGVVIGRSGEMIKKIQNDAGVRIQFKQDDGTGPEKIAHIMGPPDRCEHAARIINDLLQSLRSGPPGPPGGPGMPPGGRGRGRGQGNWGPPGGEMTFSIPTHKCGLVIGRGECGPLHPIPCPLFPGPSLQATFTFCVSAGGENVKAINQQTGAFVEISRQLPPNGDPNFKLFIIRGSPQQIDHAKQLIEEKIEGPLCPVGPGPGGPGPAGPMGPFNPGPFNQGPPGAPPHAGGPPPHQYPPQGWGNTYPQWQPPAPHDPSKAAAAAADPNAAWAAYYSHYYQQPPGPVPGPAPAPAAPPAQGEASSPSSPERPHSRTTRRLGRSTTRSKRKWPPEGVQELPQAPSQTTVPPGRNITDSRPLTTDWSVVFSSVQEEIETENKMRTTKKIVWQFLLFIARF

SEQ ID NO: 872625 - protein, 118 aa, Homo sapiens
MSLYFRREDFKIRASNGQFELFTGNTHTASWKGIKKPHVVDLGLYLQPPVPHVCSLQRLASRWMQVRDPLGLGLGASGRADVGSAMSCRAGSSPGASSAGQGCRAPPGRERARLGPAA

SEQ ID NO: 872626 - protein, 310 aa, Homo sapiens
FTPLRLQNSELLFLCGQLGTSIMKWMVVVLVCLQLLEAAVVKVPLKKFKSIRETMKEKGLLGEFLRTHKYDPAWKYRFGDLSVTYEPMAYMDAAYFGEISIGTPPQNFLVLFDTGSSNLWVPSVYCQSQACTSHSRFNPSESSTYSTNGQTFSLQYGSGSLTGFFGYDTLTVQSIQVPNQEFGLSENEPGTNFVYAQFDGIMGLAYPALSVDEATTAMQGMVQEGALTSPVFSVYLSNQQGSSGGAVVFGGVDSSLYTGQIYWAPVTRNSTGRLALKSSSSAARPPAGVLRVARPSWTQAPLCSLCPSST

SEQ ID NO: 872627 - protein, 310 aa, Homo sapiens; identical to SEQ ID NO: 872626

SEQ ID NO: 872628 - protein, 188 aa, Homo sapiens
MEEGGRGNCTSHSRFNPSESSTYSTNGQTFSLQYGSGSLTGFFGYDTLTVQSIQVPNQEFGLSENEPGTNFVYAQFDGIMGLAYPALSVDEATTAMQGMVQEGALTSPVFSVYLSNQQGSSGGAVVFGGVDSSLYTGQIYWAPVTRNSTGRLALKSSSSAARPPAGVLRVARPSWTQAPLCSLCPSST

SEQ ID NO: 872629 - protein, 70 aa, Homo sapiens
  misc_feature (4)..(4): Xaa can be any naturally occurring amino acid
MIPXLSSMWSPSAPSSYILSNNGYCTVGVEPTYLSSQNGQPLWILGDVFLRSYYSVYDLGNNRVGFATAA

SEQ ID NO: 872630 - protein, 181 aa, Homo sapiens
FTPLRLQNSELLFLCGQLGTSIMKWMVVVLVCLQLLEAAVVKVPLKKFKSIRETMKEKGLLGEFLRTHKYDPAWKYRFGDLSVTYEPMAYMDAAYFGEISIGTPPQNFLVLFDTGSPLFLLTLHPPRALYLSFHSGFSLLFLDSGLSLIINSSSLKKEKKRHIKDNRTNIQTKNNKKRRGR

SEQ ID NO: 872631 - protein, 156 aa, Homo sapiens
EFLGDRRAVDLPGVQAAIHTPKDNRSPAGALLVAEVDAEDGAGEERTSLLTVPQQYMSALLQATGAQEDEYGQFLVNCNSIQNLPSLTFIINGVEFPLPPSSYILSNNGYCTVGVEPTYLSSQNGQPLWILGDVFLRSYYSVYDLGNNRVGFATAA

SEQ ID NO: 872632 - protein, 195 aa, Homo sapiens
FTPLRLQNSELLFLCGQLGTSIMKWMVVVLVCLQLLEAAVVKVPLKKFKSIRETMKEKGLLGEFLRTHKYDPAWKYRFGDLSVTYEPMAYMDAAYFGEISIGTPPQNFLVLFDTGSSNLWVPSVYCQSQACTSHSRFNPSESSTYSTNGQTFSLQYGSGSLTGFFGYDTLTVQSIQVPNQEFGLSENEPGTTSAW

SEQ ID NO: 872633 - protein, 102 aa, Homo sapiens
KAPFTDGIVGPEKCVGFQFQSNFTCSHPPHSQRAGWVGCRFFFLLENGPSPYASPPPWLLTPDFSLPLLWPLLFLNKAREDLGWLSPWVSVKTQRETLLKKP

SEQ ID NO: 872634 - protein, 84 aa, Homo sapiens
RQQDKEATLSASAGPLSSPLMGLSVWVAPRGQLQPQLQAPRTAGAGTLEVRVLRERGDPVLLAGVQRHHSKTSVAKYTPCSALP

SEQ ID NO: 872635 - protein, 802 aa, Homo sapiens
MAARGRRAWLSVLLGLVLGFVLASRLVLPRASELKRAGPRRRASPEGCRSGQAAASQAGGARGDARGAQLWPPGSDPDGGPRDRNFLFVGVMTAQKYLQTRAVAAYRTWSKTIPGKVQFFSSEGSDTSVPIPVVPLRGVDDSYPPQKKSFMMLKYMHDHYLDKYEWFMRADDDVYIKGDRLENFLRSLNSSEPLFLGQTGLGTTEEMGKLALEPGENFCMGGPGVIMSREVLRRMVPHIGKCLREMYTTHEDVEVGRCVRRFAGVQCVWSYEMQQLFYENYEQNKKGYIRDLHNSKIHQAITLHPNKNPPYQYRLHSYMLSRKISELRHRTIQLHREIVLMSKYSNTEIHKEDLQLGIPPSFMRFQPRQREEILEWEFLTGKYLYSAVDGQPPRRGMDSAQREALDDIVMQVMEMINANAKTRGRIIDFKEIQYGYRRVNPMYGAEYILDLLLLYKKHKGKKMTVPVRRHAYLQQTFSKIQFVEHEELDAQELAKRINQESGSLSFLSNSLKKLVPFQLPGSKSEHKEPKDKKINILIPLSGRFDMFVRFMGNFEKTCLIPNQNVKLVVLLFNSDSNPDKAKQVELMRDYRIKYPKADMQILPVSGEFSRALALEVGSSQFNNESLLFFCDVDLVFTTEFLQRCRANTVLGQQIYFPIIFSQYDPKIVYSGKVPSDNHFAFTQKTGFWRNYGFGITCIYKGDLVRVGGFDVSIQGWGLEDVDLFNKVVQAGLKTFRSQEVGVVHVHHPVFCDPNLDPKQYKMCLGSKASTYGSTQQLAEMWLEKNDPSYSKSSNNNGSVRTA

SEQ ID NO: 872636 - protein, 802 aa, Homo sapiens; identical to SEQ ID NO: 872635

SEQ ID NO: 872637 - protein, 718 aa, Homo sapiens
SGALRVLSWRMNLDCCSITLYFLTWSKTIPGKVQFFSSEGSDTSVPIPVVPLRGVDDSYPPQKKSFMMLKYMHDHYLDKYEWFMRADDDVYIKGDRLENFLRSLNSSEPLFLGQTGLGTTEEMGKLALEPGENFCMGGPGVIMSREVLRRMVPHIGKCLREMYTTHEDVEVGRCVRRFAGVQCVWSYEMQQLFYENYEQNKKGYIRDLHNSKIHQAITLHPNKNPPYQYRLHSYMLSRKISELRHRTIQLHREIVLMSKYSNTEIHKEDLQLGIPPSFMRFQPRQREEILEWEFLTGKYLYSAVDGQPPRRGMDSAQREALDDIVMQVMEMINANAKTRGRIIDFKEIQYGYRRVNPMYGAEYILDLLLLYKKHKGKKMTVPVRRHAYLQQTFSKIQFVEHEELDAQELAKRINQESGSLSFLSNSLKKLVPFQLPGSKSEHKEPKDKKINILIPLSGRFDMFVRFMGNFEKTCLIPNQNVKLVVLLFNSDSNPDKAKQVELMRDYRIKYPKADMQILPVSGEFSRALALEVGSSQFNNESLLFFCDVDLVFTTEFLQRCRANTVLGQQIYFPIIFSQYDPKIVYSGKVPSDNHFAFTQKTGFWRNYGFGITCIYKGDLVRVGGFDVSIQGWGLEDVDLFNKVVQAGLKTFRSQEVGVVHVHHPVFCDPNLDPKQYKMCLGSKASTYGSTQQLAEMWLEKNDPSYSKSSNNNGSVRTA

SEQ ID NO: 872638 - protein, 802 aa, Homo sapiens; identical to SEQ ID NO: 872635

SEQ ID NO: 872639 - protein, 802 aa, Homo sapiens; identical to SEQ ID NO: 872635

SEQ ID NO: 872640 - protein, 802 aa, Homo sapiens; identical to SEQ ID NO: 872635

SEQ ID NO: 872641 - protein, 802 aa, Homo sapiens; identical to SEQ ID NO: 872635

SEQ ID NO: 872642 - protein, 377 aa, Homo sapiens
SGALRVLSWRMNLDCCSITLYFLTWSKTIPGKVQFFSSEGSDTSVPIPVVPLRGVDDSYPPQKKSFMMLKYMHDHYLDKYEWFMRADDDVYIKGDRLENFLRSLNSSEPLFLGQTGLGTTEEMGKLALEPGENFCMGGPGVIMSREVLRRMVPHIGKCLREMYTTHEDVEVGRCVRRFAGVQCVWSYEMQQLFYENYEQNKKGYIRDLHNSKIHQAITLHPNKNPPYQYRLHSYMLSRKISELRHRTIQLHREIVLMSKYSNTEIHKEDLQLGIPPSFMRFQPRQREEILEWEFLTGKYLYSAVDGQPPRRGMDSAQREALDDIVMQVMEMINANAKTRGRIIDFKEIQQQLAEMWLEKNDPSYSKSSNNNGSVRTA

SEQ ID NO: 872643 - protein, 84 aa, Homo sapiens
GLGTTEEMGKLALEPGENFCMGGPGVIMSREVLRRMVPHIGKCLREMYTTHEDVEVGRCVRRFAGVQCVWSYEVRTEFFTMGKT

SEQ ID NO: 872644 - protein, 139 aa, Homo sapiens
PWLAMCTSFHAIPTVAVLPGLYKKNQFSHFMILQLNGMDMEENNLASRQAQSQTYTEAGRRCTPLRYVSHPARHMQPEPGHRLGVPCVLSSYLFSLVPTFLPEFLIHGLLPGSLPLGARGSHRAQRRGPFAPGTIRGMI

SEQ ID NO: 872645 - protein, 331 aa, Homo sapiens
MLLILLSVALLALSSAQNLNEDVSQEESPSLIAGNPQGPSPQGGNKPQGPPPPPGKPQGPPPQGGNKPQGPPPPGKPQGPPPQGDKSRSPRSPPGKPQGPPPQGGNQPQGPPPPPGKPQGPPPQGGNKPQGPPPPGKPQGPPPQGDKSQSPRSPPGKPQGPPPQGGNQPQGPPPPPGKPQGPPPQGGNKPQGPPPPGKPQGPPPQGDKSRSPQSPPGKPQGPPPQGGNQPQGPPPPPGKPQGPPPQGGNKPQGPPPPGKPQGPPAQGGSKSQSARAPPGKPQGPPQQEGNNPQGPPPPAGGNPQQPQAPPAGQPQGPPRPPQGGRPSRPPQ

SEQ ID NO: 872646 - protein, 198 aa, Homo sapiens
MLLILLSVALLALSSAQNLNEDVSQEESPSLIAGNPQGPSPQGGNKPQGPPPPPGKPQGPPPQGGNKPQGPPPPGKPQGPPPQGDKSRSPRSPPGKPQGPPPQGGKPQGPPPQGGNKPQGPPPPGKPQGPPAQGGSKSQSARAPPGKPQGPPQQEGNNPQGPPPPAGGNPQQPQAPPAGQPQGPPRPPQGGRPSRPPQ

SEQ ID NO: 872647 - protein, 178 aa, Homo sapiens [sequence omitted]

SEQ ID NO: 872648 - protein, 226 aa, Homo sapiens
MADPQAGSAAGDWEIDVESLELEEDVCGAPRSTPPGPSPPPADGDCEDDEDDDGVDEDAEEEGDGEEAGASPGMPGQPEQRGGPQPRPPLAPQASPAGTGPRERCTPAGGGAEPRKLSRTPKCARCRNHGVVSCLKGHKRFCRWRDCQCANCLLVVERQRVMAAQVALRRQQATEDKKGLSGKQNNFERKAVYQRQVRAPSLLAKSILEVLLGLFYSYYVYIMNHL

SEQ ID NO: 872649 - protein, 587 aa, Homo sapiens
MADPQAGSAAGDWEIDVESLELEEDVCGAPRSTPPGPSPPPADGDCEDDEDDDGVDEDAEEEGDGEEAGASPGMPGQPEQRGGPQPRPPLAPQASPAGTGPRERCTPAGGGAEPRKLSRTPKCARCRNHGVVSCLKGHKRFCRWRDCQCANCLLVVERQRVMAAQVALRRQQATEDKKGLSGKQNNFERKAVYQRQVRAPSLLAKSILEVLLGLFYSYYVYIMNHLQKIKVTSALGYRPIPAETYVGGTFPLPPPVSDRMRKRRAFADKELENIMLEREYKEREMLETSQAAALFLPNRMVPGPDYNSYKSAYSPSPVEPPSKDFCNFLPTCLDLTMQYSGSGNMELISSNVSVATTYRQYPLSSRFLVWPKCGPISDTLLYQQCLLNATTSVQALKPGASWDLKGARVQDGLSAEQDMMPSKLEGSLVLPHTPEIQTTRSDLQGHQAVPERSAFSPPRRNFSPIVDTDSLAAQGHVLTKISKENTRHPLPLRHNPFHSLFQQTLTDKSGPELKTPFVKEAFEETPKKHRECLVKDNQKYTFTIDRCAKDLFVAKQVGTKLSVNEPLSFSVESILKRPSSAITRVSQ

SEQ ID NO: 872650 - protein, 226 aa, Homo sapiens; identical to SEQ ID NO: 872648

SEQ ID NO: 872651 - protein, 226 aa, Homo sapiens; identical to SEQ ID NO: 872648

SEQ ID NO: 872652 - protein, 561 aa, Homo sapiens
MADPQAGSAAGDWEIDVESLELEEDVCGAPRSTPPGPSPPPADGDCEDDEDDDGVDEDAEEEGDGEEAGASPGMPGQPEQRGGPQPRPPLAPQASPAGTGPRERCTPAGGGAEPRKLSRTPKCARCRNHGVVSCLKGHKRFCRWRDCQCANCLLVVERQRVMAAQVALRRQQATEDKKGLSGKQNNFERKAVYQRQVRAPSLLAKSILEGYRPIPAETYVGGTFPLPPPVSDRMRKRRAFADKELENIMLEREYKEREMLETSQAAALFLPNRMVPGPDYNSYKSAYSPSPVEPPSKDFCNFLPTCLDLTMQYSGSGNMELISSNVSVATTYRQYPLSSRFLVWPKCGPISDTLLYQQCLLNATTSVQALKPGASWDLKGARVQDGLSAEQDMMPSKLEGSLVLPHTPEIQTTRSDLQGHQAVPERSAFSPPRRNFSPIVDTDSLAAQGHVLTKISKENTRHPLPLRHNPFHSLFQQTLTDKSGPELKTPFVKEAFEETPKKHRECLVKDNQKYTFTIDRCAKDLFVAKQVGTKLSVNEPLSFSVESILKRPSSAITRVSQ

SEQ ID NO: 872653 - protein, 119 aa, Homo sapiens
MHEVHPAPTPVVSLHPPRLPPAPALPAMPPVWASGPLTLYLCWRTYRTHVFSSHGTETPFALPIRPCLQQVYTAGFLSEQSIPICTRHRTVACSLQTTYSFSLQAFAPPAQRDGAAMSI

SEQ ID NO: 872654 - protein, 103 aa, Homo sapiens
AGGAGPQLSEPRRRTRRSELSGGSAAAGAGAQEPTGPDQDGAVAAPRRTHALSGPSLGPEPPVPPAAPIRAGMMCLECASAAAGGAEEEEADAERRRRRQGGA

SEQ ID NO: 872655 - protein, 111 aa, Homo sapiens
VTRTWRMVNVGILLSNGGVSQRDGWGAGKEMDWKIIFPLESSCPSASLLSDHPQPNPSQHSDAPSLLSFSASPPCRSSTLLFFCSWSLGFIWTHDRGVVSQSDLGEGNIWA

SEQ ID NO: 872656 - protein, 146 aa, Homo sapiens
ARATLSSFLHHHPGAQRSKLLSIFSPSPRTLTLYRMGPSSCLLLILIPLLQLINPGSTQCSLDSVMDKKIKDVLNSLEYSPSPISKKLSCASVKSQGRPSSCPAGMAVTGCACGYGCGSWDVQLETTCHCQCSVVDWTTARCCHLT

SEQ ID NO: 872657 - protein, 146 aa, Homo sapiens; identical to SEQ ID NO: 872656

SEQ ID NO: 872658 - protein, 620 aa, Homo sapiens
MPFTLHLRSRLPSAIRSLILQKKPNIRNTSSMAGELRPASLVVLPRSLAPAFERFCQVNTGPLPLLGQSEPEKWMLPPQGAISETRMGHPQFWKYEFGACTGSLASLEQYSEQLKDMVAFFLGCSFSLEEALEKAGLPRRDPAGHSQAGAQTTVPCVTHAGFCCPLVVTMRPIPKDKLEGLVRACCSLGGEQGQPVHMGDPELLGIKELSKPAYGDAMVCPPGEVPVFWPSPLTSLGAVSSCETPLAFASIPGCTVMTDLKDAKAPPGCLTPERIPEVHHISQDPLHYSIASVSASQKIRELESMIGIDPGNRGIGHLLCKDELLKASLSLSHARSVLITTGFPTHFNHEPPEETDGPPGAVALVAFLQALEKEVAIIVDQRAWNLHQKIVEDAVEQGVLKTQIPILTYQGGSVEAAQAFLCKNGDPQTPRFDHLVAIERAGRAADGNYYNARKMNIKHLVDPIDDLFLAAKKIPGISSTGVGDGGNELGMGKVKEAVRRHIRHGDVIACDVEADFAVIAGVSNWGGYALACALYILYSCAVHSQYLRKAVGPSRAPGDQAWTQALPSVIKEEKMLGILVQHKVRSGVSGIVGMEVDGLPFHNTHAEMIQKLVDVTTAQV

SEQ ID NO: 872659 - protein, 159 aa, Homo sapiens
MPFTLHLRSRLPSAIRSLILQKKPNIRNTSSMAGELRPASLVVLPRSLAPAFERFCQVNTGPLPLLGQSEPEKWMLPPQGAISETSLRDLHSAWHRTSLMTVAQERAALPTVLTPSPITWRLSWLRSLRSWRKSSPGEIPLALPSVHSIAQARNPPVQD

SEQ ID NO: 872660 - protein, 620 aa, Homo sapiens
MPFTLHLRSRLPSAIRSLILQKKPNIRNTSSMAGELRPASLVVLPRSLAPAFERFCQVNTGPLPLLGQSEPEKWMLPPQGAISETRMGHPQFWKYEFGACTGSLASLEQYSEQLKDMVAFFLGCSFSLEEALEKAGLPRRDPAGHSQAGAKTTVPCVTHAGFCCPLVVTMRPIPKDKLEGLVRACCSLGGEQGQPVHMGDPELLGIKELSKPAYGDAMVCPPGEVPVFWPSPLTSLGAVSSCETPLAFASIPGCTVMTDLKDAKAPPGCLTPERIPEVHHISQDPLHYSIASVSASQKIRELESMIGIDPGNRGIGHLLCKDELLKASLSLSHARSVLITTGFPTHFNHEPPEETDGPPGAVALVAFLQALEKEVAIIVDQRAWNLHQKIVEDAVEQGVLKTQIPILTYQGGSVEAAQAFLCKNGDPQTPRFDHLVAIERAGRAADGNYYNARKMNIKHLVDPIDDLFLAAKKIPGISSTGVGDGGNELGMGKVKEAVRRHIRHGDVIACDVEADFAVIAGVSNWGGYALACALYILYSCAVHSQYLRKAVGPSRAPGDQAWTQALPSVIKEEKMLGILVQHKVRSGVSGIVGMEVDGLPFHNTHAEMIQKLVDVTTAQV

SEQ ID NO: 872661 - protein, 620 aa, Homo sapiens; identical to SEQ ID NO: 872658

SEQ ID NO: 872662 - protein, 608 aa, Homo sapiens
MPFTLHLRSRLPSAIRSLILQKKPNIRNTSSMAGELRPASLVVLPRSLAPAFERFCQVNTGPLPLLGQSEPEKWMLPPQGAISETRMGHPQFWKYEFGACTGSLASLEQYSEQLKDMVAFFLGCSFSLEEALEKAGLPRRDPAGHSQAGAQTTVPCVTHAGFCCPLVVTMRPIPKDKLEGLVRACCSLGELLGIKELSKPAYGDAMVCPPGEVPVFWPSPLTSLGAVSSCETPLAFASIPGCTVMTDLKDAKAPPGCLTPERIPEVHHISQDPLHYSIASVSASQKIRELESMIGIDPGNRGIGHLLCKDELLKASLSLSHARSVLITTGFPTHFNHEPPEETDGPPGAVALVAFLQALEKEVAIIVDQRAWNLHQKIVEDAVEQGVLKTQIPILTYQGGSVEAAQAFLCKNGDPQTPRFDHLVAIERAGRAADGNYYNARKMNIKHLVDPIDDLFLAAKKIPGISSTGVGDGGNELGMGKVKEAVRRHIRHGDVIACDVEADFAVIAGVSNWGGYALACALYILYSCAVHSQYLRKAVGPSRAPGDQAWTQALPSVIKEEKMLGILVQHKVRSGVSGIVGMEVDGLPFHNTHAEMIQKLVDVTTAQV

SEQ ID NO: 872663 - protein, 659 aa, Homo sapiens
MWYVKLCEAESAAFRGPHFLICSLSFPHPDSLLLIQVDTMPFTLHLRSRLPSAIRSLILQKKPNIRNTSSMAGELRPASLVVLPRSLAPAFERFCQVNTGPLPLLGQSEPEKWMLPPQGAISETRMGHPQFWKYEFGACTGSLASLEQYSEQLKDMVAFFLGCSFSLEEALEKAGLPRRDPAGHSQAGAQTTVPCVTHAGFCCPLVVTMRPIPKDKLEGLVRACCSLGGEQGQPVHMGDPELLGIKELSKPAYGDAMVCPPGEVPVFWPSPLTSLGAVSSCETPLAFASIPGCTVMTDLKDAKAPPGCLTPERIPEVHHISQDPLHYSIASVSASQKIRELESMIGIDPGNRGIGHLLCKDELLKASLSLSHARSVLITTGFPTHFNHEPPEETDGPPGAVALVAFLQALEKEVAIIVDQRAWNLHQKIVEDAVEQGVLKTQIPILTYQGGSVEAAQAFLCKNGDPQTPRFDHLVAIERAGRAADGNYYNARKMNIKHLVDPIDDLFLAAKKIPGISSTGVGDGGNELGMGKVKEAVRRHIRHGDVIACDVEADFAVIAGVSNWGGYALACALYILYSCAVHSQYLRKAVGPSRAPGDQAWTQALPSVIKEEKMLGILVQHKVRSGVSGIVGMEVDGLPFHNTHAEMIQKLVDVTTAQV

SEQ ID NO: 872664 - protein, 620 aa, Homo sapiens; identical to SEQ ID NO: 872658

SEQ ID NO: 872665 - protein, 620 aa, Homo sapiens; identical to SEQ ID NO: 872658

SEQ ID NO: 872666 - protein, 594 aa, Homo sapiens
MPFTLHLRSRLPSAIRSLILQKKPNIRNTSSMAGELRPASLVVLPRSLAPAFERFCQVNTGPLPLLGQSEPEKWMLPPQGAISETRMGHPQFWKYEFGACTGSLASLEQYSEQLKDMVAFFLGCSFSLEEALEKAGLPRRDPAGHSQAGAQTTVPCVTHAGFCCPLVVTMRPIPKDKLEGLVRACCSLGGEQGQPVHMGDPELLGIKELSKPAYGDAMVCPPGEVPVFWPSPLTSLGAVSSCETPLAFASIPGCTVMTDLKDAKAPPGCLTPERIPEVHHISQDPLHYSIASVSASQKIRELESMIGIDPVLITTGFPTHFNHEPPEETDGPPGAVALVAFLQALEKEVAIIVDQRAWNLHQKIVEDAVEQGVLKTQIPILTYQGGSVEAAQAFLCKNGDPQTPRFDHLVAIERAGRAADGNYYNARKMNIKHLVDPIDDLFLAAKKIPGISSTGVGDGGNELGMGKVKEAVRRHIRHGDVIACDVEADFAVIAGVSNWGGYALACALYILYSCAVHSQYLRKAVGPSRAPGDQAWTQALPSVIKEEKMLGILVQHKVRSGVSGIVGMEVDGLPFHNTHAEMIQKLVDVTTAQV

SEQ ID NO: 872667 - protein, 615 aa, Homo sapiens
MPFTLHLRSRLPSAIRSLILQKKPNIRNTSSMAGELRPASLVVLPRSLAPAFERFCQVNTGPLPLLGQSEPEKWMLPPQGAISETRMGHPQFWKYEFGACTGSLASLEQYSEQLKDMVAFFLGCSFSLEEALEKAGLPRRDPAGHSQAGAQTTVPCVTHAGFCCPLVVTMRPIPKDKLEGLVRACCSLGGEQGQPVHMGDPELLGIKELSKPAYGDAMVCPPGEVPVFWPSPLTSLGAVSSCETPLAFASIPGCTVMTDLKDAKAPPGCLTPERIPEVHHISQDPLHYSIASVSASQKIRELESMIGIDPGNRGIGHLLCKDELLKASLSLSHARSVLITTGFPTHFNHEPPEETDGPPGAVALVAFLQALEKEVAIIVDQRAWNLHQKIVEDAVEQGVLKTQIPILTYQGGSVEAAQAFLCKNGDPQTPRFDHLVAIERAGRAADGNYYNARKMNIKHLVDPIDDLFLAAKKIPGISSTGVGDGGNELGMGKVKEAVRRHIRHGDVIACDVEADFAVIAGVSNWGGYALACALYILYSCAVHSQYLRKAVGPSRAPGDQAWTQALPSVIKVTNPSQPLAWKQLLPWMSSRPEVPSRKPRAGTLLPLKSQRQSQP

SEQ ID NO: 872668 - protein, 579 aa, Homo sapiens
MPFTLHLRSRLPSAIRSLILQKKPNIRNTSSMAGELRPASLVVLPRSLAPAFERFCQVNTGPLPLLGQSEPEKWMLPPQGAISETRMGHPQFWKYEFGACTGSLASLEQYSEQLKDMVAFFLGCSFSLEEALEKAGLPRRDPAGHSQAGAQTTVPCVTHAGFCCPLVVTMRPIPKDKLEGLVRACCSLGGEQGQPVHMGDPELLGIKELSKPAYGDAMVCPPGEVPVFWPSPLTSLGAVSSCETPLAFASIPGCTVMTDLKDAKAPPGCLTPERIPEVHHISQDPLHYSIASVSASQKIRELESMIGIDPGNRGIGHLLCKDELLKASLSLSHARSVLITTGFPTHFNHEPPEETDGPPGAVALVAFLQALEKEVAIIVDQRAWNLHQKIVEDAVEQGVLKTQIPILTYQGGSVEAAQAFLCKNGDPQTPRFDHLVAIERAGRAADGNYYNARKMNIKHLVDPIDDLFLAAKKIPGISSTGVGDGGNELGMGKVKEAVRRHIRHGDVIACDVEADFAVIAGVSNWGGYALACALYILYSCAVHSQYLRKAVGPSRAPGDQAWTQALPSVIKQESKGRKL

SEQ ID NO: 872669 - protein, 603 aa, Homo sapiens
MPFTLHLRSRLPSAIRSLILQKKPNIRNTSSMAGELRPASLVVLPRSLAPAFERFCQVNTGPLPLLGQSEPEKWMLPPQGAISETRMGHPQFWKYEFGACTGSLASLEQYSEQLKDMVAFFLGCSFSLEEALEKAGLPRRDPAGHSQAGAQTTVPCVTHAGFCCPLVVTMRPIPKDKLEGLVRACCSLGGEQGQPVHMGDPELLGIKELSKPAYGDAMVCPPGEVPVFWPSPLTSLGAVSSCETPLAFASIPGCTVMTDLKDAKAPPGCLTPERIPEVHHISQDPLHYSIASVSASQKIRELESMIGIDPVLITTGFPTHFNHEPPEETDGPPGAVALVAFLQALEKEVAIIVDQRAWNLHQKIVEDAVEQGVLKTQIPILTYQGGSVEAAQAFLCKNGDPQTPRFDHLVAIERAGRAADGNYYNARKMNIKHLVDPIDDLFLAAKKIPGISSTGVGDGGNELGMGKVKEAVRRHIRHGDVIACDVEADFAVIAGEHSDGRPVRPATQGVSNWGGYALACALYILYSCAVHSQYLRKAVGPSRAPGDQAWTQALPSVIKVTNPSQPLAWKQLLPWMSSRPEVPSRKPRAGTLLPLKSQRQSQP

SEQ ID NO: 872670 - protein, 117 aa, Homo sapiens
WRLILFCWSLTRWAVFAGVSNWGGYALACALYILYSCAVHSQYLRKAVGPSRAPGDQAWTQALPSVIKEEKMLGILVQHKVRSGVSGIVGMEVDGLPFHNTHAEMIQKLVDVTTAQV

SEQ ID NO: 872671 - protein, 620 aa, Homo sapiens; identical to SEQ ID NO: 872658

SEQ ID NO: 872672 - protein, 620 aa, Homo sapiens; identical to SEQ ID NO: 872658

SEQ ID NO: 872673 - protein, 579 aa, Homo sapiens; identical to SEQ ID NO: 872668

SEQ ID NO: 872674 - protein, 75 aa, Homo sapiens
MESCFAVLGVSNWGGYALACALYILYSCAVHSQYLRKAVGPSRAPGDQAWTQALPSVIKVTNPSQPLAWKQLLPW

SEQ ID NO: 872675 - protein, 568 aa, Homo sapiens
MPFTLHLRSRLPSAIRSLILQKKPNIRNTSSMAGELRPASLVVLPRSLAPAFERFCQVNTGPLPLLGQSEPEKWMLPPQGAISETRMGHPQFWKYEFGACTGSLASLEQYSEQLKDMVAFFLGCSFSLEEALEKAGLPRRDPAGHSQAGAQTTVPCVTHAGFCCPLVVTMRPIPKDKLEGLVRACCSLGELLGIKELSKPAYGDAMVCPPGEVPVFWPSPLTSLGAVSSCETPLAFASIPGCTVMTDLKDAKAPPGCLTPERIPEVHHISQDPLHYSIASVSASQKIRELESMIGIDPGNRGIGHLLCKDELLKASLSLSHARSVLITTGFPTHFNHEPPEETDGPPGAVALVAFLQALEKEVAIIVDQRAWNLHQKIVEDAVEQGVLKTQIPILTYQGGSVEAAQAFLCKNGDPQTPRFDHLVAIERAGRAADGNYYNARKMNIKHLVDPIDDLFLAAKKIPGISSTGVSNWGGYALACALYILYSCAVHSQYLRKAVGPSRAPGDQAWTQALPSVIKEEKMLGILVQHKVRSGVSGIVGMEVDGLPFHNTHAEMIQKLVDVTTAQV

SEQ ID NO: 872676 - protein, 147 aa, Homo sapiens
MDEEPMEKKRRTNNGSGITPGTTYNRVRQNTTIYNTRIEKMRATEPKPGAANKPHNTKPRGSRAATTSTTERQQGEATTRDTEQSTTERSRRTKKEAVNPQEMKTHTQERETGYQRASRQEHTPERREEQHKQKEREREERQPVRAK

SEQ ID NO: 872677 - protein, 620 aa, Homo sapiens; identical to SEQ ID NO: 872658

SEQ ID NO: 872678 - protein, 620 aa, Homo sapiens; identical to SEQ ID NO: 872658

SEQ ID NO: 872679 - protein, 620 aa, Homo sapiens; identical to SEQ ID NO: 872658

SEQ ID NO: 872680 - protein, 403 aa, Homo sapiens
MVCPPGEVPVFWPSPLTSLGAVSSCETPLAFASIPGCTVMTDLKDAKAPPGCLTPERIPEVHHISQDPLHYSIASVSASQKIRELESMIGIDPGNRGIGHLLCKDELLKASLSLSHARSVLITTGFPTHFNHEPPEETDGPPGAVALVAFLQALEKEVAIIVDQRAWNLHQKIVEDAVEQGVLKTQIPILTYQGGSVEAAQAFLCKNGDPQTPRFDHLVAIERAGRAADGNYYNARKMNIKHLVDPIDDLFLAAKKIPGISSTGVGDGGNELGMGKVKEAVRRHIRHGDVIACDVEADFAVIAGVSNWGGYALACALYILYSCAVHSQYLRKAVGPSRAPGDQAWTQALPSVIKEEKMLGILVQHKVRSGVSGIVGMEVDGLPFHNTHAEMIQKLVDVTTAQV

SEQ ID NO: 872681 - protein, 579 aa, Homo sapiens; identical to SEQ ID NO: 872668

SEQ ID NO: 872682 - protein, 593 aa, Homo sapiens
MPFTLHLRSRLPSAIRSLILQKKPNIRNTSSMAGELRPASLVVLPRSLAPAFERFCQVNTGPLPLLGQSEPEKWMLPPQGAISETRMGHPQFWKYEFGACTGSLASLEQYSEQLKDMVAFFLGCSFSLEEALEKAGLPRRDPAGHSQAGAQTTVPCVTHAGFCCPLVVTMRPIPKDKLEGLVRACCSLGGEQGQPVHMGDPELLGIKELSKPAYGDAMVCPPGEVPVFWPSPLTSLGAVSSCETPLAFASIPGCTVMTDLKDAKAPPGCLTPERIPEVHHISQDPLHYSIASVSASQKIRELESMIGIDPGNRGIGHLLCKDELLKASLSLSHARSVLITTGFPTHFNHEPPEETDGPPGAVALVAFLQALEKEVAIIVDQRAWNLHQKIVEDAVEQGVLKTQIPILTYQGGSVEAAQAFLCKNGDPQTPRFDHLVAIERAGRAADGNYYNARKMNIKHLVDPIDDLFLAAKKIPGISSTGVGDGGNELGMGKVKEAVRRHIRHGDVIACDVEADFAVIAGEHSDGRPVRPATQGVSNWGGYALACALYILYSCAVHSQYLRKAVGPSRAPGDQAWTQALPSVIKQESKGRKL

SEQ ID NO: 872683 - protein, 223 aa, Homo sapiens
LQKCKSVKCYNQAHILPSGKWTVGPCEKWARDPKFDHLVAIERAGRAADGNYYNARKMNIKHLVDPIDDLFLAAKKIPGISSTGVGDGGNELGMGKVKEAVRRHIRHGDVIACDVEADFAVIAGVSNWGGYALACALYILYSCAVHSQYLRKAVGPSRAPGDQAWTQALPSVIKEEKMLGILVQHKVRSGVSGIVGMEVDGLPFHNTHAEMIQKLVDVTTAQV

SEQ ID NO: 872684 - protein, 623 aa, Homo sapiens
MPFTLHLRSRLPSAIRSLILQKKPNIRNTSSMAGELRPASLVVLPRSLAPAFERFCQVNTGPLPLLGQSEPEKWMLPPQGAISETRMGHPQFWKYEFGACTGSLASLEQYSEQLKDMVAFFLGCSFSLEEALEKAGLPRRDPAGHSQAGAQTTVPCVTHAGFCCPLVVTMRPIPKDKLEGLVRACCSLGGEQGQPVHMGDPELLGIKELSKPAYGDAMVCPPGEVPVFWPSPLTSLGAVSSCETPLAFASIPGCTVMTDLKDAKAPPGCLTPERIPEVHHISQDPLHYSIASVSASQKIRELESMIGIDPGNRGIGHLLCKDELLKASLSLSHARSVLITTGFPTHFNHEPPEETDGPPGAVALVAFLQALEKEVAIIVDQRAWNLHQKIVEDAVEQGVLKTQIPILTYQGGSVEAAQAFLCKNGDPQTPRFDHLVAIERAGRAADGNYYNARKMNIKHLVDPIDDLFLAAKKIPGISSTGVGDGGNELGMGKVKEAVRRHIRHGDVIACDVEADFAVIAGVSNWGGYALACALYILYSCAVHSQYLRKAVGPSRAPGDQAWTQALPSVIKEEKMLGILVQHKVRSGVSGIVGMEVDGLPFHNTHAEMIQKLVDKGQHFSGAF

SEQ ID NO: 872685 - protein, 620 aa, Homo sapiens; identical to SEQ ID NO: 872658

SEQ ID NO: 872686 - protein, 160 aa, Homo sapiens
RSPVRSSCLTVRSCSPPSPPSALVPAAPPLLPPSSSIFSFFSDPAGRYEGNPGDSGRPSPRSRCRGPRSRGAAAPELGRKDESLSRSGRTARSSPPPPSAGTASTAQPNRPLLHRRLLRPLRPQPARSQVTPCLTLPSKGRLCKILCYLFKLTRCPSHST

SEQ ID NO: 872687 - protein, 387 aa, Homo sapiens
PHLPPPGRPFRPNGLLDKAVSNVIASLTCGRRFEYDDPRFLRLLDLAQEGLKEESGFLREVLNAVPVLLHIPALAGKVLRFQKAFLTQLDELLTEHRMTWDPAQPPRDLTEAFLAEMEKAKGNPESSFNDENLRIVVADLFSAGMVTTSTTLAWGLLLMILHPDVQREPSWGPRQGLREEGYSWGPLGLAGTPGASSTGVARLLKPNFLQHRRKESVPWVLTHCGDAVCPGRVQQEIDDVIGQVRRPEMGDQAHMPYTTAVIHEVQRFGDIVPLGVTHMTSRDIEVQGFRIPKGTTLITNLSSVLKDEAVWEKPFRFHPEHFLDAQGHFVKPEAFLPFSAGRRACLGEPLARMELFLFFTSLLQHFSFSVPTGQPRPSHSWCLQLSW

SEQ ID NO: 872688 - protein, 671 aa, Homo sapiens
MSSFLFPCNSTFFSALFSNSSRPGGGGGGGNVKSTISSAFISKLLGGGGGGGRNVSSFTDDGTIGLSSSSISYPGGGGGGGGSAKSLLLFKTRRSPFGSEAGMGLEALVPLAVIVAIFLLLVDLMHRRQRWAARYPPGPLPLPGLGNLLHVDFQNTPYCFDQVREEVLEGGRGAEDPPPEANMLRRRFGDVFSLQLAWTPVVVLNGLAAVREALVTHGEDTADRPPVPITQILGFGPRSQGVFLARYGPAWREQRRFSVSTLRNLGLGKKSLEQWVTEEAACLCAAFANHSGRPFRPNGLLDKAVSNVIASLTCGRRFEYDDPRFLRLLDLAQEGLKEESGFLREVLNAVPVLLHIPALAGKVLRFQKAFLTQLDELLTEHRMTWDPAQPPRDLTEAFLAEMEKVRVAATVGGKGGGLNVPGGMRGGWAKGWTSASPGGRIWADRCRIGGHLGATPFCPEYALGPAQAKGNPESSFNDENLRIVVADLFSAGMVTTSTTLAWGLLLMILHPDVQRRVQQEIDDVIGQVRRPEMGDQAHMPYTTAVIHEVQRFGDIVPLGVTHMTSRDIEVQGFRIPKGTTLITNLSSVLKDEAVWEKPFRFHPEHFLDAQGHFVKPEAFLPFSAGRRACLGEPLARMELFLFFTSLLQHFSFSVPTGQPRPSHSWCLQLSW

SEQ ID NO: 872689 - protein, 736 aa, Homo sapiens
MSSFLFPCNSTFFSALFSNSSRPGGGGGGGNVKSTISSAFISKLLGGGGGGGRNVSSFTDDGTIGLSSSSISYPGGGGGGGGSAKSLLLFKTRRSPFGSEAGMGLEALVPLAVIVAIFLLLVDLMHRRQRWAARYPPGPLPLPGLGNLLHVDFQNTPYCFDQVREEVLEGGRGAEDPPPEANMLRRRFGDVFSLQLAWTPVVVLNGLAAVREALVTHGEDTADRPPVPITQILGFGPRSQGVFLARYGPAWREQRRFSVSTLRNLGLGKKSLEQWVTEEAACLCAAFANHSGRPFRPNGLLDKAVSNVIASLTCGRRFEYDDPRFLRLLDLAQEGLKEESGFLREVLNAVPVLLHIPALAGKVLRFQKAFLTQLDELLTEHRMTWDPAQPPRDLTEAFLAEMEKVRVAATVGGKGGGLNVPGGMRGGWAKGWTSASPGGRIWADRCRIGGHLGATPFCPEYALGPAQAKGNPESSFNDENLRIVVADLFSAGMVTTSTTLAWGLLLMILHPDVQREAQLGPKAGTEGGRVQLGAPGLSWDTRGFQHRRGQAPVSLTSSNTGGRRVSPGCCPIVGTHVCPGRVQQEIDDVIGQVRRPEMGDQAHMPYTTAVIHEVQRFGDIVPLGVTHMTSRDIEVQGFRIPKGTTLITNLSSVLKDEAVWEKPFRFHPEHFLDAQGHFVKPEAFLPFSAGRRACLGEPLARMELFLFFTSLLQHFSFSVPTGQPRPSHSWCLQLSW

SEQ ID NO: 872690 - protein, 458 aa, Homo sapiens
MVTHGEDTADRPPVPITQILGFGPRSQGVFLARYGPAWREQRRFSVSTLRNLGLGKKSLEQWVTEEAACLCAAFANHSGRPFRPNGLLDKAVSNVIASLTCGRRFEYDDPRFLRLLDLAQEGLKEESGFLREVLNAVPVLLHIPALAGKVLRFQKAFLTQLDELLTEHRMTWDPAQPPRDLTEAFLAEMEKVRVAATVGGKGGGLNVPGGMRGGWAKGGPVHHPASRIWADRCRIGGHLGATPFCPEYALGPAQAKGNPESSFNDENLRIVVADLFSAGMVTTSTTLAWGLLLMILHPDVQRRVQQEIDDVIGQVRRPEMGDQAHMPYTTAVIHEVQRFGDIVPLGVTHMTSRDIEVQGFRIPKGTTLITNLSSVLKDEAVWEKPFRFHPEHFLDAQGHFVKPEAFLPFSAGRRACLGEPLARMELFLFFTSLLQHFSFSVPTGQPRPSHSWCLQLSW

SEQ ID NO: 872691 - protein, 307 aa, Homo sapiens
MLSPSSCISQRWLARSYASWDPAQPPRDLTEAFLAEMEKAKGNPESSFNDENLRIVVADLFSAGMVTTSTTLAWGLLLMILHPDVQREPSWGPRQGLREEGYSWGPLGLAGTPGASSTGVARLLKPNFLQHRRKESVPWVLTHCGEHVCPGRVQQEIDDVIGQVRRPEMGDQAHMPYTTAVIHEVQRFGDIVPLGVTHMTSRDIEVQGFRIPKGTTLITNLSSVLKDEAVWEKPFRFHPEHFLDAQGHFVKPEAFLPFSAGRRACLGEPLARMELFLFFTSLLQHFSFSVPTGQPRPSHSWCLQLSW

SEQ ID NO: 872692 - protein, 243 aa, Homo sapiens
MLSPSSCISQRWLARSYASWDPAQPPRDLTEAFLAEMEKAKGNPESSFNDENLRIVVADLFSAGMVTTSTTLAWGLLLMILHPDVQRRVQQEIDDVIGQVRRPEMGDQAHMPYTTAVIHEVQRFGDIVPLGVTHMTSRDIEVQGFRIPKGTTLITNLSSVLKDEAVWEKPFRFHPEHFLDAQGHFVKPEAFLPFSAGRRACLGEPLARMELFLFFTSLLQHFSFSVPTGQPRPSHSWCLQLSW

SEQ ID NO: 872693 - protein, 485 aa, Homo sapiens
MGLEALVPLAVIVAIFLLLVDLMHRRQRWAARYPPGPLPLPGLGNLLHVDFQNTPYCFDQLRRRFGDVFSLQLAWTPVVVLNGLAAVREALVTHGEDTADRPPVPITQILGFGPRSQGVFLARYGPAWREQRRFSVSTLRNLGLGKKSLEQWVTEEAACLCAAFANHSGRPFRPNGLLDKAVSNVIASLTCGRRFEYDDPRFLRLLDLAQEGLKEESGFLREVLNAVPVLLHIPALAGKVLRFQKAFLTQLDELLTEHRMTWDPAQPPRDLTEAFLAEMEKAKGNPESSFNDENLRIVVADLFSAGMVTTSTTLAWGLLLMILHPDVQRRVQQEIDDVIGQVRRPEMGDQAHMPYTTAVIHEVQRFGDIVPLGVTHMTSRDIEVQGFRIPKGTTLITNLSSVLKDEAVWEKPFRFHPEHFLDAQGHFVKPEAFLPFSAGRRACLGEPLARMELFLFFTSLLQHFSFSVPTGQPRPSHSWCLQLSW

SEQ ID NO: 872694 - protein, 608 aa, Homo sapiens
MSSFLFPCNSTFFSALFSNSSRPGGGGGGGNVKSTISSAFISKLLGGGGGGGRNVSSFTDDGTIGLSSSSISYPGGGGGGGGSAKSLLLFKTRRSPFGSEAGMGLEALVPLAVIVAIFLLLVDLMHRRQRWAARYPPGPLPLPGLGNLLHVDFQNTPYCFDQVREEVLEGGRGAEDPPPEANMLRRRFGDVFSLQLAWTPVVVLNGLAAVREALVTHGEDTADRPPVPITQILGFGPRSQGVFLARYGPAWREQRRFSVSTLRNLGLGKKSLEQWVTEEAACLCAAFANHSGRPFRPNGLLDKAVSNVIASLTCGRRFEYDDPRFLRLLDLAQEGLKEESGFLREVLNAVPVLLHIPALAGKVLRFQKAFLTQLDELLTEHRMTWDPAQPPRDLTEAFLAEMEKAKGNPESSFNDENLRIVVADLFSAGMVTTSTTLAWGLLLMILHPDVQRRVQQEIDDVIGQVRRPEMGDQAHMPYTTAVIHEVQRFGDIVPLGVTHMTSRDIEVQGFRIPKGTTLITNLSSVLKDEAVWEKPFRFHPEHFLDAQGHFVKPEAFLPFSAGRRACLGEPLARMELFLFFTSLLQHFSFSVPTGQPRPSHSWCLQLSW

SEQ ID NO: 872695 - protein, 430 aa, Homo sapiens
MSSFLFPCNSTFFSALFSNSSRPGGGGGGGNVKSTISSAFISKLLGGGGGGGRNVSSFTDDGTIGLSSSSISYPGGGGGGGGSAKSLLLFKTRRSPFGSEAGMGLEALVPLAVIVAIFLLLVDLMHRRQRWAARYPPGPLPLPGLGNLLHVDFQNTPYCFDQVREEVLEGGRGAEDPPPEANMLRRRFGDVFSLQLAWTPVVVLNGLAAVREALVTHGEDTADRPPVPITQILGFGPRSQGVFLARYGPAWREQRRFSVSTLRNLGLGKKSLEQWVTEEAACLCAAFANHSGRPFRPNGLLDKAVSNVIASLTCGRRFEYDDPRFLRLLDLAQEGLKEESGFLREVLNAVPVLLHIPALAGKVLRFQKAFLTQLDELLTEHRMTWDPAQPPRDLTEAFLAEMEKAKGNPESSFNDENLRIVAVSNRRSTT

SEQ ID NO: 872696 - protein, 139 aa, Homo sapiens
MGDQAHMPYTTAVIHEVQRFGDIVPLGVTHMTSRDIEVQGFRIPKGTTLITNLSSVLKDEAVWEKPFRFHPEHFLDAQGHFVKPEAFLPFSAGRRACLGEPLARMELFLFFTSLLQHFSFSVPTGQPRPSHSWCLQLSW

SEQ ID NO: 872697 - protein, 105 aa, Homo sapiens
CRPRRDEAAARWVAPISRGGPFWAPGGGGRESGRSRGRGALFVSWCSLRRASASRDSPAAPCLCPVRLVHPPRRGSSPGMGMRTSPRWTPVKQRKGELIGLRSRQ

SEQ ID NO: 872698 - protein, 605 aa, Homo sapiens
MSQLSSTLKRYTESARYTDAHYAKSGYGAYTPSSYGANLAASLLEKEKLGFKPVPTSSFLTRPRTYGPSSLLDYDRGRPLLRPDITGGGKRAESQTRGTERPLGSGLSGGSGFPYGVTNNCLSYLPINAYDQGVTLTQKLDSQSDLARDFSSLRTSDSYRIDPRNLGRSPMLARTRKELCTLQGLYQTASCPEYLVDYLENYGRKGSASQVPSQAPPSRVPEIISPTYRPIGRYTLWETGKGQAPGPSRSSSPGRDGMNSKSAQGLAGLRNLGNTCFMNSILQCLSNTRELRDYCLQRLYMRDLHHGSNAHTALVEEFAKLIQTIWTSSPNDVVSPSEFKTQIQRYAPRFVGYNQQDAQEFLRFLLDGLHNEVNRVTLRPKSNPENLDHLPDDEKGRQMWRKYLEREDSRIGDLFVGQLKSSLTCTDCGYCSTVFDPFWDLSLPIAKRGYPEVTLMDCMRLFTKEDVLDGDEKPTCCRCRGRKRCIKKFSIQRFPKILVLHLKRFSESRIRTSKLTTFVNFPLRDLDLREFASENTNHAVYNLYAVSNHSGTTMGGHYTAYCRSPGTGEWHTFNDSSVTPMSSSQVRTSDAYLLFYELASPPSRM

SEQ ID NO: 872699 - protein, 637 aa, Homo sapiens
MSQLSSTLKRYTESARYTDAHYAKSGYGAYTPSSYGANLAASLLEKEKLGFKPVPTSSFLTRPRTYGPSSLLDYDRGRPLLRPDITGGGKRAESQTRGTERPLGSGLSGGSGFPYGVTNNCLSYLPINAYDQGVTLTQKLDSQSDLARDFSSLRTSDSYRIDPRNLGRSPMLARTRKELCTLQGLYQTASCPEYLVDYLENYGRKGSASQVPSQAPPSRVPEIISPTYRPIGRYTLWETGKGQAPGPSRSSSPGRDGMNSKSAQGLAGLRNLGNTCFMNSILQCLSNTRELRDYCLQRLYMRDLHHGSNAHTALVEEFAKLIQTIWTSSPNDVVSPSEFKTQIQRYAPRFVGYKKGLADMSSQVGGSEEQVLRTRGVAHPPSFGFSQQDAQEFLRFLLDGLHNEVNRVTLRPKSNPENLDHLPDDEKGRQMWRKYLEREDSRIGDLFVGQLKSSLTCTDCGYCSTVFDPFWDLSLPIAKRGYPEVTLMDCMRLFTKEDVLDGDEKPTCCRCRGRKRCIKKFSIQRFPKILVLHLKRFSESRIRTSKLTTFVNFPLRDLDLREFASENTNHAVYNLYAVSNHSGTTMGGHYTAYCRSPGTGEWHTFNDSSVTPMSSSQVRTSDAYLLFYELASPPSRM

SEQ ID NO: 872700 - protein, 516 aa, Homo sapiens
MSQLSSTLKRYTESARYTDAHYAKSGYGAYTPSSYGANLAASLLEKEKLGFKPVPTSSFLTRPRTYGPSSLLDYDRGRPLLRPDITGGGKRAESQTRGTERPLGSGLSGGSGFPYGVTNNCLSYLPINAYDQGVTLTQKLDSQSDLARDFSSLRTSDSYRIDPRNLGRSPMLARTRKELCTLQGLYQTASCPEYLVDYLENYGRKGSASQVPSQAPPSRVPEIISPTYRPIGRYTLWETGKGQAPGPSRSSSPGRDGMNSKSAQGLAGLRNLGNTCFMNSILQCLSNTRELRDYCLQRLYMRDLHHGSNAHTALVEEFAKLIQTIWTSSPNDVVSPSEFKTQIQRYAPRFVGYNQQDAQEFLRFLLDGLHNEVNRVTLRPKSNPENLDHLPDDEKGRQMWRKYLEREDSRIGDLFVGQLKSSLTCTDCGYCSTVFDPFWDLSLPIAKRGYPEVTLMDCMRLFTKEDVLDGDEKPTCCRCRGRKRCIKKFSIQRFPKILVLRILKIHQGWDMTFKGD

SEQ ID NO: 872701 - protein, 204 aa, Homo sapiens
YTIYNGTTDRSEFTCLRACLALSLFCMFLLGKPFGPFWDLSLPIAKRGYPEVTLMDCMRLFTKEDVLDGDEKPTCCRCRGRKRCIKKFSIQRFPKILVLHLKRFSESRIRTSKLTTFVNFPLRDLDLREFASENTNHAVYNLYAVSNHSGTTMGGHYTAYCRSPGTGEWHTFNDSSVTPMSSSQVRTSDAYLLFYELASPPSRM

SEQ ID NO: 872702 - protein, 199 aa, Homo sapiens
RPRSPLSPSLLLSTFVGLLLNKAKNSKSAQGLAGLRNLGNTCFMNSILQCLSNTRELRDYCLQRLYMRDLHHGSNAHTALVEEFAKLIQTIWTSSPNDVVSPSEFKTQIQRYAPRFVGYNQQDAQEFLRFLLDGLHNEVNRVTLRPKSNPENLDHLPDDEKGRQMWRKYLEREDSRIGGKRMKGKMPVFTVACSCLSGA

SEQ ID NO: 872703 - protein, 605 aa, Homo sapiens; identical to SEQ ID NO: 872698

SEQ ID NO: 872704 - protein, 371 aa, Homo sapiens
RPRSPLSPSLLLSTFVGLLLNKAKNSKSAQGLAGLRNLGNTCFMNSILQCLSNTRELRDYCLQRLYMRDLHHGSNAHTALVEEFAKLIQTIWTSSPNDVVSPSEFKTQIQRYAPRFVGYNQQDAQEFLRFLLDGLHNEVNRVTLRPKSNPENLDHLPDDEKGRQMWRKYLEREDSRIGDLFVGQLKSSLTCTDCGYCSTVFDPFWDLSLPIAKRGYPEVTLMDCMRLFTKEDVLDGDEKPTCCRCRGRKRCIKKFSIQRFPKILVLHLKRFSESRIRTSKLTTFVNFPLRDLDLREFASENTNHAVYNLYAVSNHSGTTMGGHYTAYCRSPGTGEWHTFNDSSVTPMSSSQVRTSDAYLLFYELASPPSRM

SEQ ID NO: 872705 - protein, 433 aa, Homo sapiens
MSQLSSTLKRYTESARYTDAHYAKSGYGAYTPSSYGANLAASLLEKEKLGFKPVPTSSFLTRPRTYGPSSLLDYDRGRPLLRPDITGGGKRAESQTRGTERPLGSGLSGGSGFPYGVTNNCLSYLPINAYDQGVTLTQKLDSQSDLARDFSSLRTSDSYRIDPRNLGRSPMLARTRKELCTLQGLYQTASCPEYLVDYLENYGRKGSASQVPSQAPPSRVPEIISPTYRPIGRYTLWETGKGQAPGPSRSSSPGRDGMNSKSAQGLAGLRNLGNTCFMNSILQCLSNTRELRDYCLQRLYMRDLHHGSNAHTALVEEFAKLIQTIWTSSPNDVVSPSEFKTQIQRYAPRFVGYNQQDAQEFLRFLLDGLHNEVNRVTLRPKSNPENLDHLPDDEKGRQMWRKYLEREDSRIGGKRMKGKMPVFTVACSCLSGA

SEQ ID NO: 872706 - protein, 107 aa, Homo sapiens
PTPRTAYTENGWQSLRPRSRCPWGGSLKGRPAGLGGTERSRRGVSRSCPLRADSPLSPQRHSHVLQPSAHQRRLPALLRTGQPALPNVAPGATSLLPSPWWPRSLNF

SEQ ID NO: 872707 - protein, 143 aa, Homo sapiens
YYLDFSYRIYQEFEVTVPDSITSWVATGFVISEDLGLGLTTTPVELQAFQPFFIFLNLPYSVIRGEEFALEITIFNYLKDATEVKVIIEKSDKFDILMTSNEINATGHQQTLLVPSEDGATVLFPIRPTHLGEIPITVTALSP

SEQ ID NO: 872708 - protein, 186 aa, Homo sapiens
MSTNNALRVFWKSREWNMKTSTFDSDEDILLLPKRKRFRKKKSRPVRHTKRHEEEQVYEQGTTLPCSICKHEIDLTGIFLHKKQHVALATLGFQWMGRKKPQPSVIAVQRQFMISKLLSSFMFTEKTLQSINNAFELLWKKQIPAYYKIFDNIDRSVIYSQKICHLLIKGVGICEDRNSTWKADMN

SEQ ID NO: 872709 - protein, 416 aa, Homo sapiens
MMPQLQFKDAFWCRDFTAHTGYEVLLQRLLDGRKMCKDMEELLRQRAQAEERYGKELVQIARKAGGQTEINSLRASFDSLKQQMENVGSSHIQLALTLREELRSLEEFRERQKEQRKKYEAVMDRVQKSKLSLYKKAMESKKTYEQKCRDADDAEQAFERISANGHQKQVEKSQNKARQCKDSATEAERVYRQSIAQLEKVRAEWEQEHRTTCEAFQLQEFDRLTILRNALWVHSNQLSMQCVKDDELYEEVRLTLEGCSIDADIDSFIQAKSTGTEPPAPVPYQNYYDREVTPLTSSPGIQPSCGMIKRFSGLLHGSPKTTSLAASAASTETLTPTPERNEGVYTAIAVQEIQGNPASPAQEYRALYDYTAQNPDELDLSAGDILEVILEGEDGWWTVERNGQRGFVPGSYLEKL

SEQ ID NO: 872710 - protein, 397 aa, Homo sapiens
MMPQLQFKDAFWCRDFTAHTGYEVLLQRLLDGRKMCKDMEELLRQRAQAEERYGKELVQIARKAGGQTEINSLRASFDSLKQQMENVGSSHIQLALTLREELRSLEEFRERQKEQRKKYEAVMDRVQKSKLSLYKKAMESKKTYEQKCRDADDAEQAFERISANGHQKQVEKSQNKARQCKDSATEAERVYRQSIAQLEKVRAEWEQEHRTTCEAFQLQEFDRLTILRNALWVHSNQLSMQCVKDDELYEEVRLTLEGCSIDADIDSFIQAKSTGTEPPGEVRLADSAASRFSGLLHGSPKTTSLAASAASTETLTPTPERNEGVYTAIAVQEIQGNPASPAQEYRALYDYTAQNPDELDLSAGDILEVILEGEDGWWTVERNGQRGFVPGSYLEKL

SEQ ID NO: 872711 - protein, 333 aa, Homo sapiens
MENVGSSHIQLALTLREELRSLEEFRERQKEQRKKYEAVMDRVQKSKLSLYKKAMESKKTYEQKCRDADDAEQAFERISANGHQKQVEKSQNKARQCKDSATEAERVYRQSIAQLEKVRAEWEQEHRTTCEAFQLQEFDRLTILRNALWVHSNQLSMQCVKDDELYEEVRLTLEGCSIDADIDSFIQAKSTGTEPPAPVPYQNYYDREVTPLTSSPGIQPSCGMIKRFSGLLHGSPKTTSLAASAASTETLTPTPERNEGVYTAIAVQEIQGNPASPAQEYRALYDYTAQNPDELDLSAGDILEVILEGEDGWWTVERNGQRGFVPGSYLEKL

SEQ ID NO: 872712 - protein, 71 aa, Homo sapiens
FPSVSSESEQSQAVQGLGHRGRYVGLAAPSDQGGGLGGTPHTHLLTLGTHTLPLAAQSWARRSHSRYVPSK

SEQ ID NO: 872713 - protein, 477 aa, Homo sapiens
AGTGLGCLGSRGCLLSVADGAGREGGPGPALPGLGRCCWRLALHQASLWQESELCRGRRLRMMPQLQFKDAFWCRDFTAHTGYEVLLQRLLDGRKMCKDMEELLRQRAQAEERYGKELVQIARKAGGQTEINSLRASFDSLKQQMENVGSSHIQLALTLREELRSLEEFRERQKEQRKKYEAVMDRVQKSKLSLYKKAMESKKTYEQKCRDADDAEQAFERISANGHQKQVEKSQNKARQCKDSATEAERVYRQSIAQLEKVRAEWEQEHRTTCEAFQLQEFDRLTILRNALWVHSNQLSMQCVKDDELYEEVRLTLEGCSIDADIDSFIQAKSTGTEPPAPVPYQNYYDREVTPLTSSPGIQPSCGMIKRFSGLLHGSPKTTSLAASAASTETLTPTPERNEGVYTAIAVQEIQGNPASPAQEYRALYDYTAQNPDELDLSAGDILEVILEGEDGWWTVERNGQRGFVPGSYLEKL

SEQ ID NO: 872714 - protein, 303 aa, Homo sapiens
MMPQLQFKDAFWCRDFTAHTGYEVLLQRLLDGRKMCKDMEELLRQRAQAEERYGKELVQIARKAGGQTEINSLRASFDSLKQQMENVGSSHIQLALTLREELRSLEEFRERQKEQRKKYEAVMDRVQKSKLSLYKKAMESKKTYEQKCRDADDAEQAFERISANGHQKQVEKSQNKARQCKDSATEAERVYRQSIAQLEKVRAEWEQEHRTTCEAFQLQEFDRLTILRNALWVHSNQLSMQCVKDDELYEEVRLTLEGCSIDADIDSFIQAKSTGTEPPGSLDCCTEVPRPLRWQLLLRPQRP

SEQ ID NO: 872715 - protein, 97 aa, Homo sapiens
SLDCCTEVPRPLRWQLLLVKGVRRGPPNTLILGGRRGLPHGTDGATEALKRKCVSPNSKCGQQKEEAGPSMEKPHSSRTSRGQCPQKGGGVYVSPCS

SEQ ID NO: 872716 - protein, 766 aa, Homo sapiens [sequence omitted]

SEQ ID NO: 872717 - protein, 110 aa, Homo sapiens
IITSDPIQTFCFAAIGIFLMQQLVNLLKGVLQIDSSSAYLICAPRGQRKGKRPWRILTETCKQKQLFQSVTSLFMKETFRKLQLGPGQKEELPKRETFSYLCWAHLHVPG

SEQ ID NO: 872718 - protein, 137 aa, Homo sapiens
LVIVNTKAKKGIGREPLKNPKAFSAAAAAALLLLSVSPLVLGAGEPWALHGPAGGGKDTTALALLGRPLQPHRKTCEELHKTAMQNGAGGALFVHRDTPENNPDTPFDFTPENYKRIEAIVKNYPEGHKAAAVLPVL

SEQ ID NO: 872719 - protein, 148 aa, Homo sapiens
GDLEDPYDVGRGLWSGCFGKMAGSGVRQATSTASTFVKPIFSRDMNEAKRRVRELYRAWYREVPNTVHQFQLDITVKMGRDKVREMFMKNAHVTDPRVVDLLVIKGKIELEETIKVWKQRTHVMRFFHETEAPRPKDFLSKFYVGHDP

SEQ ID NO: 872720 - protein, 128 aa, Homo sapiens
MAGSGVRQATSTASTFVKPIFSRDMNEAKRRVRELYRAWYREVPNTVHQFQLDITVKMGRDKVREMFMKNAHVTDPRVVDLLVIKGKIELEETIKVWKQRTHVMRFFHETEAPRPKDFLSKFYVGHDP

SEQ ID NO: 872721 - protein, 128 aa, Homo sapiens; identical to SEQ ID NO: 872720

SEQ ID NO: 872722 - protein, 128 aa, Homo sapiens; identical to SEQ ID NO: 872720

SEQ ID NO: 872723 - protein, 138 aa, Homo sapiens
GDLEDPYDVGRGLWSGCFGKMAGSGVRQATSTASTFVKPIFSRDMNEAKRRVRELYRAWYREVPNTKMGRDKVREMFMKNAHVTDPRVVDLLVIKGKIELEETIKVWKQRTHVMRFFHETEAPRPKDFLSKFYVGHDP

SEQ ID NO: 872724 - protein, 128 aa, Homo sapiens; identical to SEQ ID NO: 872720

SEQ ID NO: 872725 - protein, 81 aa, Homo sapiens
KLRLGTRLGGKMAGSGVRQATSTASTFVKPIFSRDMNEAKRRVRELYRAWYREVPNTGRLVNVVVSIAPMIRHFSVRAQII

SEQ ID NO: 872726 - protein, 156 aa, Homo sapiens
  misc_feature (3)..(3): Xaa can be any naturally occurring amino acid
TPXRYRIPGPSYAARDARRGLWSGCFGKMAGSGVRQATSTASTFVKPIFSRDMNEAKRRVRELYRAWYREVPNTVHQFQLDITVKMGRDKVREMFMKNAHVTDPRVVDLLVIKGKIELEETIKVWKQRTHVMRFFHETEAPRPKDFLSKFYVGHDP

SEQ ID NO: 872727 - protein, 139 aa, Homo sapiens
KLRLGTRLGGKMAGSGVRQATSTASTFVKPIFSRDMNEAKRRVRELYRAWYREVPNTVHQFQLDITVKMGRDKVREMFMKNAHVTDPRVVDLLVIKGKIELEETIKVWKQRTHVMRFFHETEAPRPKDFLSKFYVGHDP

SEQ ID NO: 872728 - protein, 139 aa, Homo sapiens; identical to SEQ ID NO: 872727

SEQ ID NO: 872729 - protein, 128 aa, Homo sapiens; identical to SEQ ID NO: 872720

SEQ ID NO: 872730 - protein, 130 aa, Homo sapiens
GDLEDPYDVGRGLWSGCFGKMAGSGVRQATSTASTFVKPIFSRDMNEAKRRVRELYRAWYREVPNTVHQFQLDITVDPRVVDLLVIKGKIELEETIKVWKQRTHVMRFFHETEAPRPKDFLSKFYVGHDP

SEQ ID NO: 872731 - protein, 128 aa, Homo sapiens; identical to SEQ ID NO: 872720

SEQ ID NO: 872732 - protein, 101 aa, Homo sapiens
KLRLGTRLGGKMAGSGVRQATSTASTFVKPIFSRDMNEAKRRVRELYRAWYREVPNTKMGRDKVREMFMKNAHVTDPRVVDLLVIKGKIELEETIKVWKQR

SEQ ID NO: 872733 - protein, 365 aa, Homo sapiens
IQNPACQLVFQKAKKNRDVHPGALVPASSLKGGNLGSMSVRSKLPNSPAASSHPKLKSSKGITKKPQAPSNNASSSLASLNPVGKNTSSPALPRTAPCISESPRKCISSPNTPKAKVIPAQNSADLPESTLLPNKCSGKTQPKYLKHNHISSRDNAVSHLAAHSNSSSKCPKLPKANIPVRPKPSFQSSAKMTKTSSKTIATGLGTQSQPSDGAPQAKPVPAQKLKSALNLNQPVSVSSVSPVKATQKSKDKNIVSATKKQPQNKSAFQKTGPSSLKSPGRTPLSIVSLPQSSTKTQTAPKSAQTVAKSQHSTKGPPRSGKTPASIRKPPSSVKDADSGDKKPTAKKKEDDDHYFVMTGSKKPRK

SEQ ID NO: 872734 - protein, 164 aa, Homo sapiens [sequence omitted]

SEQ ID NO: 872735 - protein, 97 aa, Homo sapiens
TDSPLCHVDIAIPCNNKGAHSVGLMWMLAREVLRVRGTISREHPWEVMPELYFYRDPEVIKKEEQAATEKAVTKEEFQCEWTAPAPEFTATQPEVAH

SEQ ID NO: 872736 - protein, 71 aa, Homo sapiens
YIMHLPAWLTRFLVFPVCLVRLDSLHNSPPTFPGEISCSLLKVPLSYLTYMATFPGNHEICNGRVYALFIG

SEQ ID NO: 872737 - protein, 108 aa, Homo sapiens
CSIWNLVMPFARVRQSWNKERAWKGRAGKGSDRRVLTKEKKKKMLMVRVERRGLVDPGHWVRPWPGCFGQMMDLNLKTSREADTQAPGSEPPKQSRVCQMARNPHRCR

SEQ ID NO: 872738 - protein, 148 aa, Homo sapiens
TRQRPQKEPGAASEPGAWAGVPESTAAAGHWEGQKTGNGKPGTHGVTQRRDYSAGSPAFALCVSSGDFETRFLSGPPRAASPWPASSALESPSTGGTGRRSPRRGTSSVVKAVRTLGARQGFGPLLNPTTVLSGAGRFEDLDSLMLTA

SEQ ID NO: 872739 - protein, 42 aa, Homo sapiens
MGLTRSDGVKNGSFSAQALCLLPFTKDVTCFSLPSAMIVRPP

SEQ ID NO: 872740 - protein, 112 aa, Homo sapiens
MLVGSPSHGIVGGAENDMEGALGSLSAPHHKVRRSRHYHHHQGGKKHIQIRPSQESQDFRAQSASLFVLEIKEESPVTGSHEPVRQAPSLLRELGLTADTWGKEARGPRATQ

SEQ ID NO: 872741 - protein, 370 aa, Homo sapiens
MHRLIFVYTLICANFCSCRDTSATPQSASIKALRNANLRRDESNHLTDLYRRDETIQVKGNGYVQSPRFPNSYPRNLLLTWRLHSQENTRIQLVFDNQFGLEEAENDICRYDFVEVEDISETSTIIRGRWCGHKEVPPRIKSRTNQIKITFKSDDYFVAKPGFKIYYSLLEDFQPAAASETNWESVTSSISGVSYNSPSVTDPTLIADALDKKIAEFDTVEDLLKYFNPESWQEDLENMYLDTPRYRGRSYHDRKSKVDLDRLNDDAKRYSCTPRNYSVNIREELKLANVVFFPRCLLVQRCGGNCGCGTVNWRSCTCNSGKTVKKYHEVLQFEPGHIKRRGRAKTMALVDIQLDHHERCDCICSSRPPR

SEQ ID NO: 872742 - protein, 370 aa, Homo sapiens; identical to SEQ ID NO: 872741

SEQ ID NO: 872743 - protein, 370 aa, Homo sapiens; identical to SEQ ID NO: 872741

SEQ ID NO: 872744 - protein, 333 aa, Homo sapiens
MHRLIFVYTLICANFCSCRDTSATPQSASIKALRNANLRRDESNHLTDLYRRDETIQVKGNGYVQSPRFPNSYPRNLLLTWRLHSQENTRIQLVFDNQFGLEEAENDICRYDFVEVEDISETSTIIRGRWCGHKEVPPRIKSRTNQIKITFKSDDYFVAKPGFKIYYSLLEDFQPAAASETNWESVTSSISGVSYNSPSVTDPTLIADALDKKIAEFDTVEDLLKYFNPESWQEDLENMYLDTPRYRGRSYHDRKSKVDLDRLNDDAKRYSCTPRNYSVNIREELKLANVVFFPRCLLVQRCGGNCGCGTVNWRSCTCNSGKTVKKYHEVCHS

SEQ ID NO: 872745 - protein, 364 aa, Homo sapiens
MHRLIFVYTLICANFCSCRDTSATPQSASIKALRNANLRRDDLYRRDETIQVKGNGYVQSPRFPNSYPRNLLLTWRLHSQENTRIQLVFDNQFGLEEAENDICRYDFVEVEDISETSTIIRGRWCGHKEVPPRIKSRTNQIKITFKSDDYFVAKPGFKIYYSLLEDFQPAAASETNWESVTSSISGVSYNSPSVTDPTLIADALDKKIAEFDTVEDLLKYFNPESWQEDLENMYLDTPRYRGRSYHDRKSKVDLDRLNDDAKRYSCTPRNYSVNIREELKLANVVFFPRCLLVQRCGGNCGCGTVNWRSCTCNSGKTVKKYHEVLQFEPGHIKRRGRAKTMALVDIQLDHHERCDCICSSRPPR

SEQ ID NO: 872746 - protein, 106 aa, Homo sapiens
MLYSSIYTVSLLGTTSTYLTHTVRSSLLCLEMIDTIVVHYSYLSLIHFKQPTPYLHTHELVPIAILNLLTGSVIKARRVKSPTLLIYFSNCVASYQYPTLSLISYL

SEQ ID NO: 872747 - protein, 246 aa, Homo sapiens
MVVDFWTWEQTFQELIQEAKPRATWTLKLDGNLQLDCLAQGWKQYQQRAFGWFRCSSCQRSWASAKLQILCHTYWEHWTSQGQVRMRLFGQRCQKCSWSQYEMPEFSSDSTMRILSNLVQHILKKYYGNGMRKSPEMPVILEVSLEGSHDTANCEACTLGICGQGLKSYMTKPSKSLLPHLKTGNSSPGIGAVYLANQAKNQSDEAKEAKGSGYEKLGPSRDPDPLNICVFILLLVFIVVKCFTSE

SEQ ID NO: 872748 - protein, 246 aa, Homo sapiens; identical to SEQ ID NO: 872747

SEQ ID NO: 872749 - protein, 148 aa, Homo sapiens
MAWGVEEKLLVIGTQDGIMAVWDMEEQHVIHMLTGHTGEVRCVKIFAKGTLANSASKDYTLHLWNLLSGQEKFTIWDGGSKNPAEPQIWNLHVDEAHKVVYSASGSKINAWNLETAEPVFHILGDASDPWMCMAVLASQATLLTVSRD

SEQ ID NO: 872750 - protein, 736 aa, Homo sapiens
MNVALQELGAGSNVGFQKGTRQLLGSRTQLELVLAGASLLLAALLLGCLVALGVQYHRDPSHSTCLTEACIRVAGKILESLDRGVSPCEDFYQFSCGGWIRRNPLPDGRSRWNTFNSLWDQNQAILKHLLENTTFNSSSEAEQKTQRFYLSCLQVERIEELGAQPLRDLIEKIGGWNITGPWDQDNFMEVLKAVAGTYRATPFFTVYISADSKSSNSNVIQVDQSGLFLPSRDYYLNRTANEKVLTAYLDYMEELGMLLGGRPTSTREQMQQVLELEIQLANITVPQDQRRDEEKIYHKMSISELQALAPSMDWLEFLSFLLSPLELSDSEPVVVYGMDYLQQVSELINRTEPSILNNYLIWNLVQKTTSSLDRRFESAQEKLLETLYGTKKSCVPRWQTCISNTDDALGFALGSLFVKATFDRQSKEIAEGMISEIRTAFEEALGQLVWMDEKTRQAAKEKADAIYDMIGFPDFILEPKELDDVYDGYEISEDSFFQNMLNLYNFSAKVMADQLRKPPSRDQWSMTPQTVNAYYLPTKNEIVFPAGILQAPFYARNHPKALNFGGIGVVMGHELTHAFDDQGREYDKEGNLRPWWQNESLAAFRNHTACMEEQYNQYQVNGERLNGRQTLGENIADNGGLKAAYNAYKAWLRKHGEEQQLPAVGLTNHQLFFVGFAQVWCSVRTPESSHEGLVTDPHSPARFRVLGTLSNSRDFLRHFGCPVGSPMNPGQLCEVW

SEQ ID NO: 872751 - protein, 256 aa, Homo sapiens
MNVALQELGAGSNVGFQKGTRQLLGSRTQLELVLAGASLLLAALLLGCLVALGVQYHRDPSHSTCLTEACIRVAGKILESLDRGVSPCEDFYQFSCGGWIRRNPLPDGRSRWNTFNSLWDQNQAILKHLLENTTFNSSSEAEQKTQRFYLSCLQVERIEELGAQPLRDLIEKIGGWNITGPWDQDNFMEVLKAVAGTYRATPFFTVYISADSKSSNSNVIQVDQSGLFLPSRDYYLNRTANEKVRNIFRTPIPTPG

SEQ ID NO: 872752 - protein, 765 aa, Homo sapiens
MNVALQELGAGSNMVEYKRATLRDEDAPETPVEGGASPDAMEVGFQKGTRQLLGSRTQLELVLAGASLLLAALLLGCLVALGVQYHRDPSHSTCLTEACIRVAGKILESLDRGVSPCEDFYQFSCGGWIRRNPLPDGRSRWNTFNSLWDQNQAILKHLLENTTFNSSSEAEQKTQRFYLSCLQVERIEELGAQPLRDLIEKIGGWNITGPWDQDNFMEVLKAVAGTYRATPFFTVYISADSKSSNSNVIQVDQSGLFLPSRDYYLNRTANEKVLTAYLDYMEELGMLLGGRPTSTREQMQQVLELEIQLANITVPQDQRRDEEKIYHKMSISELQALAPSMDWLEFLSFLLSPLELSDSEPVVVYGMDYLQQVSELINRTEPSILNNYLIWNLVQKTTSSLDRRFESAQEKLLETLYGTKKSCVPRWQTCISNTDDALGFALGSLFVKATFDRQSKEIAEGMISEIRTAFEEALGQLVWMDEKTRQAAKEKADAIYDMIGFPDFILEPKELDDVYDGYEISEDSFFQNMLNLYNFSAKVMADQLRKPPSRDQWSMTPQTVNAYYLPTKNEIVFPAGILQAPFYARNHPKALNFGGIGVVMGHELTHAFDDQGREYDKEGNLRPWWQNESLAAFRNHTACMEEQYNQYQVNGERLNGRQTLGENIADNGGLKAAYNAYKAWLRKHGEEQQLPAVGLTNHQLFFVGFAQVWCSVRTPESSHEGLVTDPHSPARFRVLGTLSNSRDFLRHFGCPVGSPMNPGQLCEVW

SEQ ID NO: 872753 - protein, 485 aa, Homo sapiens
MEELGMLLGGRPTSTREQMQQVLELEIQLANITVPQDQRRDEEKIYHKMSISELQALAPSMDWLEFLSFLLSPLELSDSEPVVVYGMDYLQQVSELINRTEPSILNNYLIWNLVQKTTSSLDRRFESAQEKLLETLYGTKKSCVPRWQTCISNTDDALGFALGSLFVKATFDRQSKEIAEGMISEIRTAFEEALGQLVWMDEKTRQAAKEKADAIYDMIGFPDFILEPKELDDVYDGYEISEDSFFQNMLNLYNFSAKVMADQLRKPPSRDQWSMTPQTVNAYYLPTKNEIVFPAGILQAPFYARNHPKALNFGGIGVVMGHELTHAFDDQGREYDKEGNLRPWWQNESLAAFRNHTACMEEQYNQYQVNGERLNGRQTLGENIADNGGLKAAYNAYKAWLRKHGEEQQLPAVGLTNHQLFFVGFAQVWCSVRTPESSHEGLVTDPHSPARFRVLGTLSNSRDFLRHFGCPVGSPMNPGQLCEVW

SEQ ID NO: 872754 - protein, 150 aa, Homo sapiens
MSGWIATSKTRMQDFWSLLTFSSDLVDVKDSGDYPLTAPGLSWKKFQGSFCEFVGTLVCRCQYILLHDDFPMDNLISLLTGFSDSQVCAFCHTSTLAAMKLMTSLVRVALQLSLHEDINQRQYEAERNKGPGQRAPERLESLLEKHKELH

SEQ ID NO: 872755 - protein, 141 aa, Homo sapiens
MFKKMSNSEIIQHLTEQFNEDSGDYPLTAPGLSWKKFQGSFCEFVGTLVCRCQYILLHDDFPMDNLISLLTGFSDSQVCAFCHTSTLAAMKLMTSLVRVALQLSLHEDINQRQYEAERNKGPGQRAPERLESLLEKHKELH

SEQ ID NO: 872756 - protein, 150 aa, Homo sapiens; identical to SEQ ID NO: 872754

SEQ ID NO: 872757 - protein, 150 aa, Homo sapiens; identical to SEQ ID NO: 872754

SEQ ID NO: 872758 - protein, 310 aa, Homo sapiens
MGNQVEKLTHLSYKEVPTADPTGVDRDDGPRIGVSYIFSNDDEDVEPQPPPQGPDGGGLPDGGDGPPPPQPQPYDPRLHEVECSVFYRDECIYQKSFAPGSAALSTYTPENLLNKCKPGDLVEFVSQAQYPHWAVYVGNFQVVHLHRLEVINSFLTDASQGRRGRVVNDLYRYKPLSSSAVVRNALAHVGAKERELSWRNSESFAAWCRYGKREFKIGGELRIGKQPYRLQIQLSAQRSHTLEFQSLEDLIMEKRRNDQIGRAAVLQELATHLHPAEPEEGDSNVARTTPPPGRPPAPSSEEEDGEAVAH

SEQ ID NO: 872759 - protein, 310 aa, Homo sapiens; identical to SEQ ID NO: 872758

SEQ ID NO: 872760 - protein, 310 aa, Homo sapiens; identical to SEQ ID NO: 872758

SEQ ID NO: 872761 - protein, 78 aa, Homo sapiens
RGVSACLFKCHGLRSRPGARSRIYNPVPPAPVLVARPAQAGAVAARLRGCRPLLLAPHLPRELAEEGQQPQLAGGSAV

SEQ ID NO: 872762 - protein, 310 aa, Homo sapiens; identical to SEQ ID NO: 872758

SEQ ID NO: 872763 - protein, 105 aa, Homo sapiens
GLPDGGDGPPPPQPQPYDPRLHEVECSVFYRDECIYQKSFAPGSAALSTYTPENLLNKCKPGDLVEFVSQAQYPHWAVYVGNFQVVHLHRLEVINSFLTDASQGR

SEQ ID NO: 872764 - protein, 310 aa, Homo sapiens; identical to SEQ ID NO: 872758

SEQ ID NO: 872765 - protein, 292 aa, Homo sapiens
MGNQVEKLTHLSYKEVPTADPTGVDRDDGPRIGVSYIFSNDDEDVEPQPPPQPQPYDPRLHEVECSVFYRDECIYQKSFAPGSAALSTYTPENLLNKCKPGDLVEFVSQAQYPHWAVYVGNFQVVHLHRLEVINSFLTDASQGRRGRVVNDLYRYKPLSSSAVVRNALAHVGAKERELSWRNSESFAAWCRYGKREFKIGGELRIGKQPYRLQIQLSAQRSHTLEFQSLEDLIMEKRRNDQIGRAAVLQELATHLHPAEPEEGDSNVARTTPPPGRPPAPSSEEEDGEAVAH

SEQ ID NO: 872766 - protein, 102 aa, Homo sapiens
YNILSSTRNHGKLSEACADSVSPVKRLADSVNYCVWNTSRIKRHAGTDERIASRCLRINPKWTFHGRVDYDMRLMIRYNRRYRVDSMSQGKNYEIGDCPALG

SEQ ID NO: 872767 - protein, 310 aa, Homo sapiens; identical to SEQ ID NO: 872758

SEQ ID NO: 872768 - protein, 778 aa, Homo sapiens
MDEMTAVVKIEKGVGGNNGGNGNGGGAFSQARSSSTGSSSSTGGGGQESQPSPLALLAATCSRIESPNENSNNSQGPSQSGGTGELDLTATQLSQGANGWQIISSSSGATPTSKEQSGSSTNGSNGSESSKNRTVSGGQYVVAAAPNLQNQQVLTGLPGVMPNIQYQVIPQFQTVDGQQLQFAATGAQVQQDGSGQIQIIPGANQQIITNRGSGGNIIAAMPNLLQQAVPLQGLANNVLSGQTQYVTNVPVALNGNITLLPVNSVSAATLTPSSQAVTISSSGSQESGSQPVTSGTTISSASLVSSQASSSSFFTNANSYSTTTTTSNMGIMNFTTSGSSGTNSQGQTPQRVSGLQGSDALNIQQNQTSGGSLQAGQQKEGEQNQQTQQQQILIQPQLVQGGQALQALQAAPLSGQTFTTQAISQETLQNLQLQAVPNSGPIIIRTPTVGPNGQVSWQTLQLQNLQVQNPQAQTITLAPMQGVSLGQTSSSNTTLTPIASAASIPAGTVTVNAAQLSSMPGLQTINLSALGTSGIQVHPIQGLPLAIANAPGDHGAQLGLHGAGGDGIHDDTAGGEEGENSPDAQPQAGRRTRREACTCPYCKDSEGRGSGDPGKKKQHICHIQGCGKVYGKTSHLRAHLRWHTGERPFMCTWSYCGKRFTRSDELQRHKRTHTGEKKFACPECPKRFMRSDHLSKHIKTHQNKKGGPGVALSVGTLPLDSGAGSEGSGTATPSALITTNMVAMEAICPEGIARLANSGINVMQVADLQSINISGNGF

SEQ ID NO: 872769 - protein, 795 aa, Homo sapiens
MCCVWYVCTEVSLISHSRVVIESDVDEIFGVGGNNGGNGNGGGAFSQARSSSTGSSSSTGGGGQESQPSPLALLAATCSRIESPNENSNNSQGPSQSGGTGELDLTATQLSQGANGWQIISSSSGATPTSKEQSGSSTNGSNGSESSKNRTVSGGQYVVAAAPNLQNQQVLTGLPGVMPNIQYQVIPQFQTVDGQQLQFAATGAQVQQDGSGQIQIIPGANQQIITNRGSGGNIIAAMPNLLQQAVPLQGLANNVLSGQTQYVTNVPVALNGNITLLPVNSVSAATLTPSSQAVTISSSGSQESGSQPVTSGTTISSASLVSSQASSSSFFTNANSYSTTTTTSNMGIMNFTTSGSSGTNSQGQTPQRVSGLQGSDALNIQQNQTSGGSLQAGQQKEGEQNQQTQQQQILIQPQLVQGGQALQALQAAPLSGQTFTTQAISQETLQNLQLQAVPNSGPIIIRTPTVGPNGQVSWQTLQLQNLQVQNPQAQTITLAPMQGVSLGQTSSSNTTLTPIASAASIPAGTVTVNAAQLSSMPGLQTINLSALGTSGIQVHPIQGLPLAIANAPGDHGAQLGLHGAGGDGIHDDTAGGEEGENSPDAQPQAGRRTRREACTCPYCKDSEGRGSGDPGKKKQHICHIQGCGKVYGKTSHLRAHLRWHTGERPFMCTWSYCGKRFTRSDELQRHKRTHTGEKKFACPECPKRFMRSDHLSKHIKTHQNKKGGPGVALSVGTLPLDSGAGSEGSGTATPSALITTNMVAMEAICPEGIARLANSGINVMQVADLQSINISGNGF

SEQ ID NO: 872770 - protein, 397 aa, Homo sapiens
MSDQDHSMDEMTAVVKIEKGVGGNNGGNGNGGGAFSQARSSSTGSSSSTGGGGQESQPSPLALLAATCSRIESPNENSNNSQGPSQSGGTGELDLTATQLSQGANGWQIISSSSGATPTSKEQSGSSTNGSNGSESSKNRTVSGGQYVVAAAPNLQNQQVLTGLPGVMPNIQYQVIPQFQTVDGQQLQFAATGAQVQQDGSGQIQIIPGANQQIITNRGSGGNIIAAMPNLLQQAVPLQGLANNVLSGQTQYVTNVPVALNGNITLLPVNSVSAATLTPSSQAVTISSSGSQESGSQPVTSGTTISSASLVSSQASSSSFFTNANSYSTTTTTSNMGIMNFTTSGSSGTNSQGQTPQRVSGLQGSDALNIQQNQTSGGSLQAGQQKEGEQRIPLTYI

SEQ ID NO: 872771 - protein, 785 aa, Homo sapiens
MSDQDHSMDEMTAVVKIEKGVGGNNGGNGNGGGAFSQARSSSTGSSSSTGGGGQESQPSPLALLAATCSRIESPNENSNNSQGPSQSGGTGELDLTATQLSQGANGWQIISSSSGATPTSKEQSGSSTNGSNGSESSKNRTVSGGQYVVAAAPNLQNQQVLTGLPGVMPNIQYQVIPQFQTVDGQQLQFAATGAQVQQDGSGQIQIIPGANQQIITNRGSGGNIIAAMPNLLQQAVPLQGLANNVLSGQTQYVTNVPVALNGNITLLPVNSVSAATLTPSSQAVTISSSGSQESGSQPVTSGTTISSASLVSSQASSSSFFTNANSYSTTTTTSNMGIMNFTTSGSSGTNSQGQTPQRVSGLQGSDALNIQQNQTSGGSLQAGQQKEGEQNQQTQQQQILIQPQLVQGGQALQALQAAPLSGQTFTTQAISQETLQNLQLQAVPNSGPIIIRTPTVGPNGQVSWQTLQLQNLQVQNPQAQTITLAPMQGVSLGQTSSSNTTLTPIASAASIPAGTVTVNAAQLSSMPGLQTINLSALGTSGIQVHPIQGLPLAIANAPGDHGAQLGLHGAGGDGIHDDTAGGEEGENSPDAQPQAGRRTRREACTCPYCKDSEGRGSGDPGKKKQHICHIQGCGKVYGKTSHLRAHLRWHTGERPFMCTWSYCGKRFTRSDELQRHKRTHTGEKKFACPECPKRFMRSDHLSKHIKTHQNKKGGPGVALSVGTLPLDSGAGSEGSGTATPSALITTNMVAMEAICPEGIARLANSGINVMQVADLQSINISGNGF

SEQ ID NO: 872772 - protein, 798 aa, Homo sapiens
SEGPARANRLPGPPSDQDHSMDEMTAVVKIEKGVGGNNGGNGNGGGAFSQARSSSTGSSSSTGGGGQESQPSPLALLAATCSRIESPNENSNNSQGPSQSGGTGELDLTATQLSQGANGWQIISSSSGATPTSKEQSGSSTNGSNGSESSKNRTVSGGQYVVAAAPNLQNQQVLTGLPGVMPNIQYQVIPQFQTVDGQQLQFAATGAQVQQDGSGQIQIIPGANQQIITNRGSGGNIIAAMPNLLQQAVPLQGLANNVLSGQTQYVTNVPVALNGNITLLPVNSVSAATLTPSSQAVTISSSGSQESGSQPVTSGTTISSASLVSSQASSSSFFTNANSYSTTTTTSNMGIMNFTTSGSSGTNSQGQTPQRVSGLQGSDALNIQQNQTSGGSLQAGQQKEGEQNQQTQQQQILIQPQLVQGGQALQALQAAPLSGQTFTTQAISQETLQNLQLQAVPNSGPIIIRTPTVGPNGQVSWQTLQLQNLQVQNPQAQTITLAPMQGVSLGQTSSSNTTLTPIASAASIPAGTVTVNAAQLSSMPGLQTINLSALGTSGIQVHPIQGLPLAIANAPGDHGAQLGLHGAGGDGIHDDTAGGEEGENSPDAQPQAGRRTRREACTCPYCKDSEGRGSGDPGKKKQHICHIQGCGKVYGKTSHLRAHLRWHTGERPFMCTWSYCGKRFTRSDELQRHKRTHTGEKKFACPECPKRFMRSDHLSKHIKTHQNKKGGPGVALSVGTLPLDSGAGSEGSGTATPSALITTNMVAMEAICPEGIARLANSGINVMQVADLQSINISGNGF

SEQ ID NO: 872773 - protein, 732 aa, Homo sapiens
MESQPSPLALLAATCSRIESPNENSNNSQGPSQSGGTGELDLTATQLSQGANGWQIISSSSGATPTSKEQSGSSTNGSNGSESSKNRTVSGGQYVVAAAPNLQNQQVLTGLPGVMPNIQYQVIPQFQTVDGQQLQFAATGAQVQQDGSGQIQIIPGANQQIITNRGSGGNIIAAMPNLLQQAVPLQGLANNVLSGQTQYVTNVPVALNGNITLLPVNSVSAATLTPSSQAVTISSSGSQESGSQPVTSGTTISSASLVSSQASSSSFFTNANSYSTTTTTSNMGIMNFTTSGSSGTNSQGQTPQRVSGLQGSDALNIQQNQTSGGSLQAGQQKEGEQNQQTQQQQILIQPQLVQGGQALQALQAAPLSGQTFTTQAISQETLQNLQLQAVPNSGPIIIRTPTVGPNGQVSWQTLQLQNLQVQNPQAQTITLAPMQGVSLGQTSSSNTTLTPIASAASIPAGTVTVNAAQLSSMPGLQTINLSALGTSGIQVHPIQGLPLAIANAPGDHGAQLGLHGAGGDGIHDDTAGGEEGENSPDAQPQAGRRTRREACTCPYCKDSEGRGSGDPGKKKQHICHIQGCGKVYGKTSHLRAHLRWHTGERPFMCTWSYCGKRFTRSDELQRHKRTHTGEKKFACPECPKRFMRSDHLSKHIKTHQNKKGGPGVALSVGTLPLDSGAGSEGSGTATPSALITTNMVAMEAICPEGIARLANSGINVMQVADLQSINISGNGF

SEQ ID NO: 872774 - protein, 498 aa, Homo sapiens
RVQGAQELGWLSPAHPAMRWLWPLAVSLAVILAVGLSRVSGGAPLHLGRHRAETQEQQSRSKRGTEDEEAKGVQQYVPEEWAEYPRPIHPAGLQPTKPLVATSPNPDKDGGTPDSGQELRGNLTGAPGQRLQIQNPLYPVTESSYSAYAIMLLALVVFAVGIVGNLSVMCIVWHSYYLKSAWNSILASLALWDFLVLFFCLPIVIFNEITKQRLLGDVSCRAVPFMEVSSLGVTTFSLCALGIDRFHVATSTLPKVRPIERCQSILAKLAVIWVGSMTLAVPELLLWQLAQEPAPTMGTLDSCIMKPSASLPESLYSLVMTYQNARMWWYFGCYFCLPILFTVTCQLVTWRVRGPPGRKSECRASKHEQCESQLNSTVVGLTVVYAFCTLPENVCNIVVAYLSTELTRQTLDLLGLINQFSTFFKGAITPVLLLCICRPLGQAFLDCCCCCCCEECGGASEASAANGSDNKLKTEVSSSIYFHKPRESPPLLPLGTPC

SEQ ID NO: 872775 - protein, 252 aa, Homo sapiens
GGSSRPAASLEPSSWAPCTHLLFLGWLSPAHPAMRWLWPLAVSLAVILAVGLSRVSGGAPLHLGRHRAETQEQQSRSKRGTEDEEAKGVQQYVPEEWAEYPRPIHPAGLQPTKPLVATSPNPDKDGGTPDSGQELRGNLTGAPGQRLQIQNPLYPVTESSYSAYAIMLLALVVFAVGIVGNLSVMCIVWHSYYLKSAWNSILASPSTLFSGPDLSQSWMPPPTGAFFSSRGFLSPSSSFLWDPWVALSQPPC

SEQ ID NO: 872776 - protein, 511 aa, Homo sapiens
LVLARNRWDSSWAPCTHLLFLGWLSPAHPAMRWLWPLAVSLAVILAVGLSRVSGGAPLHLGRHRAETQEQQSRSKRGTEDEEAKGVQQYVPEEWAEYPRPIHPAGLQPTKPLVATSPNPDKDGGTPDSGQELRGNLTGAPGQRLQIQNPLYPVTESSYSAYAIMLLALVVFAVGIVGNLSVMCIVWHSYYLKSAWNSILASLALWDFLVLFFCLPIVIFNEITKQRLLGDVSCRAVPFMEVSSLGVTTFSLCALGIDRFHVATSTLPKVRPIERCQSILAKLAVIWVGSMTLAVPELLLWQLAQEPAPTMGTLDSCIMKPSASLPESLYSLVMTYQNARMWWYFGCYFCLPILFTVTCQLVTWRVRGPPGRKSECRASKHEQCESQLNSTVVGLTVVYAFCTLPENVCNIVVAYLSTELTRQTLDLLGLINQFSTFFKGAITPVLLLCICRPLGQAFLDCCCCCCCEECGGASEASAANGSDNKLKTEVSSSIYFHKPRESPPLLPLGTPC

SEQ ID NO: 872777 - protein, 258 aa, Homo sapiens
ASVSRAEGPPPPAPSMLRRGYKASERRRHLSERLSWHQDQALSSSIYLLREMGPTGFLLREEEPEYMDFRVFLGNPHVCNCSTFPKGGELCKHICWVLLKKFKLPRNHESALQLGLGEREISDLLRGIHRVQTPQPGTNDENEHVEEDGYIKQKEIDSEDICSICQELLLEKKLPVTFCRFGCGNSIHIKCMKILANYQSTSNTSMLKCPLCRKEFAPLKLILEEFKNSSKLVAAAENRETGQTPRGFSVITCKQFPN

SEQ ID NO: 872778 - protein, 201 aa, Homo sapiens
MSRRIIVGTLQRTQRNMNSGISQVFQRELTCPICMNYFIDPVTIDCGHSFCRPCFYLNWQDIPILTQCFECIKTIQQRNLKTNIRLKKMASLARKASLWLFLSSEEQMCGIHRETKKMFCEVDRSLLCLLCSSSQEHRYHRHCPAEWAAEEHWEKLLKKMQSLWEKACENQRNLNVETTRISHWKALETYYTLLETYYTEE

SEQ ID NO: 872779 - protein, 204 aa, Homo sapiens
MSRRIIVGTLQRTQRNMNSGISQVFQRELTCPICMNYFIDPVTIDCGHSFCRPCFYLNWQDIPILTQCFECIKTIQQRNLKTNIRLKKMASLARKASLWLFLSSEEQMCGIHRETKKMFCEVDRSLLCLLCSSSQEHRYHRHCPAEWAAEEHWEKLLKKMQSLWEKACENQRNLNVETTRISHWKALETYYTGVSPCCCTCPSL

SEQ ID NO: 872780 - protein, 121 aa, Homo sapiens [sequence omitted]

SEQ ID NO: 872781 - protein, 107 aa, Homo sapiens
MLTPGAAQHGSSTIWGLCRFWRLCSGLGSVPCVFSMGEHWTRGSATPLLGCGLECIHFGPICPSTATAELRIPGVGKCSSVIGRARQCGTGYVVMRSTPPSPLNLIF

SEQ ID NO: 872782 - protein, 76 aa, Homo sapiens
GWVVRQVLWKESWALRREVQAWAWLDPLCDPRQATLPLRFSASTYQTGTQASSLLMVAIMRRVIHILLSPAFLQTR

SEQ ID NO: 872783 - protein, 183 aa, Homo sapiens
MRKSLHSSLGDRARLCLKKERNTLAAHSEGPEICVLLQQCLDGTDPGTLFLPASDHLGISSPLAISGTIFLAIFCFWDQPTPFLWLAPSCQPTMSSQIHQNYSTEGEATINRLVNLHLRASYICLCLGFYSHRDNVSLEGMGHFGELAEEKRQGTERFLKMQSQHGSCALFHDIQMPAQDEYG

SEQ ID NO: 872784 - protein, 731 aa, Homo sapiens
GGSSPCLRCNSCASSGAPAAGAGDNLSLLLRTSSPGGAFRTRTSSPLSGSSCCCCCCSSRRGSQLNVSELTPSSHASALRQQYAQQSAQQSASASQYHQCHSLQPAASPTGSLGSLGSAPPLSHHHHHPHPAHHQHHQPQARRESNPFTEIAMSSCRYNGGVMRPLSNLSASRRNLHEMDSEAQPLQPPASVGGGGGASSPSAAAAAAAAVSSSAPEIVVSKPEHNNSNNLALYGTGGGGSTGGGGGGGGSGHGSSSGTKSSKKKNQNIGYKLGHRRALFEKRKRLSDYALIFGMFGIVVMVIETELSWGAYDKASLYSLALKCLISLSTIILLGLIIVYHAREIQLFMVDNGADDWRIAMTYERIFFICLEILVCAIHPIPGNYTFTWTARLAFSYAPSTTTADVDIILSIPMFLRLYLIARVMLLHSKLFTDASSRSIGALNKINFNTRFVMKTLMTICPGTVLLVFSISLWIIAAWTVRACERYHDQQDVTSNFLGAMWLISITFLSIGYGDMVPNTYCGKGVCLLTGIMGAGCTALVVAVVARKLELTKAEKHVHNFMMDTQLTKRVKNAAANVLRETWLIYKNTKLVKKIDHAKVRKHQRKFLQAIHQLRSVKMEQRKLNDQANTLVDLAKTQNIMYDMISDLNERSEDFEKRIVTLETKLETLIGSIHALPGLISQTIRQQQRDFIEAQMESYDKHVTYNAERSRSSSRRRRSSSTAPPTSSESS

SEQ ID NO: 872785 - protein, 231 aa, Homo sapiens
MWLISITFLSIGYGDMVPNTYCGKGVCLLTGIMGAGCTALVVAVVARKLELTKAEKHVHNFMMDTQLTKRVKNAAANVLRETWLIYKNTKLVKKIDHAKVRKHQRKFLQAIHQLRSVKMEQRKLNDQANTLVDLAKTQNIMYDMISDLNERSEDFEKRIVTLETKLETLIGSIHALPGLISQTIRQQQRDFIEAQMESYDKHVTYNAERSRSSSRRRRSSSTAPPTSSESS

SEQ ID NO: 872786 - protein, 591 aa, Homo sapiens
GGSSPCLRCNSCASSGAPAAGAGDNLSLLLRTSSPGGAFRTRTSSPLSGSSCCCCCCSSRRGSQLNVSELTPSSHASALRQQYAQQSAQQSASASQYHQCHSLQPAASPTGSLGSLGSAPPLSHHHHHPHPAHHQHHQPQARRESNPFTEIAMSSCRYNGGVMRPLSNLSASRRNLHEMDSEAQPLQPPASVGGGGGASSPSAAAAAAAAVSSSAPEIVVSKPEHNNSNNLALYGTGGGGSTGGGGGGGGSGHGSSSGTKSSKKKNQNIGYKLGHRRALFEKRKRLSDYALIFGMFGIVVMVIETELSWGAYDKASLYSLALKCLISLSTIILLGLIIVYHARKYRYHDQQDVTSNFLGAMWLISITFLSIGYGDMVPNTYCGKGVCLLTGIMGAGCTALVVAVVARKLELTKAEKHVHNFMMDTQLTKRVKNAAANVLRETWLIYKNTKLVKKIDHAKVRKHQRKFLQAIHQLRSVKMEQRKLNDQANTLVDLAKTQNIMYDMISDLNERSEDFEKRIVTLETKLETLIGSIHALPGLISQTIRQQQRDFIEAQMESYDKHVTYNAERSRSSSRRRRSSSTAPPTSSESS

SEQ ID NO: 872787 - protein, 107 aa, Homo sapiens [sequence omitted]

SEQ ID NO: 872788 - protein, 346 aa, Homo sapiens
MALDVKSRAKRYEKLDFLGEGQFATVYKARDKNTNQIVAIKKIKLGHRSEAKDGINRTALREIKLLQELSHPNIIGLLDAFGHKSNISLVFDFMETDLEVIIKDNSLVLTPSHIKAYMLMTLQGLEYLHQHWILHRDLKPNNLLLDENGVLKLADFGLAKSFGSPNRAYTHQVVTRWYRAPELLFGARMYGVGVDMWAVGCILAELLLRVPFLPGDSDLDQLTRIFETLGTPTEEQWPDMCSLPDYVTFKSFPGIPLHHIFSAAGDDLLDLIQGLFLFNPCARITATQALKMKYFSNRPGPTPGCQLPRPNCPVETLKEQSNPALAIKRKRTEALEQGGLPKKLIF

SEQ ID NO: 872789 - protein, 375 aa, Homo sapiens
MALDVKSRAKRYEKLDFLGEGQFATVYKARDKNTNQIVAIKKESLLVATTAVNVLCHTRSQYVSEFHLRPMIKLGHRSEAKDGINRTALREIKLLQELSHPNIIGLLDAFGHKSNISLVFDFMETDLEVIIKDNSLVLTPSHIKAYMLMTLQGLEYLHQHWILHRDLKPNNLLLDENGVLKLADFGLAKSFGSPNRAYTHQVVTRWYRAPELLFGARMYGVGVDMWAVGCILAELLLRVPFLPGDSDLDQLTRIFETLGTPTEEQWPDMCSLPDYVTFKSFPGIPLHHIFSAAGDDLLDLIQGLFLFNPCARITATQALKMKYFSNRPGPTPGCQLPRPNCPVETLKEQSNPALAIKRKRTEALEQGGLPKKLIF

SEQ ID NO: 872790 - protein, 253 aa, Homo sapiens
METDLEVIIKDNSLVLTPSHIKAYMLMTLQGLEYLHQHWILHRDLKPNNLLLDENGVLKLADFGLAKSFGSPNRAYTHQVVTRWYRAPELLFGARMYGVGVDMWAVGCILAELLLRVPFLPGDSDLDQLTRIFETLGTPTEEQWPDMCSLPDYVTFKSFPGIPLHHIFSAAGDDLLDLIQGLFLFNPCARITATQALKMKYFSNRPGPTPGCQLPRPNCPVETLKEQSNPALAIKRKRTEALEQGGLPKKLIF

SEQ ID NO: 872791 - protein, 312 aa, Homo sapiens
MRSWTSLGRDSLPPFTRPEIRIPTKLSPLRKSNLDIDQKLKMLLDAFGHKSNISLVFDFMETDLEVIIKDNSLVLTPSHIKAYMLMTLQGLEYLHQHWILHRDLKPNNLLLDENGVLKLADFGLAKSFGSPNRAYTHQVVTRWYRAPELLFGARMYGVGVDMWAVGCILAELLLRVPFLPGDSDLDQLTRIFETLGTPTEEQWPDMCSLPDYVTFKSFPGIPLHHIFSAAGDDLLDLIQGLFLFNPCARITATQALKMKYFSNRPGPTPGCQLPRPNCPVETLKEQSNPALAIKRKRTEALEQGGLPKKLIF

SEQ ID NO: 872792 - protein, 158 aa, Homo sapiens [sequence omitted]

SEQ ID NO: 872793 - protein, 197 aa, Homo sapiens
MALDVKSRAKRYEKLDFLGEGQFATVYKARDKNTNQIVAIKKIKLGHRSEAKDGINRTALREIKLLQELSHPNIIGLLDAFGHKSNISLVFDFMETDLEVIIKDNSLVLTPSHIKAYMLMTLQGLEYLHQHWILHRDLKPNNLLLDENGVLKLADFGLAKSFGSPNRAYTHQVVTRWYRAPELLFGARNLSGSAGTE

SEQ ID NO: 872794 - protein, 137 aa, Homo sapiens
MALDVKSRAKRYEKLDFLGEGQFATVYKARDKNTNQIVAIKKIKLGHRSEAKDGINRTALREIKLLQELSHPNIIGLLDAFGHKSNISLVFDFMETDLEVIIKDNSLVLTPSHIKAYMLMTLQGLEYLHQHWILHRI

SEQ ID NO: 872795 - protein, 346 aa, Homo sapiens; identical to SEQ ID NO: 872788

SEQ ID NO: 872796 - protein, 346 aa, Homo sapiens; identical to SEQ ID NO: 872788

SEQ ID NO: 872797 - protein, 253 aa, Homo sapiens; identical to SEQ ID NO: 872790

SEQ ID NO: 872798 - protein, 229 aa, Homo sapiens
MLMTLQGLEYLHQHWILHRDLKPNNLLLDENGVLKLADFGLAKSFGSPNRAYTHQVVTRWYRAPELLFGARMYGVGVDMWAVGCILAELLLRVPFLPGDSDLDQLTRIFETLGTPTEEQWPDMCSLPDYVTFKSFPGIPLHHIFSAAGDDLLDLIQGLFLFNPCARITATQALKMKYFSNRPGPTPGCQLPRPNCPVETLKEQSNPALAIKRKRTEALEQGGLPKKLIF

SEQ ID NO: 872799 - protein, 307 aa, Homo sapiens
MALDVKSRAKRYEKLDFLGEGQFATVYKARDKNTNQIVAIKKIKLGHRSEAKDGINRTALREIKLLQELSHPNIIGLLDAFGHKSNISLVFDFMETDLEVIIKDNSLVLTPSHIKAYMLMTLQGLEYLHQHWILHRDLKPNNLLLDENGVLKLADFGLAKSFGSPNRAYTHQVVTRWYRAPELLFGARMYGVGVDMWAVGCILAELLLRSFWPEIELSVQILTWAPLGTWRHGVFRFVNLSSGTWAPSGGRSTQGVLIGRYARRRDFCRAVVVASRLAHRGKKSAASARGVPVRSVSALLFSFAFGV

SEQ ID NO: 872800 - protein, 103 aa, Homo sapiens
HLFIHLSFIHPPIIPSIPHSSIQPPTNPASTYPFIHSSVYPPTMYPSNLIQGATACGTMLSNVKTTINSSIIVPVPNGLPSTAVCTQGCGGNPGPQIRRNDPS

SEQ ID NO: 872801 - protein, 271 aa, Homo sapiens
SGGRRALRPPRRAAAVPAPAPQPEPAPCPGEVQRAGSEAGPGRAVSGVCKSRVSGMRIQDPGKVFFGNVDSSGIKHNIFNPPIIARYIRLHPTHYSIRSTLRMELMGCDLNSCSMPLGMESKAISDAQITASSYFTNMFATWSPSKARLHLQGRSNAWRPQVNNPKEWLQVDFQKTMKVTGVTTQGVKSLLTSMYVKEFLISSSQDGHQWTLFFQNGKVKVFQGNQDSFTPVVNSLDPPLLTRYLRIHPQSWVHQIALRMEVLGCEAQDLY

SEQ ID NO: 872802 - protein, 271 aa, Homo sapiens; identical to SEQ ID NO: 872801

SEQ ID NO: 872803 - protein, 272 aa, Homo sapiens
SGGRRALRPPRRAAAVPAPAPQPEPAPCPGEVQRAGSEAGPGRAVSGVCKSRVSGMRIQDPGKVFFGNVDSSGIKHNIFNPPIIARYIRLHPTHYSIRSTLRMELMGCDLNSCSMPLGMESKAISDAQITASSYFTNMFATWSPSKARLHLQGRSNAWRPQVNNPKEWLQVDFQKTMKVTGVTTQGVKSLLTSMYVKEFLISSSQDGHQWTSLPSNSPPELGAPDCPEDGGSGLRGTGPLLRVATAAPATAVTSPSSAPGQCPSLACLLPLC

SEQ ID NO: 872804 - protein, 150 aa, Homo sapiens
MSGCPFLGNNFGYTFKKLPVEGSEEDKSQTGVNRASKGGLIYGNYLHLEKVLNAQELQSETKGNKIHDEHLFIITHQAYELWFKQILWELDSVREIFQNGHVRDERNMLKVVSRMHRVSVILKLLVQQFSILETMTALDFNDFRCAHLAF

SEQ ID NO: 872805 - protein, 134 aa, Homo sapiens
RAEFGTSGTMLVQQFSILETMTALDFNDFREYLSPASGFQSLQFRLLENKIGVLQNMRVPYNRRHYRDNFKGEENELLLKSEQEKTLLELVEAWLERTPGLEPHGFNFWGKLEKNITRGLEEEFIRIQDLDDMS

SEQ ID NO: 872806 - protein, 406 aa, Homo sapiens
MSGCPFLGNNFGYTFKKLPVEGSEEDKSQTGVNRASKGGLIYGNYLHLEKVLNAQELQSETKGNKIHDEHLFIITHQAYELWFKQILWELDSVREIFQNGHVRDERNMLKVVSRMHRVSVILKLLVQQFSILETMTALDFNDFREYLSPASGFQSLQFRLLENKIGVLQNMRVPYNRRHYRDNFKGEENELLLKSEQEKTLLELVEAWLERTPGLEPHGFNFWGKLEKNITRGLEEEFIRIQAKEESEEKEEQVAEFQKQKEVLLSLFDEKRHEHLLSKGERRLSYRALQGALMIYFYREEPRFQVPFQLLTSLMDIDSLMTKWRYNHVCMVHRMLGSKAGTGGSSGYHYLRSTVSDRYKVFVDLFNLSTYLIPRHWIPKMNPTIHKFLYTAEYCDSSYFSSDESD

SEQ ID NO: 872807 - protein, 406 aa, Homo sapiens; identical to SEQ ID NO: 872806

SEQ ID NO: 872808 - protein, 356 aa, Homo sapiens
MSGCPFLGNNFGYTFKKLPVEGSEEDKSQTGVNRASKGGLIYGNYLHLEKVLNAQELQSETKGNKIHDEHLFIITHQAYELWFKQILWELDSVREIFQNGHVRDERNMLKVVSRMHRVSVILKLLVQQFSILETMTALDFNDFREYLSPASGFQSLQFRLLENKIGVLQNMRVPYNRRHYRDNFKGEENELLLKSEQEKTLLELVEAWLERTPGLEPHGFNFWGKLEKNITRGLEEEFIRIQAKEESEEKEEQVAEFQKQKEVLLSLFDEKRHEHLLSKGERRLSYRALQGALMIYFYREEPRFQVPFQLLTSLMDIDSLMTKWRYNHVCMVHRMLGSKAGTGGSSGYHYLRSTVR

SEQ ID NO: 872809 - protein, 299 aa, Homo sapiens
MLKVVSRMHRVSVILKLLVQQFSILETMTALDFNDFREYLSPASGFQSLQFRLLENKIGVLQNMRVPYNRRHYRDNFKGEENELLLKSEQEKTLLELVEAWLERTPGLEPHGFNFWGKLEKNITRGLEEEFIRIQAKEESEEKEEQVAEFQKQKEVLLSLFDEKRHEHLLSKGERRLSYRALQGALMIYFYREEPRFQVPFQLLTSLMDIDSLMTKWRYNHVCMVHRMLGSKAGTGGSSGYHYLRSTVSDRYKVFVDLFNLSTYLIPRHWIPKMNPTIHKFLYTAEYCDSSYFSSDESD

SEQ ID NO: 872810 - protein, 407 aa, Homo sapiens
DPPGCRFLGRYLGYTFKKLPVEGSEEDKSQTGVNRASKGGLIYGNYLHLEKVLNAQELQSETKGNKIHDEHLFIITHQAYELWFKQILWELDSVREIFQNGHVRDERNMLKVVSRMHRVSVILKLLVQQFSILETMTALDFNDFREYLSPASGFQSLQFRLLENKIGVLQNMRVPYNRRHYRDNFKGEENELLLKSEQEKTLLELVEAWLERTPGLEPHGFNFWGKLEKNITRGLEEEFIRIQAKEESEEKEEQVAEFQKQKEVLLSLFDEKRHEHLLSKGERRLSYRALQGALMIYFYREEPRFQVPFQLLTSLMDIDSLMTKWRYNHVCMVHRMLGSKAGTGGSSGYHYLRSTVSDRYKVFVDLFNLSTYLIPRHWIPKMNPTIHKFLYTAEYCDSSYFSSDESD

SEQ ID NO: 872811 - protein, 185 aa, Homo sapiens
MSGCPFLGNNFGYTFKKLPVEGSEEDKSQTGVNRASKGGLIYGNYLHLEKVLNAQELQSETKGNKIHDEHLFIITHQAYELWFKQILWELDSVREIFQNGHVRDERNMLKVVSRMHRVSVILKLLVQQFSILETMTALDFNDFREYLSPASGFQSLQFRLLIVITSKEKKMNCYLNLSRKRHFWN

SEQ ID NO: 872812 - protein, 406 aa, Homo sapiens; identical to SEQ ID NO: 872806

SEQ ID NO: 872813 - protein, 406 aa, Homo sapiens; identical to SEQ ID NO: 872806

SEQ ID NO: 872814 - protein, 388 aa, Homo sapiens
MSGCPFLGNNFGYTFKKLPVEGSEEDKSQTGVNRASKGGLIYGNYLHLEKVLNAQELQSETKGNKIHDEHLFIITHQAYELWFKQILWELDSVREIFQNGHVRDERNMLKVVSRMHRVSVILKLLVQQFSILETMTALDFNDFREYLSPASGFQSLQFRLLENKIGVLQNMRVPYNRRHYRDNFKGEENELLLKSEQEKTLLELVEAWLERTPGLEPHGFNFWGKLEKNITRGLEEEFIRIQAKEESEEKEEQVAEFQKQKGERRLSYRALQGALMIYFYREEPRFQVPFQLLTSLMDIDSLMTKWRYNHVCMVHRMLGSKAGTGGSSGYHYLRSTVSDRYKVFVDLFNLSTYLIPRHWIPKMNPTIHKFLYTAEYCDSSYFSSDESD

SEQ ID NO: 872815 - protein, 406 aa, Homo sapiens; identical to SEQ ID NO: 872806

SEQ ID NO: 872816 - protein, 299 aa, Homo sapiens; identical to SEQ ID NO: 872809

SEQ ID NO: 872817 - protein, 381 aa, Homo sapiens
MWPLIFLEKTQTYLSYFIKIRSDPTKEVTLKVTLKSLHNILNALNMIKIVNTTYELWFKQILWELDSVREIFQNGHVRDERNMLKVVSRMHRVSVILKLLVQQFSILETMTALDFNDFREYLSPASGFQSLQFRLLENKIGVLQNMRVPYNRRHYRDNFKGEENELLLKSEQEKTLLELVEAWLERTPGLEPHGFNFWGKLEKNITRGLEEEFIRIQAKEESEEKEEQVAEFQKQKEVLLSLFDEKRHEHLLSKGERRLSYRALQGALMIYFYREEPRFQVPFQLLTSLMDIDSLMTKWRYNHVCMVHRMLGSKAGTGGSSGYHYLRSTVSDRYKVFVDLFNLSTYLIPRHWIPKMNPTIHKFLYTAEYCDSSYFSSDESD

SEQ ID NO: 872818 - protein, 359 aa, Homo sapiens
MSKVFKKTSSNGKLSIYLGKRDFVDHVDTVEPIDGVVLVDPEYLKCRKLFVMLTCAFRYGRDDLEVIGLTFRKDLYVQTLQVVPAESSSPQGPLTVLQERLLHKLGDNAYPFTLQMVTNLPCSVTLQPGPEDAGKPCGIDFEVKSFCAENPEETVSKRDYVRLVVRKVQFAPPEAGPGPSAQTIRRFLLSAQPLQLQAWMDREVHYHGEPISVNVSINNCTNKVIKKIKISVDQITDVVLYSLDKYTKTVFIQEFTETVAANSSFSQSFAVTPILAASCQKRGLALDGKLKHEDTNLASSTIIRPGMDKELLGILVSYKVRVNLMVSCGGILGDLTASDVGVELPLVLIHPKPSHEAAR

SEQ ID NO: 872819 - protein, 423 aa, Homo sapiens
EPFFFPFSQKRLNINYIANMSKVFKKTSSNGKVREPGPAGQMRGQKGELSIYLGKRDFVDHVDTVEPIDGVVLVDPEYLKCRKLFVMLTCAFRYGRDDLEVIGLTFRKDLYVQTLQVVPAESSSPQGPLTVLQERLLHKLGDNAYPFTLQMVTNLPCSVTLQPGPEDAGKPCGIDFEVKSFCAENPEETVSKRDYVRLVVRKVQFAPPEAGPGPSAQTIRRFLLSAQPLQLQAWMDREVHYHGEPISVNVSINNCTNKVIKKIKISVDQITDVVLYSLDKYTKTVFIQEFTETVAANSSFSQSFAVTPILAASCQKRGLALDGKLKHEDTNLASSTIIRPGMDKELLGILVSYKVRVNLMVSCGGILGDLTASDVGVELPLVLIHPKPSHEAASSEDIVIEEFTRKGEEESQKAVEAEGDEGS

SEQ ID NO: 872820 - protein, 388 aa, Homo sapiens
MSKVFKKTSSNGKLSIYLGKRDFVDHVDTVEPIDGVVLVDPEYLKCRKLFVMLTCAFRYGRDDLEVIGLTFRKDLYVQTLQVVPAESSSPQGPLTVLQERLLHKLGDNAYPFTLQMVTNLPCSVTLQPGPEDAGKPCGIDFEVKSFCAENPEETVSKRDYVRLVVRKVQFAPPEAGPGPSAQTIRRFLLSAQPLQLQAWMDREVHYHGEPISVNVSINNCTNKVIKKIKISVDQITDVVLYSLDKYTKTVFIQEFTETVAANSSFSQSFAVTPILAASCQKRGLALDGKLKHEDTNLASSTIIRPGMDKELLGILVSYKVRVNLMVSCGGILGDLTASDVGVELPLVLIHPKPSHEAASSEDIVIEEFTRKGEEESQKAVEAEGDEGS

SEQ ID NO: 872821 - protein, 213 aa, Homo sapiens
MYTAIPQSGSPFPGSVQDPGLHVWRVEKLKPVPVAQENQGVFFSGDSYLVLHNGPEEVSHLHLWIGQQSSRDEQGACAVLAVHLNTLLGERPVQHREVQGNESDLFMSYFPRGLKYQEGGVESAFHKTSTGAPAAIKKLYQVKGKKNIRATERALNWDSFNTGDCFILDLGQNIFAWCGGKSNILGTQQRRGDLALAIRDSERQGKAQVEIGH

SEQ ID NO: 872822 - protein, 111 aa, Homo sapiens
PVQHREVQGNESDLFMSYFPRGLKYQEGGVESAFHKTSTVAQENQGVFFSGDSYLVLHNGPEEVSHLHLWIALQVAEGFISRMQYAPNTQVEILPQGRESPIFKQFFKDWK

SEQ ID NO: 872823 - protein, 213 aa, Homo sapiens; identical to SEQ ID NO: 872821

SEQ ID NO: 872824 - protein, 213 aa, Homo sapiens; identical to SEQ ID NO: 872821

SEQ ID NO: 872825 - protein, 213 aa, Homo sapiens; identical to SEQ ID NO: 872821

SEQ ID NO: 872826 - protein, 213 aa, Homo sapiens; identical to SEQ ID NO: 872821

SEQ ID NO: 872827 - protein, 213 aa, Homo sapiens; identical to SEQ ID NO: 872821

SEQ ID NO: 872828 - protein, 213 aa, Homo sapiens; identical to SEQ ID NO: 872821

SEQ ID NO: 872829 - protein, 213 aa, Homo sapiens; identical to SEQ ID NO: 872821

SEQ ID NO: 872830 - protein, 213 aa, Homo sapiens; identical to SEQ ID NO: 872821

SEQ ID NO: 872831 - protein, 368 aa, Homo sapiens
  misc_feature (81)..(81): Xaa can be any naturally occurring amino acid
SLLVSDSEMPSLICLGCDLQRAEATVVGLCGPPASLCAPLRRRPGIPTAHPSDCSSASGLLAPSTACPSLSGDIAFPNNPXPWAGKRARPPMWGVWGVLLGRGGESFGYGLGRQCHDETVHRTGTRVEREKRAPGGWGGKGWKEDEPTKQRSEDSMYTAIPQSGSPFPGSVQDPGLHVWRVEKLKPVPVAQENQGVFFSGDSYLVLHNGPEEVSHLHLWIGQQSSRDEQGACAVLAVHLNTLLGERPVQHREVQGNESDLFMSYFPRGLKYQEGGVESAFHKTSTGAPAAIKKLYQVKGKKNIRATERALNWDSFNTGDCFILDLGQNIFAWCGGKSNILGTQQRRGDLALAIRDSERQGKAQVEIGH

SEQ ID NO: 872832 - protein, 393 aa, Homo sapiens
SLLVSDSEMPSLICLGCDLQRAEATVVGLCGPPASLCAPLRRRPGIPTAHPSDCSSASGLLAPSTACPSLSGDIASTPAGEGAQEVGLVGGAGGWGSQRSKREVRSRVGQAGRKTNLRSRDLKTACTQPFPRGEAACPISFHNFPFFTSKGCPSPLLSSSPDCSRQACPGLCLGKWVQAAVNPLSSRSGSPFPGSVQDPGLHVWRVEKLKPVPVAQENQGVFFSGDSYLVLHNGPEEVSHLHLWIGQQSSRDEQGACAVLAVHLNTLLGERPVQHREVQGNESDLFMSYFPRGLKYQEGGVESAFHKTSTGAPAAIKKLYQVKGKKNIRATERALNWDSFNTGDCFILDLGQNIFAWCGGKSNILGTQQRRGDLALAIRDSERQGKAQVEIGH

SEQ ID NO: 872833 - protein, 291 aa, Homo sapiens
MPHLLSQLPLLYLQGLPLPTALLIPRLQSPGLPRAVLGQVGPGCCQPSLFSQWLSIPRLSAGSRPACVAGGEAEAGACGAREPGRLLLGGLLPSAAQWPRRGFPSAPVDRVRGSGWGKVGPRKGREGAGMDHKGLALPSPTVPGQQSSRDEQGACAVLAVHLNTLLGERPVQHREVQGNESDLFMSYFPRGLKYQEGGVESAFHKTSTGAPAAIKKLYQVKGKKNIRATERALNWDSFNTGDCFILDLGQNIFAWCGGKSNILGTQQRRGDLALAIRDSERQGKAQVEIGH

SEQ ID NO: 872834 - protein, 213 aa, Homo sapiens; identical to SEQ ID NO: 872821

SEQ ID NO: 872835 - protein, 130 aa, Homo sapiens
MIQVLGPQACSEGRATLRKTSQLNKANAQAAALYKVSDATGQMNLTKVADSSPFALELLISDDCFVLDNGLCGKIYIWKGRKANEKERQAALQVAEGFISRMQYAPNTQVEILPQGRESPIFKQFFKDWK

SEQ ID NO: 872836 - protein, 130 aa, Homo sapiens; identical to SEQ ID NO: 872835

SEQ ID NO: 872837 - protein, 205 aa, Homo sapiens
MYTAIPQSGSPFPGSVQDPGLHVWRVEKLKPVPVAQENQGVFFSGDSYLVLHNGPEEVSHLHLWIGQQSSRDEQGACAVLAVHLNTLLGERPVQHREVQGNESDLFMSYFPRGLKYQEGGVESAFHKTSTGAPAAIKKLYQVKGKKNIRATERALNWDSFNTGDCFILDLGQNIFAWCGGKSNILGTQQGPRWRFVTDGRGSLLR

SEQ ID NO: 872838 - protein, 183 aa, Homo sapiens
  misc_feature (81)..(81): Xaa can be any naturally occurring amino acid
SLLVSDSEMPSLICLGCDLQRAEATVVGLCGPPASLCAPLRRRPGIPTAHPSDCSSASGLLAPSTACPSLSGDIAFPNNPXPWAGKRARPPMWGVWGVLLGRGGESFGYGLGRQCHDETVHRTGTRVEREKRAPGGWGGKAGRKTNLRSRDLKTACTQPFPRVALHSQAQCRIQACMCGGWRS

SEQ ID NO: 872839 - protein, 159 aa, Homo sapiens
MYTAIPQSGSPFPGSVQDPGLHVWRVEKLKPVPVAQENQGVFFSGDSYLVLHNGPEEVSHLHLWIGQQSSRDEQGACAVLAVHLASLAAWSVQRCPLQMFNKGDKCFPSSFPAALFLHHLPWADSHCHPPIHLGSSPCWGWSSTQMTIGQPWRGQSCFA

SEQ ID NO: 872840 - protein, 226 aa, Homo sapiens
RKESRSVERSEDSMYTAIPQSGSPFPGSVQDPGLHVWRVEKLKPVPVAQENQGVFFSGDSYLVLHNGPEEVSHLHLWIGQQSSRDEQGACAVLAVHLNTLLGERPVQHREVQGNESDLFMSYFPRGLKYQEGGVESAFHKTSTGAPAAIKKLYQVKGKKNIRATERALNWDSFNTGDCFILDLGQNIFAWCGGKSNILGTQQRRGDLALAIRDSERQGKAQVEIGH

SEQ ID NO: 872841 - protein, 228 aa, Homo sapiens
LVPVPSRMDQRSEDSMYTAIPQSGSPFPGSVQDPGLHVWRVEKLKPVPVAQENQGVFFSGDSYLVLHNGPEEVSHLHLWIGQQSSRDEQGACAVLAVHLNTLLGERPVQHREVQGNESDLFMSYFPRGLKYQEGGVESAFHKTSTGAPAAIKKLYQVKGKKNIRATERALNWDSFNTGDCFILDLGQNIFAWCGGKSNILGTQQRRGDLALAIRDSERQGKAQVEIGH

SEQ ID NO: 872842 - protein, 240 aa, Homo sapiens
LVEAGVISDESGSPFPGSVQDPGLHVWRVEKLKPVPVAQENQGVFFSGDSYLVLHNGPEEVSHLHLWIGQQSSRDEQGACAVLAVHLNTLLGERPVQHREVQGNESDLFMSYFPRGLKYQVSELRQRRRLCAGTFTHCHQTTLPCRPAPDCCILDELYARRDTRDRPTQSAATRLRAPEPGSTRFNTVLDCIHPWTLGQNIFAWCGGKSNILGTQQRRGDLALAIRDSERQGKAQVEIGH

SEQ ID NO: 872843 - protein, 213 aa, Homo sapiens; identical to SEQ ID NO: 872821

SEQ ID NO: 872844 - protein, 213 aa, Homo sapiens; identical to SEQ ID NO: 872821

SEQ ID NO: 872845 - protein, 247 aa, Homo sapiens
LTGGGSWPRTSRGRGAAETAPRASEQGVGRSEDSMYTAIPQSGSPFPGSVQDPGLHVWRVEKLKPVPVAQENQGVFFSGDSYLVLHNGPEEVSHLHLWIGQQSSRDEQGACAVLAVHLNTLLGERPVQHREVQGNESDLFMSYFPRGLKYQEGGVESAFHKTSTGAPAAIKKLYQVKGKKNIRATERALNWDSFNTGDCFILDLGQNIFAWCGGKSNILGTQQRRGDLALAIRDSERQGKAQVEIGH

SEQ ID NO: 872846 - protein, 213 aa, Homo sapiens; identical to SEQ ID NO: 872821

SEQ ID NO: 872847 - protein, 226 aa, Homo sapiens; identical to SEQ ID NO: 872840

SEQ ID NO: 872848 - protein, 213 aa, Homo sapiens; identical to SEQ ID NO: 872821

SEQ ID NO: 872849 - protein, 130 aa, Homo sapiens; identical to SEQ ID NO: 872835

SEQ ID NO: 872850 - protein, 213 aa, Homo sapiens; identical to SEQ ID NO: 872821

SEQ ID NO: 872851 - protein, 384 aa, Homo sapiens
  misc_feature (81)..(81): Xaa can be any naturally occurring amino acid
SLLVSDSEMPSLICLGCDLQRAEATVVGLCGPPASLCAPLRRRPGIPTAHPSDCSSASGLLAPSTACPSLSGDIAFPNNPXPWAGKRARPPMWGVWGVLLGRGGESFGYGLGRQCHDETVHRTGTRVEREKRAPGGWGGKGWKEDEPTKQRSEDSMYTAIPQSGSPFPGSVQDPGLHVWRVEKLKPVPVAQENQGVFFSGDSYLVLHNGPEEVSHLHLWIGEGDLDGGRLGPGRGGRGLVWITRALPCPLPLVPGQQSSRDEQGACAVLAVHQSDLFMSYFPRGLKYQEGGVESAFHKTSTGAPAAIKKLYQVKGKKNIRATERALNWDSFNTGDCFILDLGQNIFAWCGGKSNILGTQQRRGDLALAIRDSERQGKAQVEIGH

SEQ ID NO: 872852 - protein, 130 aa, Homo sapiens; identical to SEQ ID NO: 872835

SEQ ID NO: 872853 - protein, 143 aa, Homo sapiens
RIFGSLYWGSSCLDIQVLGPQACSEGRATLRKTSQLNKANAQAAALYKVSDATGQMNLTKVADSSPFALELLISDDCFVLDNGLCGKIYIWKGRKANEKERQAALQVAEGFISRMQYAPNTQVEILPQGRESPIFKQFFKDWK

SEQ ID NO: 872854 - protein, 183 aa, Homo sapiens; identical to SEQ ID NO: 872838
  misc_feature (81)..(81): Xaa can be any naturally occurring amino acid

SEQ ID NO: 872855 - protein, 41 aa, Homo sapiens
MTLSEILDYRSVAEAPGPVWTFPSQEGLGSIPFVPVTLSIP

SEQ ID NO: 872856 - protein, 495 aa, Homo sapiens
MRAAAGTRRARLGRRRLLRSAAGVAAAAAPSSSFQREEEAEGGEAHRVRGGDRGGAPRAASLIAMDSAITLWQFLLQLLQKPQNKHMICWTSNDGQFKLLQAEEVARLWGIRKNKPNMNYDKLSRALRYYYVKNIIKKVNGQKFVYKFVSYPEILNMDPMTVGRIEGDCESLNFSEVSSSSKDVENGGKDKPPQPGAKTSSRNDYIHSGLYSSFTLNSLNSSNVKLFKLIKTENPAEKLAEKKSPQEPTPSVIKFVTTPSKKPPVEPVAATISIGPSISPSSEETIQALETLVSPKLPSLEAPTSASNVMTAFATTPPISSIPPLQEPPRTPSPPLSSHPDIDTDIDSVASQPMELPENLSLEPKDQDSVLLEKDKVNNSSRSKKPKGLELAPTLVITSSDPSPLGILSPSLPTASLTPAFFSQTPIILTPSPLLSSIHFWSTLSPVAPLSPARLQGANTLFQFPSVLNSHGPFTLSGLDGPSTPGPFSPDLQKT

SEQ ID NO: 872857 - protein, 526 aa, Homo sapiens
MRAAAGTRRARLGRRRLLRSAAGVAAAAAPSSSFQREEEAEGGEAHRGDCLCTTSFKVIIVRITGGHFECFRKVIETQLFSTTVSYLLPFLELIAMDSAITLWQFLLQLLQKPQNKHMICWTSNDGQFKLLQAEEVARLWGIRKNKPNMNYDKLSRALRYYYVKNIIKKVNGQKFVYKFVSYPEILNMDPMTVGRIEGDCESLNFSEVSSSSKDVENGGKDKPPQPGAKTSSRNDYIHSGLYSSFTLNSLNSSNVKLFKLIKTENPAEKLAEKKSPQEPTPSVIKFVTTPSKKPPVEPVAATISIGPSISPSSEETIQALETLVSPKLPSLEAPTSASNVMTAFATTPPISSIPPLQEPPRTPSPPLSSHPDIDTDIDSVASQPMELPENLSLEPKDQDSVLLEKDKVNNSSRSKKPKGLELAPTLVITSSDPSPLGILSPSLPTASLTPAFFSQTPIILTPSPLLSSIHFWSTLSPVAPLSPARLQGANTLFQFPSVLNSHGPFTLSGLDGPSTPGPFSPDLQKT

SEQ ID NO: 872858 - protein, 348 aa, Homo sapiens
MRAAAGTRRARLGRRRLLRSAAGVAAAAAPSSSFQREEEAEGGEAHRVRGGDRGGAPRAASLIAMDSAITLWQFLLQLLQKPQNKHMICWTSNDGQFKLLQAEEVARLWGIRKNKPNMNYDKLSRALRYYYVKNIIKKVNGQKFVYKFVSYPEILNMDPMTVGRIEGDCESLNFSEVSSSSKDVENGGKDKPPQPGAKTSSRNDYIHSGLYSSFTLNSLNSSNVKLFKLIKTENPAEKLAEKKSPQEPTPSVIKFVTTPSKKPPVEPVAATISIGPSISPSSEETIQALETLVSPKLPSLEAPTSASNVMTAFATTPPISSIPPLQEPPRTPSPPISSIPPLQEPATT

SEQ ID NO: 872859 - protein, 378 aa, Homo sapiens
MNYDKLSRALRYYYVKNIIKKVNGQKFVYKFVSYPEILNMDPMTVGRIEGDCESLNFSEVSSSSKDVENGGKDKPPQPGAKTSSRNDYIHSGLYSSFTLNSLNSSNVKLFKLIKTENPAEKLAEKKSPQEPTPSVIKFVTTPSKKPPVEPVAATISIGPSISPSSEETIQALETLVSPKLPSLEAPTSASNVMTAFATTPPISSIPPLQEPPRTPSPPLSSHPDIDTDIDSVASQPMELPENLSLEPKDQDSVLLEKDKVNNSSRSKKPKGLELAPTLVITSSDPSPLGILSPSLPTASLTPAFFSQTPIILTPSPLLSSIHFWSTLSPVAPLSPARLQGANTLFQFPSVLNSHGPFTLSGLDGPSTPGPFSPDLQKT

SEQ ID NO: 872860 - protein, 162 aa, Homo sapiens
GSRYKPRYGEPPRTPSPPLSSHPDIDTDIDSVASQPMELPENLSLEPKDQDSVLLEKDKVNNSSRSKKPKGLELAPTLVITSSDPSPLGILSPSLPTASLTPAFFSQTPIILTPSPLLSSIHFWSTLSPVAPLICQAGVQWCIQLTTASNSWARVILPPLPL

SEQ ID NO: 872861 - protein, 469 aa, Homo sapiens
MRAAAGTRRARLGRRRLLRSAAGVAAAAAPSSSFQREEEAEGGEAHRVRGGDRGGAPRAASLIAMDSAITLWQFLLQLLQKPQNKHMICWTSNDGQFKLLQAEEVARLWGIRKNKPNMNYDKLSRALRYYYVKNIIKKVNGQKFVYKFVSYPEILNMDPMTVGRIEGDCESLNFSEVSSSSKDVENGGKDKPPQPGAKTSSRNDYIHSGLYSSFTLNSLNSSNVKLFKLIKTENPAEKLAEKKSPQEPTPSVIKFVTTPSKKPPVEPVAATISIGPSISPSSEETIQALETLVSPKLPSLEAPTSASNVMTAFATTPPISSIPPLQEPPRTPSPPLSSHPDIDTDIDSVASQPMELPENLSLEPKDQDSVLLEKDKVNNSSRSKKPKGLELAPTLVITSSDPSPLGILSPSLPTASLTPAFFSQVACSLFMVSPLLSFICPFKQIQNLYTQVCFLLLRFVLERLCVTVM

SEQ ID NO: 872862 - protein, 74 aa, Homo sapiens
MPSILQGVPDRRSRAHRGTAAVNKRSCFHYTTKQTTPEGGAGSNCPKVSRFTSLPQLSRCVWARGSPLIAWVPF

SEQ ID NO: 872863 - protein, 152 aa, Homo sapiens
GGGGRGALVGAPRSARASCLRGRRPGRRQPCGRCPDPPRSGPGQAGRARCARDVAAQTALAPRALALGAGAAGPGWRGAVPRRPAARVSRAAQRQEQVSARPLAGPKPPTPPRPPVEPQSCPAKDDERQPGASLGLPRAAPSAGDRALRSRR

SEQ ID NO: 872864 - protein, 1106 aa, Homo sapiens
PEGAAAEHWLERREAPEPLAFAGGALAAGSLVAGAPIRRAPDPGRRGAPAARGMWQPRRPWPRVPWRWALALLALVGAGLCHAGPQPGYPARPSARNKNWCAYIVNKNVSCSVLEGSESFIQAQYNCAWNQMPCPSALVYRVNFRPRYVTRYKTVTQLEWRCCPGFRGGDCQEGPKDPVKTLRPTPARPRNSLKKATDNEPSQFSEPRKTLSPTGTAQPSWGVDPKEGPQELQEKKIQVLEEKVLRLTRTVLDLQSSLAGVSENLKHATQDDASRTRAPGLSSQHPKPDTTVSGDTETGQSPGVFNTKESGMKDIKSELAEVKDTLKNKSDKLEELDGKVKGYEGQLRQLQEAAQGPTVTMTTNELYQAYVDSKIDALREELMEGMDRKLADLKNSCEYKLTGLQQQCDDYGSSYLGVIELIGEKETSLRKEINNLRARLQEPSAQANCCDSEKNGDIGQQIKTLDQKIERVAEATRMLNGRLDNEFDRLIVPEPDVDFDAKWNELDARINVTEKNAEEHCFYIEETLRGAINGEVGDLKQLVDQKIQSLEDRLGSVLLQMTNNTGAELSPPGAAALPGVSGSGDERVMMELNHLKDKVQVVEDICLLNIQGKPHGMEGALPNREDRAVRDSLHLLKSLNDTMHRKFQETEQTIQKLQQDFSFLYSQLNHTENDVTHLQKEMSNCRAGENAGMGRFTKVGEQERTVDTLPSPQHPVAHCCSQLEERWQRLQSQVISELDACKECTQGVQREVSMVEGRVSHMEKTCSKLDSISGNLQRIKEGLNKHVSSLWNCVRQMNGTLRSHSRDISGLKNSVQQFYSHVFQISTDLQDLVKFQPSAKAPSPPPPAEAPKEPLQPEPAPPRPSGPATAEDPGRRPVLPQRPPEERPPQPPGSTGVIAETGQAGPPAGAGVSGRGLPRGVDGQTGSGTVPGAEGFAGAPGYPKSPPVASPGAPVPSLVSFSAGLTQKPFPSDGGVVLFNKVLVNDGDVYNPSTGVFTAPYDGRYLITATLTPERDAYVEAVLSVSNASVAQLHTAGYRREFLEYHRPPGALHTCGGPGAFHLIVHLKAGDAVNVVVTGGKLAHTDFDEMYSTFSGVFLYPFLSHL

SEQ ID NO: 872865 - protein, 1044 aa, Homo sapiens
  misc_feature (5)..(5): Xaa can be any naturally occurring amino acid
PCGRXPGGRERACRKVGGGVARHLGRDQRNESLEMLNWCAYIVNKNVSCSVLEGSESFIQAQYNCAWNQMPCPSALVYRVNFRPRYVTRYKTVTQLEWRCCPGFRGGDCQEGPKDPVKTLRPTPARPRNSLKKATDNEPSQFSEPRKTLSPTGTAQPSWGVDPKEGPQELQEKKIQVLEEKVLRLTRTVLDLQSSLAGVSENLKHATQDDASRTRAPGLSSQHPKPDTTVSGDTETGQSPGVFNTKESGMKDIKSELAEVKDTLKNKSDKLEELDGKVKGYEGQLRQLQEAAQGPTVTMTTNELYQAYVDSKIDALREELMEGMDRKLADLKNSCEYKLTGLQQQCDDYGSSYLGVIELIGEKETSLRKEINNLRARLQEPSAQANCCDSEKNGDIGQQIKTLDQKIERVAEATRMLNGRLDNEFDRLIVPEPDVDFDAKWNELDARINVTEKNAEEHCFYIEETLRGAINGEVGDLKQLVDQKIQSLEDRLGSVLLQMTNNTGAELSPPGAAALPGVSGSGDERVMMELNHLKDKVQVVEDICLLNIQGKPHGMEGALPNREDRAVRDSLHLLKSLNDTMHRKFQETEQTIQKLQQDFSFLYSQLNHTENDVTHLQKEMSNCRAGENAGMGRFTKVGEQERTVDTLPSPQHPVAHCCSQLEERWQRLQSQVISELDACKECTQGVQREVSMVEGRVSHMEKTCSKLDSISGNLQRIKEGLNKHVSSLWNCVRQMNGTLRSHSRDISGLKNSVQQFYSHVFQISTDLQDLVKFQPSAKAPSPPPPAEAPKEPLQPEPAPPRPSGPATAEDPGRRPVLPQRPPEERPPQPPGSTGVIAETGQAGPPAGAGVSGRGLPRGVDGQTGSGTVPGAEGFAGAPGYPKSPPVASPGAPVPSLVSFSAGLTQKPFPSDGGVVLFNKVLVNDGDVYNPSTGVFTAPYDGRYLITATLTPERDAYVEAVLSVSNASVAQLHTAGYRREFLEYHRPPGALHTCGGPGAFHLIVHLKAGDAVNVVVTGGKLAHTDFDEMYSTFSGVFLYPFLSHL

SEQ ID NO: 872866 - protein, 723 aa, Homo sapiens
LPSTSLPSQLKNSCEYKLTGLQQQCDDYGSSYLGVIELIGEKETSLRKEINNLRARLQEPSAQANCCDSEKNGDIGQQIKTLDQKIERVAEATRMLNGRLDNEFDRLIVPEPDVDFDAKWNELDARINVTEKNAEEHCFYIEETLRGAINGEVGDLKQLVDQKIQSLEDRLGSVLLQMTNNTGAELSPPGAAALPGVSGSGDERVMMELNHLKDKVQVVEDICLLNIQGKPHGMEGALPNREDRAVRDSLHLLKSLNDTMHRKFQETEQTIQKLQQDFSFLYSQLNHTENDVTHLQKEMSNCRAGENAGMGRFTKVGEQERTVDTLPSPQHPVAHCCSQLEERWQRLQSQVISELDACKECTQGVQREVSMVEGRVSHMEKTCSKLDSISGNLQRIKEGLNKHVSSLWNCVRQMNGTLRSHSRDISGLKNSVQQFYSHVFQISTDLQDLVKFQPSAKAPSPPPPAEAPKEPLQPEPAPPRPSGPATAEDPGRRPVLPQRPPEERPPQPPGSTGVIAETGQAGPPAGAGVSGRGLPRGVDGQTGSGTVPGAEGFAGAPGYPKSPPVASPGAPVPSLVSFSAGLTQKPFPSDGGVVLFNKVLVNDGDVYNPSTGVFTAPYDGRYLITATLTPERDAYVEAVLSVSNASVAQLHTAGYRREFLEYHRPPGALHTCGGPGAFHLIVHLKAGDAVNVVVTGGKLAHTDFDEMYSTFSGVFLYPFLSHL

SEQ ID NO: 872867 - protein, 475 aa, Homo sapiens
DSRVIPTLNDTMHRKFQETEQTIQKLQQDFSFLYSQLNHTENDVTHLQKEMSNCRAGENAGMGRFTKVGEQERTVDTLPSPQHPVAHCCSQLEERWQRLQSQVISELDACKECTQGVQREVSMVEGRVSHMEKTCSKLDSISGNLQRIKEGLNKHVSSLWNCVRQMNGTLRSHSRDISGLKNSVQQFYSHVFQISTDLQDLVKFQPSAKAPSPPPPAEAPKEPLQPEPAPPRPSGPATAEDPGRRPVLPQRPPEERPPQPPGSTGVIAETGQAGPPAGAGVSGRGLPRGVDGQTGSGTVPGAEGFAGAPGYPKSPPVASPGAPVPSLVSFSAGLTQKPFPSDGGVVLFNKVLVNDGDVYNPSTGVFTAPYDGRYLITATLTPERDAYVEAVLSVSNASVAQLHTAGYRREFLEYHRPPGALHTCGGPGAFHLIVHLKAGDAVNVVVTGGKLAHTDFDEMYSTFSGVFLYPFLSHL

SEQ ID NO: 872868 - protein, 334 aa, Homo sapiens
PEGAAAEHWLERREAPEPLAFAGGALAAGSLVAGAPIRRAPDPGRRGAPAARGMWQPRRPWPRVPWRWALALLALVGAGLCHAGPQPGYPARPSARNKNWCAYIVNKNVSAARARPAEAQRPRNRRGPWATARPAPAAPRGEAAPAARLHRGHRGDGPGRAPRRRRRHPGQSIPSFSAPGAPVPSLVSFSAGLTQKPFPSDGGVVLFNKVLVNDGDVYNPSTGVFTAPYDGRYLITATLTPERDAYVEAVLSVSNASVAQLHTAGYRREFLEYHRPPGALHTCGGPGAFHLIVHLKAGDAVNVVVTGGKLAHTDFDEMYSTFSGVFLYPFLSHL

SEQ ID NO: 872869 - protein, 1071 aa, Homo sapiens
QARALQRRTRAPSGVCSVKLPPPQRATGPPDPRSVWCRSPLSPGLIVLRVYPVPLSLSLLHPRNWCAYIVNKNVSCSVLEGSESFIQAQYNCAWNQMPCPSALVYRVNFRPRYVTRYKTVTQLEWRCCPGFRGGDCQEGPKDPVKTLRPTPARPRNSLKKATDNEPSQFSEPRKTLSPTGTAQPSWGVDPKEGPQELQEKKIQVLEEKVLRLTRTVLDLQSSLAGVSENLKHATQDDASRTRAPGLSSQHPKPDTTVSGDTETGQSPGVFNTKESGMKDIKSELAEVKDTLKNKSDKLEELDGKVKGYEGQLRQLQEAAQGPTVTMTTNELYQAYVDSKIDALREELMEGMDRKLADLKNSCEYKLTGLQQQCDDYGSSYLGVIELIGEKETSLRKEINNLRARLQEPSAQANCCDSEKNGDIGQQIKTLDQKIERVAEATRMLNGRLDNEFDRLIVPEPDVDFDAKWNELDARINVTEKNAEEHCFYIEETLRGAINGEVGDLKQLVDQKIQSLEDRLGSVLLQMTNNTGAELSPPGAAALPGVSGSGDERVMMELNHLKDKVQVVEDICLLNIQGKPHGMEGALPNREDRAVRDSLHLLKSLNDTMHRKFQETEQTIQKLQQDFSFLYSQLNHTENDVTHLQKEMSNCRAGENAGMGRFTKVGEQERTVDTLPSPQHPVAHCCSQLEERWQRLQSQVISELDACKECTQGVQREVSMVEGRVSHMEKTCSKLDSISGNLQRIKEGLNKHVSSLWNCVRQMNGTLRSHSRDISGLKNSVQQFYSHVFQISTDLQDLVKFQPSAKAPSPPPPAEAPKEPLQPEPAPPRPSGPATAEDPGRRPVLPQRPPEERPPQPPGSTGVIAETGQAGPPAGAGVSGRGLPRGVDGQTGSGTVPGAEGFAGAPGYPKSPPVASPGAPVPSLVSFSAGLTQKPFPSDGGVVLFNKVLVNDGDVYNPSTGVFTAPYDGRYLITATLTPERDAYVEAVLSVSNASVAQLHTAGYRREFLEYHRPPGALHTCGGPGAFHLIVHLKAGDAVNVVVTGGKLAHTDFDEMYSTFSGVFLYPFLSHL

SEQ ID NO: 872870 - protein, 762 aa, Homo sapiens
MSVWVLIPPAQGPTVTMTTNELYQAYVDSKIDALREELMEGMDRKLADLKNSCEYKLTGLQQQCDDYGSSYLGVIELIGEKETSLRKEINNLRARLQEPSAQANCCDSEKNGDIGQQIKTLDQKIERVAEATRMLNGRLDNEFDRLIVPEPDVDFDAKWNELDARINVTEKNAEEHCFYIEETLRGAINGEVGDLKQLVDQKIQSLEDRLGSVLLQMTNNTGAELSPPGAAALPGVSGSGDERVMMELNHLKDKVQVVEDICLLNIQGKPHGMEGALPNREDRAVRDSLHLLKSLNDTMHRKFQETEQTIQKLQQDFSFLYSQLNHTENDVTHLQKEMSNCRAGENAGMGRFTKVGEQERTVDTLPSPQHPVAHCCSQLEERWQRLQSQVISELDACKECTQGVQREVSMVEGRVSHMEKTCSKLDSISGNLQRIKEGLNKHVSSLWNCVRQMNGTLRSHSRDISGLKNSVQQFYSHVFQISTDLQDLVKFQPSAKAPSPPPPAEAPKEPLQPEPAPPRPSGPATAEDPGRRPVLPQRPPEERPPQPPGSTGVIAETGQAGPPAGAGVSGRGLPRGVDGQTGSGTVPGAEGFAGAPGYPKSPPVASPGAPVPSLVSFSAGLTQKPFPSDGGVVLFNKVLVNDGDVYNPSTGVFTAPYDGRYLITATLTPERDAYVEAVLSVSNASVAQLHTAGYRREFLEYHRPPGALHTCGGPGAFHLIVHLKAGDAVNVVVTGGKLAHTDFDEMYSTFSGVFLYPFLSHL

SEQ ID NO: 872871 - protein, 451 aa, Homo sapiens
ELPPLEVPSAGDVGAVAAALVEPEPSSRPPRSPGAPRQGPSAARGRGRGAPAGVWFRDGAGVGGLRSLSVTCDAPAVSACCEIEELLDAGAKSEAGLESAAVCAGEAGNAPAPGRGPRRRPGGPLRPRKMRADARVSRWPDVAGVAAESSRGPRSPGLMEGTLTGQSGLRFPNPVCFFLPDALAEAPSPPPPAEAPKEPLQPEPAPPRPSGPATAEDPGRRPVLPQRPPEERPPQPPGSTGVIAETGQAGPPAGAGVSGRGLPRGVDGQTGSGTVPGAEGFAGAPGYPKSPPVASPGAPVPSLVSFSAGLTQKPFPSDGGVVLFNKVLVNDGDVYNPSTGVFTAPYDGRYLITATLTPERDAYVEAVLSVSNASVAQLHTAGYRREFLEYHRPPGALHTCGGPGAFHLIVHLKAGDAVNVVVTGGKLAHTDFDEMYSTFSGVFLYPFLSHL

SEQ ID NO: 872872 - protein, 1106 aa, Homo sapiens; identical to SEQ ID NO: 872864

SEQ ID NO: 872873 - protein, 329 aa, Homo sapiens
MDGPVAEHAKQEPFHVVTPLLESWALSQVAGMPVFLKCENVQPSGSFKIRGIGHFCQEMAKKGCRHLVCSSGGNAGIAAAYAARKLGIPATIVLPESTSLQVVQRLQGEGAEVQLTGKVWDEANLRAQELAKRDGWENVPPFDHPLIWKGHASLVQELKAVLRTPPGALVLAVGGGGLLAGVVAGLLEVGWQHVPIIAMETHGAHCFNAAITAGKLVTLPDITSVAKSLGAKTVAARALECMQVCKIHSEVVEDTEAVSAVQQLLDDERMLVEPACGAALAAIYSGLLRRLQAEGCLPPSLTSVVVIVCGGNNINSRELQALKTHLGQV

SEQ ID NO: 872874 - protein, 275 aa, Homo sapiens
MPSRSPFTWSHLCWRAGRCPRWRACLSSSSVRMCSPAAPSRFGALGISARRWPRRDADTWCAPQVWDEANLRAQELAKRDGWENVPPFDHPLIWKGHASLVQELKAVLRTPPGALVLAVGGGGLLAGVVAGLLEVGWQHVPIIAMETHGAHCFNAAITAGKLVTLPDITSVAKSLGAKTVAARALECMQVCKIHSEVVEDTEAVSAVQQLLDDERMLVEPACGAALAAIYSGLLRRLQAEGCLPPSLTSVVVIVCGGNNINSRELQALKTHLGQV

SEQ ID NO: 872875 - protein, 329 aa, Homo sapiens; identical to SEQ ID NO: 872873

SEQ ID NO: 872876 - protein, 267 aa, Homo sapiens
MDGPVAEHAKQEPFHVVTPLLESWALSQVAGMPVFLKCENVQPSGSFKIRGIGHFCQEMAKKGCRHLVCSSGGNAGIAAAYAARKLGIPATIVLPESTSLQVVQRLQGEGAEVQLTGKVWDEANLRAQELAKRDGWENVPPFDHPLIWKGHASLVQELKAVLRTPPGALVLAVGGGGLLAGVVAGLLEVGWQHVPIIAMETHGAHCFNAAITAGKLVTLPDITSVAKSLGAKTVAARALECMQVCKIHSEVVEDTEAVSAVQQLLGE

SEQ ID NO: 872877 - protein, 329 aa, Homo sapiens; identical to SEQ ID NO: 872873

SEQ ID NO: 872878 - protein, 329 aa, Homo sapiens; identical to SEQ ID NO: 872873

SEQ ID NO: 872879 - protein, 79 aa, Homo sapiens
VLLPFPSSLHPPILADDERMLVEPACGAALAAIYSGLLRRLQAEGCLPPSLTSVVVIVCGGNNINSRELQALKTHLGQV

SEQ ID NO: 872880 - protein, 156 aa, Homo sapiens
MLSARDRRDRHPEEGVVAELQGFAVDKAFLTSHKGILLETELALTLIIFICFTASISAYMAAALLEFFITLAFLFLYATQYYQRFDRINWPCLDFLRCVSAIIIFLVVSFAAVTSRDGAAIAAFVFGIILVSIFAYDAFKIYRTEMAPGASQGDQQ

SEQ ID NO: 872881 - protein, 156 aa, Homo sapiens; identical to SEQ ID NO: 872880

SEQ ID NO: 872882 - protein, 125 aa, Homo sapiens
MLSARDRRDRHPEEGVVAELQGFAVDKAFLTSHKGILLETELALTLIIFICFTASISAYMAAALLEFFITLAFLFLYATQYYQRFDRINWPCLVFGIILVSIFAYDAFKIYRTEMAPGASQGDQQ

SEQ ID NO: 872883 - protein, 102 aa, Homo sapiens
CIFLSSPSFFPFPHHSWALSHAMPCTQRCALTHTDFTAAGPRAIRRTTSARSTLPLSKGPAPALAWLDPPGLAYSSRCPLGSSPSAWLLVLVALVHLLPLPG

SEQ ID NO: 872884 - protein, 129 aa, Homo sapiens
MLSARDRRDRHPEEGVVAELQGFAVDKAFLTSHKGILLETELVTAASQPGASISLTPGSWPALCQPPAHPSVASFPKPSGHLSCPQLPLLRLLLCLLAASPPGDIYSRFQLQQEGLQLDRVTFWDIEEA

SEQ ID NO: 872885 - protein, 129 aa, Homo sapiens; identical to SEQ ID NO: 872884

SEQ ID NO: 872886 - protein, 241 aa, Homo sapiens
MMDLFETGSYFFYLDGENVTLQPLEVAEGSPLYPGSDGTLSPCQDQMPPEAGSDSSGEEHVLAPPGLQPPHCPGQCLIWACKTCKRKSAPTDRRKAATLRERRRLKKINEAFEALKRRTVANPNQRLPKVEILRSAISYIERLQDLLHRLDQQEKMQELGVDPFSYRPKQENLEGADFLRTCSSQWPSVSDHSRGLVITAKEGGASIDSSASSSLRCLSSIVDSISSEERKLPCVEEVVEK

SEQ ID NO: 872887 - protein, 125 aa, Homo sapiens
APTAPDGPSLDESGSSSEAELETLNDEPPVLLGAGSGPHEGPRLGAAVLLPRLSLETRLQQEGDPGLRGSLRELWEPEDEDEAVLERDLELSLRPGLEAPPFPGAKGRSLGDGLEDMEDLARLRL

SEQ ID NO: 872888 - protein, 195 aa, Homo sapiens
MGFFNYLTYFLAAGAVTLGIGFFALASALWFLICKRREIFQNSKFKAIDERCRQRPSMAKIKSHSQCVFISRNFHTGRFQLQEEQRKKEAAHIKAIKDHSKDEPQLATKNIICDPSETSSTTNRSSVTLSLSTLPSDSYYSQSIEAADDWFSDDSLVKRNSPMPSLGEPLMEKVFSYLSTISLEEGTESVLNDTL

SEQ ID NO: 872889 - protein, 48 aa, Homo sapiens
MRTGAELCLTTKNPLGHKGGGAEHVLGTQLYSHYKDYSSRCHGGSCLR

SEQ ID NO: 872890 - protein, 261 aa, Homo sapiens
MIETYNQTSPRSAATGLPISMKIFMYLLTVFLITQMIGSALFAVYLHRRLDKIEDERNLHEDFVFMKTIQRCNTGERSLSLLNCEEIKSQFEGFVKDIMLNKEETKKENSFEMQKGDQNPQIAAHVISEASSKTTSVLQWAEKGYYTMSNNLVTLENGKQLTVKRQGLYYIYAQVTFCSNREASSQAPFIASLCLKSPGRFERILLRAANTHSSAKPCGQQSIHLGGVFELQPGASVFVNVTDPSQVSHGTGFTSFGLLKL

SEQ ID NO: 872891 - protein, 799 aa, Homo sapiens
MSKKGRNKGEKPEALIVALQAANEDLRTKLTDIQIELHQEKSKVSKLEREKTQEAKRIRELEQRKHTVLVTELKAKLHEEKMKELQAVRENLIKQHEQEMSRTVKVRDGEIQRLKSALCALRDGSSDKVRTALTIEAREEARKLFDTERLKLLQEIADLKTAKKQVDEALSNMIQADKIKAGDLRSEHQSHQEAISKIKWESERDIRRLMDEIKAKDRIIFSLEKELETQTGYVQKLQLQKEALDEQLFLVKEAECNMSSPKREIPGRAGDGSEHCSSPDLRRNQKRIAELNATIRKLEDRNTLLGDERNELLKRVRETEKQCKPLLERNKCLAKRNDELMVSLQRMEEKLKAVTKENSEMREKITSHPPLKKLKSLNDLDQANEEQETEFLKLQVIEQQNIIDELTRDREKLIRRRKHRRSSKPIKRPVLDPFIGYDEDSMDSETSSMASFRTDRTPATPDDDLDESLAAEESELRFRQLTKEYQALQRAYALLQEQTGGIIDAEREAKAQEQLQAEVLRYKAKIEDLEATLAQKGQIEKQEAENHRLQQELQDARDQNELLEFRNLELEERERRSPPFNLQIHPFSDGVSALQIYCMKEGVKDVNIPDLIKQLDILGDNGNLRNEEQVAIIQASTVLSLAEKWIQQIEGAEAALHQKMMELESDMEQFCKIKGYLEEELDYRKQALDQAYMRIQELEATLYNALQQETVIKFGELLSEKQQEELRTAVEKLRRQMLRKSREYDCQILQERMELLQQAHQRIRDLEDKTDIQKRQIKDLEEKFLFLFLFFSLAFILWP

SEQ ID NO: 872892 - protein, 780 aa, Homo sapiens
MSKKGRNKGEKPEALIVALQAANEDLRTKLTDIQIELHQEKSKVSKLEREKTQEAKRIRELEQRKHTVLVTELKAKLHEEKMKELQAVRENLIKQHEQEMSRTVKVRDGEIQRLKSALCALRDGSSDKVRTALTIEAREEARKLFDTERLKLLQEIADLKTAKKQVDEALSNMIQADKIKAGDLRSEHQSHQEAISKIKWESERDIRRLMDEIKAKDRIIFSLEKELETQTGYVQKLQLQKEALDEQLFLVKEAECNMSSPKREIPGRAGDGSEHCSSPDLRRNQKRIAELNATIRKLEDRNTLLGDERNELLKRVRETEKQCKPLLERNKCLAKRNDELMVSLQRMEEKLKAVTKENSEMREKITSHPPLKKLKSLNDLDQANEEQETEFLKLQVIEQQNIIDELTRDREKLIRRRKHRRSSKPIKSLAAEESELRFRQLTKEYQALQRAYALLQEQTGGIIDAEREAKAQEQLQAEVLRYKAKIEDLEATLAQKGQDSHWVEDKQLFIKRNQELLEKIEKQEAENHRLQQELQDARDQNELLEFRNLELEERERRSPPFNLQIHPFSDGVSALQIYCMKEGVKDVNIPDLIKQLDILGDNGNLRNEEQVAIIQASTVLSLAEKWIQQIEGAEAALHQKMMELESDMEQFCKIKGYLEEELDYRKQALDQAYMRIQELEATLYNALQQETVIKFGELLSEKQQEELRTAVEKLRRQMLRKSREYDCQILQERMELLQQAHQRIRDLEDKTDIQKRQIKDLEEKFLFLFLFFSLAFILWP

SEQ ID NO: 872893 - protein, 687 aa, Homo sapiens
MVSKLEREKTQEAKRIRELEQRKHTVLVTELKAKLHEEKMKELQAVRENLIKQHEQEMSRTVKVRDGEIQRLKSALCALRDGSSDKVRTALTIEAREEARKLFDTERLKLLQEIADLKTAKKQVDEALSNMIQADKIKAGDLRSEHQSHQEAISKIKWESERDIRRLDLRRNQKRIAELNATIRKLEDRNTLLGDERNELLKRVRETEKQCKPLLERNKCLAKRNDELMVSLQRMEEKLKAVTKENSEMREKITSHPPLKKLKSLNDLDQANEEQETEFLKLQVIEQQNIIDELTRDREKLIRRRKHRRSSKPIKRPVLDPFIGYDEDSMDSETSSMASFRTDRTPATPDDDLDESLAAEESELRFRQLTKEYQALQRAYALLQEQTGGIIDAEREAKAQEQLQAEVLRYKAKIEDLEATLAQKGQIEKQEAENHRLQQELQDARDQNELLEFRNLELEERERRSPPFNLQIHPFSDGVSALQIYCMKEGVKDVNIPDLIKQLDILGDNGNLRNEEQVAIIQASTVLSLAEKWIQQIEGAEAALHQKMMELESDMEQFCKIKGYLEEELDYRKQALDQAYMRIQELEATLYNALQQETVIKFGELLSEKQQEELRTAVEKLRRQMLRKSREYDCQILQERMELLQQAHQRIRDLEDKTDIQKRQIKDLEEKFLFLFLFFSLAFILWP

SEQ ID NO: 872894 - protein, 349 aa, Homo sapiens
MSKKGRNKGEKPEALIVALQAANEDLRTKLTDIQIELHQEKSKVSKLEREKTQEAKRIRELEQRKHTVLVTELKAKLHEEKMKELQAVRENLIKQHEQEMSRTVKVRDGEIQRLKSALCALRDGSSDKVRTALTIEAREEARKLFDTERLKLLQEIADLKTAKKQVDEALSNMIQADKIKAGDLRSEHQSHQEAISKIKWESERDIRRLMDEIKAKDRIIFSLEKELETQTGYVQKLQLQKEALDEQLFLVKEAECNMSSPKREIPGRAGDGSEHCSSPDLRRNQKRIAELNATIRKLEDRNTLLGDERNELLKRVRETEKQCKPLLERNKCLAKRNDELMVSLQRMEE

SEQ ID NO: 872895 - protein, 113 aa, Homo sapiens
AGAAAASSKIELSWLLQLLTSSCISQPALPLLSSHHAISPRLLPLTWTGARWDITQSTTLVSQRVGEVTVFHSKPHLVLGTFHFQLFTGLLLWGQNSDFQENALHCKRIFQIT

SEQ ID NO: 872896 - protein, 176 aa, Homo sapiens
RGRRGPDTVTRRRGAGSSGRAWPCCPSAFRRRRRASGPSGLQGGRRVDGEPAPGGQIPSRDGAPGPRELRRDARAPVSHPVASPLRAALRAGWRDAVPHRRGKTAPPRPGRWNFPPAPPARRCPLAGERCRGPGEAAGPDLPAGLALPRRLRGSAAGSPSVPHSTPHTKNDDFIKM

SEQ ID NO: 872897 - protein, 198 aa, Homo sapiens
SSHSGPLSLDYSEPVSVCTPPLFSRSRSAFSSPRFSRLLGFGCVGGPSSPVAQTYQTRLGHRPASKSPPASHASPEPTVLPSVPPSPSGALLGARSIPCSCFTLSFSPRRDSLATSSTAVQLPQSGTHCYTQPHEPLQTSQVSSRALPDPAHIPSAGLCWSQKATAPAFHSARVQLQPPPPFLPFPVLGHVVATLCDF

SEQ ID NO: 872898 - protein, 198 aa, Homo sapiens; identical to SEQ ID NO: 872897

SEQ ID NO: 872899 - protein, 198 aa, Homo sapiens; identical to SEQ ID NO: 872897

SEQ ID NO: 872900 - protein, 133 aa, Homo sapiens
SSHSGPLSLDYSEPVSVCTPPLFSRSRSAFSSPRFSRLLGFGCVGGPSSPVAQTYQTRLGHRPASKSPPASHASPEPTVLPSVPPSPSGALLGARSIPCSCFTLSFSPRRDSLATSSTAVQLPQSGTHLEGAS

SEQ ID NO: 872901 - protein, 133 aa, Homo sapiens; identical to SEQ ID NO: 872900

SEQ ID NO: 872902 - protein, 198 aa, Homo sapiens; identical to SEQ ID NO: 872897

SEQ ID NO: 872903 - protein, 188 aa, Homo sapiens
SSHSGPLSLDYSEPVSVCTPPLFSRSRSAFSSPRFSRLLGFGCVGGPSSPVAQTYQTRLGHRPASKSPPASHASPEPTVLPSVPPSPSGALLGARSIPCSCFTLSFSPRRDSLATSSTAVQLPQSGTHCYTQPHEPLQTSQSRRSFLTGTRECMSVHLVAAGWGREQGPLTLCAGRDLPPAPQPASSP

SEQ ID NO: 872904 - protein, 188 aa, Homo sapiens; identical to SEQ ID NO: 872903

SEQ ID NO: 872905 - protein, 151 aa, Homo sapiens
MGEKAGIQAGVHTTEGEISILRGICKDLVTVKACLCTKKKKKKKEEGREREGKREGKREREKERKPARRKLSFFPINQLSGAQVAKLQGKWNSLCSLKGALGEVSVISQVVPSSRPRAPGLTLCRVGAESCSTSRQGPQGSNHAAPQQGEK

SEQ ID NO: 872906 - protein, 109 aa, Homo sapiens
SKSRSPHKGVKRGGSKRNYHVDQPQIKESWHEEEQEPISSQGSQERWQQKKIPQSQLPLPLVSPQRALPWCASHSTKQQQEQQKGNCQGDLMLDQSQRGAYGMWIKCQL

SEQ ID NO: 872907 - protein, 74 aa, Homo sapiens
ARADLLTRESREVAAKEITMSTSRKLKSHGMRRSKSRSPHKGVKRGGSKRKYRKGNLKSRKRGDDANRNYRSHL

SEQ ID NO: 872908 - protein, 128 aa, Homo sapiens
LTAKRFLDVVVTDKKLHFPECSEGSDRATQVMKGGTASWDPQFRLSTRQILRVAGRSYWGVVVETGFHHVGHAGLELQNSSDPSASVFQTAGITGVSHRAQPLGKFFLPSIIHCHHTFCLRVIYNKFN

SEQ ID NO: 872909 - protein, 336 aa, Homo sapiens
LIQEGLKSGFLYPLFEKQDKGSKPITLPLDACSLSELCEMAKHLPSLNEMEHQTLQLVEEDTSVTEQDLFLRVVENNSSFTKVITLMGQKYLLPPKSSFLLSDISCMQPLLNYRKTFDVIVIDPPWQNKSVKRSNRYSYLSPLQIQQIPIPKLAAPNCLLVTWVTNRQKHLRFIKEELYPSWSVEVVAEWHWVKITNSGEFVFPLDSPHKKPYEGLILGRVQEKTALPLRNADVNVLPIPDHKLIVSVPCTLHSHKPPLAEVLKDYIKPDGEYLELFARNLQPGWTSWGNEVLKFQHVDYFIALESGSWTMILIKVVVSSLSPHHFSLNSKSFYYF

SEQ ID NO: 872910 - protein, 164 aa, Homo sapiens
LIQEGLKSGFLYPLFEKQDKGSKPITLPLDACSLSELCEMAKHLPSLNEMEHQTLQLVEEDTSVTEQDLFLRVVENNSSFTKVITLMGQKYLLPPKSSFLLSDISCMQPLLNYRKTFDVIVIDPPWQNKSVKRSNRWSLTPLPGRDCATAVRSPAWATERDSVS

SEQ ID NO: 872911 - protein, 146 aa, Homo sapiens
SASVGRRRPWRRHVPCGGGREIAWTSGRPRTAMAFTLYSLLQAALLCVNAIAVLHEERFLKNIGWGTDQGIGGFGEEPGIKSQLMNLIRSVRTVMRVPLIIVNSIAMCVTFIIWMNISGENGDSEEDMPVEVITCGHYWNIYILAG

SEQ ID NO: 872912 - protein, 146 aa, Homo sapiens; identical to SEQ ID NO: 872911

SEQ ID NO: 872913 - protein, 146 aa, Homo sapiens; identical to SEQ ID NO: 872911

SEQ ID NO: 872914 - protein, 141 aa, Homo sapiens
GTHQLAPTVPCGGGREIAWTSGRPRTAMAFTLYSLLQAALLCVNAIAVLHEERFLKNIGWGTDQGIGGFGEEPGIKSQLMNLIRSVRTVMRVPLIIVNSIAMCVTFIIWMNISGENGDSEEDMPVEVITCGHYWNIYILAG

SEQ ID NO: 872915 - protein, 146 aa, Homo sapiens; identical to SEQ ID NO: 872911

SEQ ID NO: 872916 - protein, 146 aa, Homo sapiens; identical to SEQ ID NO: 872911

SEQ ID NO: 872917 - protein, 146 aa, Homo sapiens; identical to SEQ ID NO: 872911

SEQ ID NO: 872918 - protein, 146 aa, Homo sapiens; identical to SEQ ID NO: 872911

SEQ ID NO: 872919 - protein, 114 aa, Homo sapiens
MAFTLYSLLQAALLCVNAIAVLHEERFLKNIGWGTDQGIGGFGEEPGIKSQLMNLIRSVRTVMRVPLIIVNSIAMCVTFIIWMNISGENGDSEEDMPVEVITCGHYWNIYILAG

SEQ ID NO: 872920 - protein, 146 aa, Homo sapiens; identical to SEQ ID NO: 872911

SEQ ID NO: 872921 - protein, 146 aa, Homo sapiens; identical to SEQ ID NO: 872911

SEQ ID NO: 872922 - protein, 146 aa, Homo sapiens; identical to SEQ ID NO: 872911

SEQ ID NO: 872923 - protein, 146 aa, Homo sapiens; identical to SEQ ID NO: 872911

SEQ ID NO: 872924 - protein, 437 aa, Homo sapiens
IPAARMEGLAVRLLRGSRLLRRNFLTCLSSWKIPPHVSKSSQSEALLNITNNGIHFAPLQTFTDEEMMIKSSVKKFAQEQIAPLVSTMDENSKMEKSVIQGLFQQGLMGIEVDPEYGGTGASFLSTVLVIEELAKVDASVAVFCEIQNTLINTLIRKHGTEEQKATYLPQLTTEKVGSFCLSEAGAGSDSFALKTRADKEGDYYVLNGSKMWISSAEHAGLFLVMANVDPTIGYKGITSFLVDRDTPGLHIGKPENKLGLRASSTCPLTFENVKVPEANILGQIGHGYKYAIGSLNEGRIGIAAQMLGLAQGCFDYTIPYIKERIQFGKRLFDFQGLQHQVAHVATQLEAARLLTYNAARLLEAGKPFIKEASMAKYYASEIAGQTTSKCIEWMGGVGYTKDYPVEKYFRDAKIGTIYEGASNIQLNTIAKHIDAEY

SEQ ID NO: 872925 - protein, 437 aa, Homo sapiens; identical to SEQ ID NO: 872924

SEQ ID NO: 872926 - protein, 437 aa, Homo sapiens; identical to SEQ ID NO: 872924

SEQ ID NO: 872927 - protein, 419 aa, Homo sapiens
IPAARMEGLAVRLLRGSRLLRRNFLTCLSSWKIPPHVSKSSQSEALLNITNNGIHFAPLQTFTDEEMMIKSSVKKFAQEQIAPLVSTMDENSKMEKSVIQGLFQQGLMGIEVDPEYGGTGASFLSTVLVIEELAKVDASVAVFCEIQNTLINTLIRKHGTEEQKATYLPQLTTEKVGSFCLSEAGAGSDSFALKTRADKEGDYYVLNGSKMWISSAEHAGLFLVMANVDPTIGYKGITSFLVDRDTPGLHIGKPENKLGLRASSTCPLTFEYAIGSLNEGRIGIAAQMLGLAQGCFDYTIPYIKERIQFGKRLFDFQGLQHQVAHVATQLEAARLLTYNAARLLEAGKPFIKEASMAKYYASEIAGQTTSKCIEWMGGVGYTKDYPVEKYFRDAKIGTIYEGASNIQLNTIAKHIDAEY

SEQ ID NO: 872928 - protein, 437 aa, Homo sapiens; identical to SEQ ID NO: 872924

SEQ ID NO: 872929 - protein, 154 aa, Homo sapiens
MGPQKDTVGRHGQLLEELQGECTTGPQKDTAGKHGQPLGVLGGCGGNQQKTVGGSGQKGGAFLGSAVGPSCQPHIPPTPKARRDNRGGGGPLPENKGAQWSKATYADTGALLKSQAPALSSPCHCLHQAQLTHGLAPCTEGSTARGPDTLEAAL

SEQ ID NO: 872930 - protein, 402 aa, Homo sapiens
AAAHMMRKTSCLQYLDARNTPLLDHSAPFVARALRIRSSLAVLHLENASLSGRPLMLLATALKMNMNLRELYLADNKLNGLQDSAQLGNLLKFNCSLQILDLRNNHVLDSGLAYICEGLKEQRKGLVTLVLWNNQLTHTGMAFLGMTLPHTQSLETLNLGHNPIGNEGVRHLKNGLISNRSVLRLGLASTKLTCEGAVAVAEFIAESPRLLRLDLRENEIKTGGLMALSLALKVNHSLLRLDLDREPKKEAVKSFIETQKALLAEIQNGCKRNLVLAREREEKEQPPQLSASMPETTATEPQPDDEPAAGVQNGAPSPAPSPDSDSDSDSDGEEEEEEEGERDETPCPALVPPTDSLGPGDRSPPGSPLHTHRSSGFPCPSPGRGHKVFVVTRVESPPERAE

SEQ ID NO: 872931 - protein, 432 aa, Homo sapiens
AAAHMMRKTSCLQYLDARNTPLLDHSAPFVARALRIRSSLAVLHLENASLSGRPLMLLATALKMNMNLRELYLADNKLNGLQDSAQLGNLLKFNCSLQILDLRNNHVLDSGLAYICEGLKEQRKGLVTLVLWNNQLTHTGMAFLGMTLPHTQSLETLNLGHNPIGNEGVRHLKNGLISNRSVLRLGLASTKLTCEGAVAVAEFIAESPRLLRLDLRENEIKTGGLMALSLALKVNHSLLRLDLDREPKKEAVSRGRSCSPGAGGRPGGGAGLRALARRSRQQVKSFIETQKALLAEIQNGCKRNLVLAREREEKEQPPQLSASMPETTATEPQPDDEPAAGVQNGAPSPAPSPDSDSDSDSDGEEEEEEEGERDETPCPALVPPTDSLGPGDRSPPGSPSTPTEQRISVSSPGRGHKVFVVTRVESPPERAE

SEQ ID NO: 872932 - protein, 296 aa, Homo sapiens
PVIISGRAGPARQPREPANPVALLRGRVIGRTTKQKSLINSGRRGRRWRSRSKQGFGGITCTHSPAATGGGAQRVRRRDPPPGVQLRNMAQETNHSQVPMLCSTGCGFYGNPRTNGMCSVCYKEHLQRQNSSNGRISPPATSVSSLSESLPVQCTDGSVPEAQSALDSTSSSMQPSPVSNQSLLSESVASSQLDSTSVDKAVPETEDVQASVSDTAQQPSEEQSKSLEKPKQKKNRCFMCRKKVGLTGFECRCGNVYCGVHRYSDVHNCSYNYKADAAEKIRKENPVVVGEKIQKI

SEQ ID NO: 872933 - protein, 208 aa, Homo sapiens
MAQETNHSQVPMLCSTGCGFYGNPRTNGMCSVCYKEHLQRQNSSNGRISPPATSVSSLSESLPVQCTDGSVPEAQSALDSTSSSMQPSPVSNQSLLSESVASSQLDSTSVDKAVPETEDVQASVSDTAQQPSEEQSKSLEKPKQKKNRCFMCRKKVGLTGFECRCGNVYCGVHRYSDVHNCSYNYKADAAEKIRKENPVVVGEKIQKI

SEQ ID NO: 872934 - protein, 208 aa, Homo sapiens; identical to SEQ ID NO: 872933

SEQ ID NO: 872935 - protein, 102 aa, Homo sapiens
PVIISGRAGPARQPREPANPVASPPRSRHRPNNQTEKFNKQRTEGPAVAEPEQAGVRRHYLYPFTGGYRRRRAACQAERPAARNESEVCCSKTQKALKCFLA

SEQ ID NO: 872936 - protein, 296 aa, Homo sapiens; identical to SEQ ID NO: 872932

SEQ ID NO: 872937 - protein, 208 aa, Homo sapiens; identical to SEQ ID NO: 872933

SEQ ID NO: 872938 - protein, 208 aa, Homo sapiens; identical to SEQ ID NO: 872933

SEQ ID NO: 872939 - protein, 208 aa, Homo sapiens; identical to SEQ ID NO: 872933

SEQ ID NO: 872940 - protein, 208 aa, Homo sapiens; identical to SEQ ID NO: 872933

SEQ ID NO: 872941 - protein, 208 aa, Homo sapiens; identical to SEQ ID NO: 872933

SEQ ID NO: 872942 - protein, 223 aa, Homo sapiens
MLLLPNRDKGVQLRNMAQETNHSQVPMLCSTGCGFYGNPRTNGMCSVCYKEHLQRQNSSNGRISPPATSVSSLSESLPVQCTDGSVPEAQSALDSTSSSMQPSPVSNQSLLSESVASSQLDSTSVDKAVPETEDVQASVSDTAQQPSEEQSKSLEKPKQKKNRCFMCRKKVGLTGFECRCGNVYCGVHRYSDVHNCSYNYKADAAEKIRKENPVVVGEKIQKI

SEQ ID NO: 872943 - protein, 208 aa, Homo sapiens; identical to SEQ ID NO: 872933

SEQ ID NO: 872944 - protein, 180 aa, Homo sapiens [sequence omitted]

SEQ ID NO: 872945 - protein, 124 aa, Homo sapiens
MQPSPVSNQSLLSESVASSQLDSTSVDKAVPETEDVQASVSDTAQQPSEEQSKSLEKPKQKKNRCFMCRKKVGLTGFECRCGNVYCGVHRYSDVHNCSYNYKADAAEKIRKENPVVVGEKIQKI

SEQ ID NO: 872946 - protein, 296 aa, Homo sapiens; identical to SEQ ID NO: 872932

SEQ ID NO: 872947 - protein, 133 aa, Homo sapiens
LLLKSFGSMLSEIPVSNQSLLSESVASSQLDSTSVDKAVPETEDVQASVSDTAQQPSEEQSKSLEKPKQKKNRCFMCRKKVGLTGFECRCGNVYCGVHRYSDVHNCSYNYKADAAEKIRKENPVVVGEKIQKI

SEQ ID NO: 872948 - protein, 172 aa, Homo sapiens
MAQETNHSQVPMLCSTGCGFYGNPRTNGMCSVCYKEHLQRQNSSNGRISPPATSVSSLSESLPVQCTDGSVPEAQSALDSTSSSMQPSPVSNQSLLSESVASSQLDSTSVDKAVPETEDVQASVSDTAQQPSEEQSKSLEKPKQKKNRCFMCRKKVGLTVFDAAVEEIRDSK

SEQ ID NO: 872949 - protein, 102 aa, Homo sapiens; identical to SEQ ID NO: 872935

SEQ ID NO: 872950 - protein, 208 aa, Homo sapiens; identical to SEQ ID NO: 872933

SEQ ID NO: 872951 - protein, 206 aa, Homo sapiens
PVIISGRAGPARQPREPANPVASPPRSRHRPNNQTEKFNKQRTEGPAVAEPEQAGVRRHYLYPFTGGYRRRRAACQAERPAARSKDTDLAAYQKGNLGVQLRNMAQETNHSQVPMLCSTGCGFYGNPRTNGMCSVCYKEHLQRQNSSNGRISPPGSMHRWQCARSPVSIRLYIFIYAAQPCIKSVTFIRICSIFSIGQYICGQSST

SEQ ID NO: 872952 - protein, 172 aa, Homo sapiens; identical to SEQ ID NO: 872948

SEQ ID NO: 872953 - protein, 208 aa, Homo sapiens; identical to SEQ ID NO: 872933

SEQ ID NO: 872954 - protein, 208 aa, Homo sapiens; identical to SEQ ID NO: 872933

SEQ ID NO: 872955 - protein, 208 aa, Homo sapiens; identical to SEQ ID NO: 872933

SEQ ID NO: 872956 - protein, 208 aa, Homo sapiens; identical to SEQ ID NO: 872933

SEQ ID NO: 872957 - protein, 296 aa, Homo sapiens; identical to SEQ ID NO: 872932

SEQ ID NO: 872958 - protein, 124 aa, Homo sapiens; identical to SEQ ID NO: 872945

SEQ ID NO: 872959 - protein, 296 aa, Homo sapiens; identical to SEQ ID NO: 872932

SEQ ID NO: 872960 - protein, 296 aa, Homo sapiens; identical to SEQ ID NO: 872932

SEQ ID NO: 872961 - protein, 102 aa, Homo sapiens; identical to SEQ ID NO: 872935

SEQ ID NO: 872962 - protein, 102 aa, Homo sapiens; identical to SEQ ID NO: 872935

SEQ ID NO: 872963 - protein, 3530 aa, Homo sapiens [sequence omitted]

SEQ ID NO: 872964 - protein, 1846 aa, Homo sapiens
MSFTEGEAKTQVHKFLDKNHDQVRQDVLDLFVRSRTRSPGPCLSVFPAPTPAQVVAHLFSSHAPQAAPQRLGKSSSVTRLYKAHTVAAKFQQSLLDLVEKMERCNPLFMRCLKPNHKKEPGLFEPDVVMAQLRYSGVLETVRIRKEGFPVRLPFQGFIDRYCCLVALKHDLPANGDMCVSVLSRLCKVMPNMYRVGVSKLFLKEHLYQLLESMREHVLNLAALTLQRCLRGFFIKRRFRSLRHKIILLQSRARGYLARQRYQQMRRSLVKFRSLVHAYVSRRRYLKLRAEWRCQVEGALLWEQEELSKREVVAVGHLEVPAELAGLLQAVAGLGLAQVPQVAPVRTPRLQAEPRVTLPLDINNYPMAKFVQCHFKEPAFGMLTVPLRTPLTQLPAEHHAEAVSIFKLILRFMGDPHLHGARENIFGNYIVQKGLAVPELRDEILAQLANQVWHNHNAHNAERGWLLLAACLSGFAPSPCFNKYLLKFVSDYGRNGFQAVCQHRLMQAMGRAQQQGSGAARTLPPTQLEWTATYEKASMALDVGCFNGDQFSCPVHSWSTGEEVAGDILRHRGLADGWRGWTVAMKNGVQWAELAGHDYVLDLVSDLELLRDFPRQKSYFIVGTEGPAASRGGPKVVFGNSWDSDEDMSTRPQPQEHMPKVLDSDGYSSHNQDGTNGETEAQRGTATHQESDSLGEPAVPHKGLDCYLDSLFDPVLSYGDADLEKPTAIAYRMKGGGQPGGGSSSGTEDTPRRPPEPKPIPGLDASTLALQQAFIHKQAVLLARGMTLQATALQQQPLSAALRSLPAEKPPAPEAQPTSVGTGPPAKPVLLRATPKPLAPAPLAKAPRLPIKPVAAPVLAQDQASPETTSPSPELVRYSTLNSEHFPQPTQQIKNIVRQYQQPFRGGRPEALRKDGGKVFMKRPDPHEEALMILKGQMTHLAAAPGTQVSREAVALVKPVTSAPRPSMAPTSALPSRSLEPPEELTQTRLHRLINPNFYGYQDAPWKIFLRKEVFYPKDSYSHPVQLDLLFRQILHDTLSEACLRISEDERLRMKALFAQNQLDTQKPLVTESVKRAVVSTARDTWEVYFSRIFPATGSVGTGVQLLAVSHVGIKLLRMVKGGQEAGGQLRVLRAYSFADILFVTMPSQNMLEFNLASEKVILFSARAHQVKTLVDDFILELKKDSDYVVAVRNFLPEDPALLAFHKGDIIHLQPLEPPRVGYSAGCVVRRKVVYLEELRRRGPDFGWRFGTIHGRVGRFPSELVQPAAAPDFLQLPTEPGRGRAAAVAAAVASAAAAQEVGRRREGPPVRARSADHGEDALALPPYTMLEFAQKYFRDPQRRPQDGLRLKSKEPRESRTLEDMLCFTKTPLQESLIELSDSSLSKMATDMFLAVMRFMGDAPLKGQSDLDVLCNLLKLCGDHEVMRDECYCQVVKQITDNTSSKQDSCQRGWRLLYIVTAYHSCSEVLHPHLTRFLQDVSRTPGLPFQGIAKACEQNLQKTLRFGGRLELPSSIELRAMLAGRSSKRQLFLLPGGLERHLKIKTCTVALDVVEEICAEMALTRPEAFNEYVIFVVTNRGQHVCPLSRRAYILDVASEMEQVDGGYMLWFRRVLWDQPLKFENELYVTMHYNQVLPDYLKGLFSSVPASRPSEQLLQQVSKLASLQHRAKDHFYLPSVREVQEYIPAQLYRTTAGSTWLNLVSQHRQQTQALSPHQARAQFLGLLSALPMFGSSFFFIQSCSNIAVPAPCILAINHNGLNFLSTETHELMVKFPLKEIQSTRTQRPTANSSYPYVEIALGDVAAQRTLQLQLEQGLELCRVVAVHVENLLSAHEKRLTLPPSEITLL

SEQ ID NO: 872965 - protein, 1805 aa, Homo sapiens
MSFTEGEAKTQVHKFLDKNHDQVRQDVLDLFVRSRTRSPGPCLSVFPAPTPAQVVAHLFSSHAPQAAPQRLGKSSSVTRLYKAHTVAAKFQQSLLDLVEKMERCNPLFMRCLKPNHKKEPGLFEPDVVMAQLRYSGVLETVRIRKEGFPVRLPFQGFIDRYCCLVALKHDLPANGDMCVSVLSRLCKVMPNMYRVGVSKLFLKEHLYQLLESMREHVLNLAALTLQRCLRGFFIKRRFRSLRHKIILLQSRARGYLARQRYQQMRRSLVKFRSLVHAYVSRRRYLKLRAEWRCQVEGALLWEQEELSKREVVAVGHLEVPAELAGLLQAVAGLGLAQVPQVAPVRTPRLQAEPRVTLPLDINNYPMAKFVQCHFKEPAFGMLTVPLRTPLTQLPAEHHAEAVSIFKLILRFMGDPHLHGARENIFGNYIVQKGLAVPELRDEILAQLANQVWHNHNAHNAERGWLLLAACLSGFAPSPCFNKYLLKFVSDYGRNGFQAVCQHRLMQAMGRAQQQGSGAARTLPPTQLEWTATYEKASMALDVGCFNGDQFSCPVHSWSTGEEVAGDILRHRGLADGWRGWTVAMKNGVQWAELAGHDYVLDLVSDLELLRDFPRQKSYFIVGTEGPAASRGGPKVVFGNSWDSDEDMSTRPQPQEHMPKVLDSDGYSSHNQDGTNGETEAQRGTATHQESDSLGEPAVPHKGLDCYLDSLFDPVLSYGDADLEKPTAIAYRMKGGGQPGGGSSSGTEDTPRRPPEPKPIPGLDASTLALQQAFIHKQAVLLARGMTLQATALQQQPLSAALRSLPAEKPPAPEAQPTSVGTGPPAKPVLLRATPKPLAPAPLAKAPRLPIKPVAAPVLAQDQASPETTSPSPELVRYSTLNSEHFPQPTQQIKNIVRQYQQPFRGGRPEALRKDGGKVFMKRPDPHEEALMILKGQMTHLAAAPGTQVSREAVALVKPVTSAPRPSMAPTSALPSRSLEPPEELTQTRLHRLINPNFYGYQDAPWKIFLRKEVFYPKDSYSHPVQLDLLFRQILHDTLSEACLRISEDERLRMKALFAQNQLDTQKPLVTESVKRAVVSTARDTWEVYFSRIFPATGSVGTGVQLLAVSHVGIKLLRMVKGGQEAGGQLRVLRAYSFADILFVTMPSQNMLEFNLASEKVILFSARAHQVKTLVDDFILELKKDSDYVVAVRNFLPEDPALLAFHKGDIIHLQPLEPPRVGYSAGCVVRRKVVYLEELRRRGPDFGWRFGTIHGRVGRFPSELVQPAAAPDFLQLPTEPGRGRAAAVAAAVASAAAAQEVGRRREGPPVRARSADHGEDALALPPYTMLEFAQKYFRDPQRRPQDGLRLKSKEPRESRTLEDMLCFTKTPLQESLIELSDSSLSKMATDMFLAVMRFMGDAPLKGQSDLDVLCNLLKLCGDHEVMRDECYCQVVKQITDNTSSKQDSCQRGWRLLYIVTAYHSCSEVLHPHLTRFLQDVSRTPGLPFQGIAKACEQNLQKTLRFGGRLELPSSIELRAMLAGRSSKRQLFLLPGGLERHLKIKTCTVALDVVEEICAEMALTRPEAFNEYVIFVVTNRGQHVCPLSRRAYILDVASEMEQVDGGYMLWFRRVLWDQPLKFENELYVTMHYNQVLPDYLKGLFSSVPASRPSEQLLQQVSKLASLQHRAKDHFYLPSVREVQEYIPAQLYRTTAGSTWLNLVSQHRQQTQALSPHQARAQFLGLLSALPMFGSSFFFIQSCSNIAVPAPCILAINHNGLNFLSTETHVSGLSLALPSPPSVPWSPTPSKRPRPPAAEAQFHCLPPS

SEQ ID NO: 872966 - protein, 571 aa, Homo sapiens
RERERERERERESVSARKLASKPERQTERGTRRETQREKKQPEAELCQGSTSNLFQFIHPSLLSAQTVELGLSKFVPKKMIITQTSHCYMTSLGILFLINILPGTTGQGESRRQEPGDFVKQDIGGLSPKHAPDIPDDSTDNITIFTRILDRLLDGYDNRLRPGLGDAVTEVKTDIYVTSFGPVSDTDMEYTIDVFFRQTWHDERLKFDGPMKILPLNNLLASKIWTPDTFFHNGKKSVAHNMTTPNKLLRLVDNGTLLYTMRLTIHAECPMHLEDFPMDVHACPLKFGSYAYTTAEVVYSWTLGKNKSVEVAQDGSRLNQYDLLGHVVGTEIIRSSTGEYVVMTTHFHLKRKIGYFVIQTYLPCIMTVILSQVSFWLNRESVPARTVFGVTTVLTMTTLSISARNSLPKVAYATAMDWFIAVCYAFVFSALIEFATVNYFTKRSWAWEGKKVPEALEMKKKTPAAPAKKTSTTFNIVGTTYPINLAKDTEFSTISKGAAPSASSTPTIIASPKATYVQDSPTETKTYNSVSKVDKISRIIFPVLFAIFNLVYWATYVNRESAIKGMIRKQ

SEQ ID NO: 872967 - protein, 301 aa, Homo sapiens
RERERERERERESVSARKLASKPERQTERGTRRETQREKKQPEAELCQGSTSNLFQFIHPSLLSAQTVELGLSKFVPKKMIITQTSHCYMTSLGILFLINILPGTTGQGESRRQEPGDFVKQDIGGLSPKHAPDIPDDSTDNITIFTRILDRLLDGYDNRLRPGLGDAVTEVKTDIYVTSFGPVSDTDMEYTIDVFFRQTWHDERLKFDGPMKILPLNNLLASKIWTPDTFFHNGKKSVAHNMTTPNKLLRLVDNGTLLYTMRIEEVQKHRSMMKPSVSYTVAPWIQEGGPGGRHRLKMEK

SEQ ID NO: 872968 - protein, 472 aa, Homo sapiens
RERERERERERESVSARKLASKPERQTERGTRRETQREKKQPEAELCQGSTSNLFQFIHPSLLSAQTVELGLSKFVPKKMIITQTSHCYMTSLGILFLINILPGTTGQGESRRQEPGDFVKQDIGGLSPKHAPDIPDDSTDNITIFTRILDRLLDGYDNRLRPGLGDAVTEVKTDIYVTSFGPVSDTDMEYTIDVFFRQTWHDERLKFDGPMKILPLNNLLASKIWTPDTFFHNGKKSVAHNMTTPNKLLRLVDNGTLLYTMRLTIHAECPMHLEDFPMDVHACPLKFGSYAYTTAEVVYSWTLGKNKSVEVAQDGSRLNQYDLLGHVVGTEIIRSSTGEYVVMTTHFHLKRKIGYFVIQTYLPCIMTVILSQVSFWLNRESVPARTVFGVTTVLTMTTLSISARNSLPKVAYATAMDWFIAVCYAFVFSALIEFATVNYFTKRSWAWEGKKVPEALEMKVMPHTFGTLSLT

SEQ ID NO: 872969 - protein, 60 aa, Homo sapiens
MEPASCCAERPKPGPTGVKTKPSCGGWRAVGLLLLLLLLVLAAVGVVAGGLLGSAQGPPK

SEQ ID NO: 872970 - protein, 538 aa, Homo sapiens
TRDPHPIGTGAGGEGSARGSSCRATWGIGMVLWILWRPFGFSGRFLKLESHSITESKSLIPVAWTSLTQMLLEAPGIFLLGQRKRFSTMPETETHERETELFSPPSDVRGMTKLDRTAFKKTVNIPVLKVRKEIVSKLMRSLKRAALQRPGIRRVIEDPEDKESRLIMLDPYKIFTHDSFEKAELSVLEQLNVSPQISKYNLELTYEHFKSEEILRAVLPEGQDVTSGFSRIGHIAHLNLRDHQLPFKHLIGQVMIDKNPGITSAVNKINNIDNMYRNFQMEVLSGEQNMMTKVRENNYTYEFDFSKVYWNPRLSTEHSRITELLKPGDVLFDVFAGVGPFAIPVAKKNCTVFANDLNPESHKWLLYNCKLNKVDQKVKVFNLDGKDFLQGPVKEELMQLLGLSKERKPSVHVVMNLPAKAIEFLSAFKWLLDGQPCSSEFLPIVHCYSFSKDANPAEDVRQRAGAVLGISLEACSSVHLVRNVAPNKEMLCITFQIPASVLYKNQTRNPENHEDPPLKRQRTAEAFSDEKTQIVSNT

SEQ ID NO: 872971 - protein, 538 aa, Homo sapiens; identical to SEQ ID NO: 872970

SEQ ID NO: 872972 - protein, 115 aa, Homo sapiens
MSYYQRPFSPSAYSLPASLNSSIVMQHGTSLDSTDTYPQHAQSLDGTTSSSIPLYRSSEEEKRVTVIKAPHYPGIGPVDESGIPTAIRTRRRRARLVRRFSLPVPAGVTTVSPLT

SEQ ID NO: 872973 - protein, 110 aa, Homo sapiens
QFLHPSFLQPPLPTTPTPVPREPGRKPLSSSRLGEVTGSPSPPPRSGAPTPSSRAPALSPTRVSSFLPYLSSCPAEVQVQPLLAQSLATPTPPGPARTHPGPRIFSSTGP

SEQ ID NO: 872974 - protein, 691 aa, Homo sapiens
MNTGVILSHQTQPKGFRSVRPNLQDKRSPTQSQITVNGNSGGAVSPMSYYQRPFSPSAYSLPASLNSSIVMQHGTSLDSTDTYPQHAQSLDGTTSSSIPLYRSSEEEKRVTVIKAPHYPGIGPVDESGIPTAIRTTVDRPKDWYKTMFKQIHMVHKPDDDTDMYNTPYTYNAGLYNPPYSAQSHPAAKTQTYRPLSKSHSDNSPNAFKDASSPVPPPHVPPPVPPLRPRDRSSTEKHDWDPPDRKVDTRKFRSEPRSIFEYEPGKSSILQHERPPPLPTTPTPVPREPGRKPLSSSRLGEVTGSPSPPPRSGAPTPSSRAPALSPTRPPKKPLDYVQDHSSGVFNEASLYQSSIDRSLERPMSSASMASDFRKRRKSEPAVGPPRGLGDQSASRTSPGRVDLPGSSTTLTKSFTSSSPSSPSRAKDRESPRSYSSTLTDMGRSAPRERRGTPEKEKLPAKAVYDFKAQTSKELSFKKGDTVYILRKIDQNWYEGEHHGRVGIFPISYVEKLTPPEKAQPARPPPPAQPGEIGEAIAKYNFNADTNVELSLRKGDRVILLKRVDQNWYEGKIPGTNRQGIFPVSYVEVVKKNTKGAEDYPDPPIPHSYSSDRIHSLSSNKPQRPVFTHENIQGGGEPFQALYNYTPRNEDELELRESDVIDVMEKCDDGWFVGTSRRTKFFGTFPGNYVKRL

SEQ ID NO: 872975 - protein, 626 aa, Homo sapiens
MSYYQRPFSPSAYSLPASLNSSIVMQHGTSLDSTDTYPQHAQSLDGTTSSSIPLYRSSEEEKRVTVIKAPHYPGIGPVDESGIPTAIRTTVDRPKDWYKTMFKQIHMVHKPDDDTDMYNTPYTYNAGLYNPPYSAQSHPAAKTQTYRPLSKSHSDNSPNAFKDASSPVPPPHVPPPVPPLRPRDRSSTEKHDWDPPDRKVDTRKFRSEPRSIFEYEPGKSSILQHERPPPLPTTPTPVPREPGRKPLSSSRLGEVTGSPSPPPRSGAPTPSSRAPALSPTRASLYQSSIDRSLERPMSSASMASDFRKRRKSEPAVGPPRGLGDQSASRTSPGRVDLPGSSTTLTKSFTSSSPSSPSRAKDRESPRSYSSTLTDMGRSAPRERRGTPEKEKLPAKAVYDFKAQTSKELSFKKGDTVYILRKIDQNWYEGEHHGRVGIFPISYVEKLTPPEKAQPARPPPPAQPGEIGEAIAKYNFNADTNVELSLRKGDRVILLKRVDQNWYEGKIPGTNRQGIFPVSYVEVVKKNTKGAEDYPDPPIPHSYSSDRIHSLSSNKPQRPVFTHENIQGGGEPFQALYNYTPRNEDELELRESDVIDVMEKCDDGWFVGTSRRTKFFGTFPGNYVKRL

SEQ ID NO: 872976 - protein, 573 aa, Homo sapiens
MSYYQRPFSPSAYSLPASLNSSIVMQHGTSLDSTDTYPQHAQSLDGTTSSSIPLYRSSEEEKRVTVIKAPHYPGIGPVDESGIPTAIRTTVDRPKDWYKTMFKQIHMVHKPDDDTDMYNTPYTYNAGLYNPPYSAQSHPAAKTQTYRPLSKSHSDNSPNAFKDASSPVPPPHVPPPVPPLRPRDRSSTEKHDWDPPDRKVDTRKFRSEPRSIFEYEPGKSSILQHERPASLYQSSIDRSLERPMSSASMASDFRKRRKSEPAVGPPRGLGDQSASRTSPGRVDLPGSSTTLTKSFTSSSPSSPSRAKDRESPRSYSSTLTDMGRSAPRERRGTPEKEKLPAKAVYDFKAQTSKELSFKKGDTVYILRKIDQNWYEGEHHGRVGIFPISYVEKLTPPEKAQPARPPPPAQPGEIGEAIAKYNFNADTNVELSLRKGDRVILLKRVDQNWYEGKIPGTNRQGIFPVSYVEVVKKNTKGAEDYPDPPIPHSYSSDRIHSLSSNKPQRPVFTHENIQGGGEPFQALYNYTPRNEDELELRESDVIDVMEKCDDGWFVGTSRRTKFFGTFPGNYVKRL

SEQ ID NO: 872977 - protein, 1438 aa, Homo sapiens
MSYYQRPFSPSAYSLPASLNSSIVMQHGTSLDSTDTYPQHAQSLDGTTSSSIPLYRSSEEEKRVTVIKAPHYPGIGPVDESGIPTAIRTTVDRPKDWYKTMFKQIHMVHKPDDDTDMYNTPYTYNAGLYNPPYSAQSHPAAKTQTYRPLSKSHSDNSPNAFKDASSPVPPPHVPPPVPPLRPRDRSSTEKHDWDPPDRKVDTRKFRSEPRSIFEYEPGKSSILQHERPPPLPTTPTPVPREPGRKPLSSSRLGEVTGSPSPPPRSGAPTPSSRAPALSPTRVSSFLPYLSSCPAEVQVQPLLAQSLADSHSPGSRSHPSRPQNLLIHRPLRAPQCPVPLPPARLSSHPSRTLPHPRLTTCLHPSELSAELRAPMLGLLATNEGRDDEVTRPKELFGDWVEPIPNIRRASQTQSRCRREWSIVHASSVVDQLKQELPTTYANQKRWTQETARDPLPWSSPSHPHATRFTLLPPFSPAEVRGVRVDACLRVNARVSFSCHTAFPSLCSVCLFLPFSFTSAQTDRINPDDIDLENEPWYKFFSELEFGRPPPKKPLDYVQDHSSGVFNEASLYQSSIDRSLERPMSSASMASDFRKRRKSEPAVGPPRGLGDQSASRTSPGRVDLPGSSTTLTKSFTSSSPSSPSRAKGGDDSKICPSLCSYSGLNGNPSSELDYCSTYRQHLDVPRDSPRAISFKNGWQMARQNAEIWSSTEETVSPKIKSRSCDDLLNDDCDSFPDPKVKSESMGSLLCEEDSKESCPMAWGSPYVPEVRSNGRSRIRHRSARNAPGFLKMYKKMHRINRKDLMNSEVICSVKSRILQYESEQQHKDLLRAWSQCSTEEVPRDMVPTRISEFEKLIQKSKSMPNLGDDMLSPVTLEPPQNGLCPKRRFSIEYLLEEENQSGPPARGRRGCQSNALVPIHIEVTSDEQPRAHVEFSDSDQDGVVSDHSDYIHLEGSSFCSESDFDHFSFTSSESFYGSSHHHHHHHHHHHRHLISSCKGRCPASYTRFTTMLKHERARHENTEEPRRQEMDPGLSKLAFLVSPVPFRRKKNSAPKKQTEKAKCKASVFEALDSALKDICDQIKAEKKRGSLPDNSILHRLISELLPDVPERNSSLRALRRSPLHQPLHPLPPDGAIHCPPYQNDCGRMPRSASFQDVDTANSSCHHQDRGGALQDRESPRSYSSTLTDMGRSAPRERRGTPEKEKLPAKAVYDFKAQTSKELSFKKGDTVYILRKIDQNWYEGEHHGRVGIFPISYVEKLTPPEKAQPARPPPPAQPGEIGEAIAKYNFNADTNVELSLRKGDRVILLKRVDQNWYEGKIPGTNRQGIFPVSYVEVVKKNTKGAEDYPDPPIPHSYSSDRIHSLSSNKPQRPVFTHENIQGGGEPFQALYNYTPRNEDELELRESDVIDVMEKCDDGWFVGTSRRTKFFGTFPGNYVKRL

SEQ ID NO: 872978 - protein, 626 aa, Homo sapiens; identical to SEQ ID NO: 872975

SEQ ID NO: 872979 - protein, 697 aa, Homo sapiens
MREREKDFGFLLLQGLYLHHEGPPLMTYLNLITSPTWGQRSAVTDGTTLTTAAATHSQITVNGNSGGAVSPMSYYQRPFSPSAYSLPASLNSSIVMQHGTSLDSTDTYPQHAQSLDGTTSSSIPLYRSSEEEKRVTVIKAPHYPGIGPVDESGIPTAIRTTVDRPKDWYKTMFKQIHMVHKPDDDTDMYNTPYTYNAGLYNPPYSAQSHPAAKTQTYRPLSKSHSDNSPNAFKDASSPVPPPHVPPPVPPLRPRDRSSTEKHDWDPPDRKVDTRKFRSEPRSIFEYEPGKSSILQHERPPPLPTTPTPVPREPGRKPLSSSRLGEVTGSPSPPPRSGAPTPSSRAPALSPTRASLYQSSIDRSLERPMSSASMASDFRKRRKSEPAVGPPRGLGDQSASRTSPGRVDLPGSSTTLTKSFTSSSPSSPSRAKDRESPRSYSSTLTDMGRSAPRERRGTPEKEKLPAKAVYDFKAQTSKELSFKKGDTVYILRKIDQNWYEGEHHGRVGIFPISYVEKLTPPEKAQPARPPPPAQPGEIGEAIAKYNFNADTNVELSLRKGDRVILLKRVDQNWYEGKIPGTNRQGIFPVSYVEVVKKNTKGAEDYPDPPIPHSYSSDRIHSLSSNKPQRPVFTHENIQGGGEPFQALYNYTPRNEDELELRESDVIDVMEKCDDGWFVGTSRRTKFFGTFPGNYVKRL

SEQ ID NO: 872980 - protein, 545 aa, Homo sapiens
MKATTPLQTVDRPKDWYKTMFKQIHMVHKPDDDTDMYNTPYTYNAGLYNPPYSAQSHPAAKTQTYRPLSKSHSDNSPNAFKDASSPVPPPHVPPPVPPLRPRDRSSTEKHDWDPPDRKVDTRKFRSEPRSIFEYEPGKSSILQHERPPPLPTTPTPVPREPGRKPLSSSRLGEVTGSPSPPPRSGAPTPSSRAPALSPTRASLYQSSIDRSLERPMSSASMASDFRKRRKSEPAVGPPRGLGDQSASRTSPGRVDLPGSSTTLTKSFTSSSPSSPSRAKDRESPRSYSSTLTDMGRSAPRERRGTPEKEKLPAKAVYDFKAQTSKELSFKKGDTVYILRKIDQNWYEGEHHGRVGIFPISYVEKLTPPEKAQPARPPPPAQPGEIGEAIAKYNFNADTNVELSLRKGDRVILLKRVDQNWYEGKIPGTNRQGIFPVSYVEVVKKNTKGAEDYPDPPIPHSYSSDRIHSLSSNKPQRPVFTHENIQGGGEPFQALYNYTPRNEDELELRESDVIDVMEKCDDGWFVGTSRRTKFFGTFPGNYVKRL

SEQ ID NO: 872981 - protein, 691 aa, Homo sapiens; identical to SEQ ID NO: 872974

SEQ ID NO: 872982 - protein, 131 aa, Homo sapiens [sequence omitted]

SEQ ID NO: 872983 - protein, 235 aa, Homo sapiens
MSYYQRPFSPSAYSLPASLNSSIVMQHGTSLDSTDTYPQHAQSLDGTTSSSIPLYRSSEEEKRVTVIKAPHYPGIGPVDESGIPTAIRTTVDRPKDWYKTMFKQIHMVHKPDDDTDMYNTPYTYNAGLYNPPYSAQSHPAAKTQTYRPLSKSHSDNSPNAFKDASSPVPPPHVPPPVPPLRPRDRSSTEKHDWDPPDRKVDTRKFRSEPRSIFEYEPGKSSILQHERPVTKPQAS

SEQ ID NO: 872984 - protein, 233 aa, Homo sapiens
MSYYQRPFSPSAYSLPASLNSSIVMQHGTSLDSTDTYPQHAQSLDGTTSSSIPLYRSSEEEKRVTVIKAPHYPGIGPVDESGIPTAIRTTVDRPKDWYKTMFKQIHMVHKPDDDTDMYNTPYTYNAGLYNPPYSAQSHPAAKTQTYRPLSKSHSDNSPNAFKDASSPVPPPHVPPPVPPLRPRDRSSTEKHDWDPPDRKVDTRKFRSEPRSIFEYEPGKSSILQHERPVSTCH

SEQ ID NO: 872985 - protein, 333 aa, Homo sapiens [sequence omitted]

SEQ ID NO: 872986 - protein, 152 aa, Homo sapiens
MKATTPLQTVDRPKDWYKTMFKQIHMVHKPDDDTDMYNTPYTYNAGLYNPPYSAQSHPAAKTQTYRPLSKSHSDNSPNAFKDASSPVPPPHVPPPVPPLRPRDRSSTEKHDWDPPDRKVDTRKFRSEPRSIFEYEPGKSSILQHERPVSTCH

SEQ ID NO: 872987 - protein, 189 aa, Homo sapiens
MSYYQRPFSPSAYSLPASLNSSIVMQHGTSLDSTDTYPQHAQSLDGTTSSSIPLYRSSEEEKRVTVIKAPHYPGIGPVDESGIPTAIRTTVDRPKDWYKTMFKQIHMVHKPDDDTDMYNTPYTYNAGRMGFLARNDYFMLSNVWKNDTVTFFPLLFEHMFSVHILGGGFLFFSQSVHNKRIDFSHGNEN

SEQ ID NO: 872988 - protein, 68 aa, Homo sapiens
  misc_feature (3)..(4): Xaa can be any naturally occurring amino acid
VSXXGGRRQLLRAWAGSSWLTKSTGREGLCQPGEGSRGQDESNNTFAGEVGGHAGRDCSCIYFAARPM

SEQ ID NO: 872989 - protein, 75 aa, Homo sapiens
MQHGTSLDSTDTYPQHAQSLDGTTSSSIPLYRSSEEEKRVTVIKAPHYPGIGPVDESGIPTAIRTTVDPAKDWVQ

SEQ ID NO: 872990 - protein, 691 aa, Homo sapiens; identical to SEQ ID NO: 872974

SEQ ID NO: 872991 - protein, 911 aa, Homo sapiens
MSYYQRPFSPSAYSLPASLNSSIVMQHGTSLDSTDTYPQHAQSLDGTTSSSIPLYRSSEEEKRVTVIKAPHYPGIGPVDESGIPTAIRTTVDRPKDWYKTMFKQIHMVHKPDDDTDMYNTPYTYNAGLYNPPYSAQSHPAAKTQTYRPLSKSHSDNSPNAFKDASSPVPPPHVPPPVPPLRPRDRSSTEKHDWDPPDRKVDTRKFRSEPRSIFEYEPGKSSILQHERPPPLPTTPTPVPREPGRKPLSSSRLGEVTGSPSPPPRSGAPTPSSRAPALSPTRVSSFLPYLSSCPAEVQVQPLLAQSLADSHSPGSRSHPSRPQNLLIHRPLRAPQCPVPLPPARLSSHPSRTLPHPRLTTCLHPSELSAELRAPMLGLLATNEGRDDEVTRPKELFGDWVEPIPNIRRASQTQSRCRREWSIVHASSVVDQLKQELPTTYANQKRWTQETARDPLPWSSPSHPHATRFTLLPPFSPAEVRGVRVDACLRVNARVSFSCHTAFPSLCSVCLFLPFSFTSAQTDRINPDDIDLENEPWYKFFSELEFGRPPPKKPLDYVQDHSSGVFNEASLYQSSIDRSLERPMSSASMASDFRKRRKSEPAVGPPRGLGDQSASRTSPGRVDLPGSSTTLTKSFTSSSPSSPSRAKDRESPRSYSSTLTDMGRSAPRERRGTPEKEKLPAKAVYDFKAQTSKELSFKKGDTVYILRKIDQNWYEGEHHGRVGIFPISYVEKLTPPEKAQPARPPPPAQPGEIGEAIAKYNFNADTNVELSLRKGDRVILLKRVDQNWYEGKIPGTNRQGIFPVSYVEVVKKNTKGAEDYPDPPIPHSYSSDRIHSLSSNKPQRPVFTHENIQGGGEPFQALYNYTPRNEDELELRESDVIDVMEKCDDGWFVGTSRRTKFFGTFPGNYVKRL

SEQ ID NO: 872992 - protein, 626 aa, Homo sapiens; identical to SEQ ID NO: 872975

SEQ ID NO: 872993 - protein, 691 aa, Homo sapiens; identical to SEQ ID NO: 872974

SEQ ID NO: 872994 - protein, 477 aa, Homo sapiens
MKATTPLQTVDRPKDWYKTMFKQIHMVHKPGLYNPPYSAQSHPAAKTQTYRPLSKSHSDNSPNAFKDASSPVPPPHVPPPVPPLRPRDRSSTEKHDWDPPDRKVDTRKFRSEPRSIFEYEPGKSSILQHERPASLYQSSIDRSLERPMSSASMASDFRKRRKSEPAVGPPRGLGDQSASRTSPGRVDLPGSSTTLTKSFTSSSPSSPSRAKDRESPRSYSSTLTDMGRSAPRERRGTPEKEKLPAKAVYDFKAQTSKELSFKKGDTVYILRKIDQNWYEGEHHGRVGIFPISYVEKLTPPEKAQPARPPPPAQPGEIGEAIAKYNFNADTNVELSLRKGDRVILLKRVDQNWYEGKIPGTNRQGIFPVSYVEVVKKNTKGAEDYPDPPIPHSYSSDRIHSLSSNKPQRPVFTHENIQGGGEPFQALYNYTPRNEDELELRESDVIDVMEKCDDGWFVGTSRRTKFFGTFPGNYVKRL

SEQ ID NO: 872995 - protein, 583 aa, Homo sapiens
MSYYQRPFSPSAYSLPASLNSSIVMQHGTSLDSTDTYPQHAQSLDGTTSSSIPLYRSSEEEKRVTVIKAPHYPGIGPVDESGIPTAIRTTVDRPKDWYKTMFKQIHMVHKPDDDTDMYNTPYTYNAGLYNPPYSAQSHPAAKTQTYRPLSKSHSDNSPNAFKDASSPVPPPHVPPPVPPLRPRDRSSTEKHDWDPPDRKVDTRKFRSEPRSIFEYEPGKSSILQHERPPPLPTTPTPVPREPGRKPLSSSRLGEVTGSPSPPPRSGAPTPSSRAPALSPTRASLYQSSIDRSLERPMSSASMASDFRKRRKSEPAVGPPRGLGDQSASRTSPGRVDLPGSSTTLTKSFTSSSPSSPSRAKDRESPRSYSSTLTDMGRSAPRERRGTPEKEKLPAKAVYDFKAQTSKELSFKKGDTVYILRKIDQNWYEGEHHGRVGIFPISYVEKLTPPEKAQPARPPPPAQPGEIGEAIAKYNFNADTNVELSLRKGDRVILLKRVDQNWYEGKIPGTNRQGIFPVSYVEVVKKNTKGAEDYPDPPIPRGPPVVMPYGFQCAVTISTCHQTTSRVAAAAVSLGTTWQAGPPP

SEQ ID NO: 872996 - protein, 514 aa, Homo sapiens
MSYYQRPFSPSAYSLPASLNSSIVMQHGTSLDSTDTYPQHAQSLDGTTSSSIPLYRSSEEEKRVTVIKAPHYPGIGPVDESGIPTAIRTTVDRPKDWYKTMFKQIHMVHKPDDDTDMYNTPYTYNAGLYNPPYSAQSHPAAKTQTYRPLSKSHSDNSPNAFKDASSPVPPPHVPPPVPPLRPRDRSSTEKHDWDPPDRKVDTRKFRSEPRSIFEYEPGKSSILQHERPPPLPTTPTPVPREPGRKPLSSSRLGEVTGSPSPPPRSGAPTPSSRAPALSPTRASLYQSSIDRSLERPMSSASMASDFRKRRKSEPAVGPPRGLGDQSASRTSPGRVDLPGSSTTLTKSFTSSSPSSPSRAKDRESPRSYSSTLTDMGRSAPRERRGTPEKEKLPAKAVYDFKAQTSKELSFKKGDTVYILRKIDQNWYEGEHHGRVGIFPISYVEKLTPPEKAQPARPPPPAQPGEIGEAIAKYNFNADTNVELSLRKVAQLVFCLFVFVCLFFSGFEKAVYFQN

SEQ ID NO: 872997 - protein, 329 aa, Homo sapiens
MSYYQRPFSPSAYSLPASLNSSIVMQHGTSLDSTDTYPQHAQSLDGTTSSSIPLYRSSEEEKRVTVIKAPHYPGIGPVDESGIPTAIRTTVDRPKDWYKTMFKQIHMVHKPDDDTDMYNTPYTYNAGLYNPPYSAQSHPAAKTQTYRPLSKSHSDNSPNAFKDASSPVPPPHVPPPVPPLRPRDRSSTEKHDWDPPDRKVDTRKFRSEPRSIFEYEPGKSSILQHERPPPLPTTPTPVPREPGRKPLSSSRLGEVTGSPSPPPRSGAPTPSSRAPALSPTRVSSFLPYLSSCPAEVQVQPLLAQSLATPTPPGPARTHPGPRIFSSTGP

SEQ ID NO: 872998 - protein, 154 aa, Homo sapiens
MKATTPLQTVDRPKDWYKTMFKQIHMVHKPDDDTDMYNTPYTYNAGLYNPPYSAQSHPAAKTQTYRPLSKSHSDNSPNAFKDASSPVPPPHVPPPVPPLRPRDRSSTEKHDWDPPDRKVDTRKFRSEPRSIFEYEPGKSSILQHERPVTKPQAS

SEQ ID NO: 872999 - protein, 67 aa, Homo sapiens
VMIGLYNPPYSAQSHPAAKTQTYRPLSKSHSDNSPNAFKDASSPVPPPHVPPPVPPLRPRDRSSTEK

SEQ ID NO: 873000 - protein, 1499 aa, Homo sapiens
MEREPAGTEEPGPPGRRRRREGRTRTVRSNLLPPPGAEDPAAGAAKGERRRRRGCAQHLADNRLKTTKYTLLSFLPKNLFEQFHRPANVYFVFIALLNFVPAVNAFQPGLALAPVLFILAITAFRDLWEDYSRHRSDHKINHLGCLVFSREEKKYVNRFWKEIHVGDFVRLRCNEIFPADILLLSSSDPDGLCHIETANLDGETNLKRRQVVRGFSELVSEFNPLTFTSVIECEKPNNDLSRFRGCIIHDNGKKAGLYKENLLLRGCTLRNTDAVVGIVIYAGHETKALLNNSGPRYKRSKLERQMNCDVLWCVLLLVCMSLFSAVGHGLWIWRYQEKKSLFYVPKSDGSSLSPVTAAVYSFLTMIIVLQVLIPISLYVSIEIVKACQVYFINQDMQLYDEETDSQLQCRALNITEDLGQIQYIFSDKTGTLTENKMVFRRCTVSGVEYSHDANAQRLARYQEADSEEEEVVPRGGSVSQRGSIGSHQSVRVVHRTQSTKSHRRTGSRAEAKRASMLSKHTAFSSPMEKDITPDPKLLEKVSECDKSLAVARHQEHLLAHLSPELSDVFDFFIALTICNTVVVTSPDQPRTKVRVRFELKSPVKTIEDFLRRFTPSCLTSGCSSIGSLAANKSSHKLGSSFPSTPSSDGMLLRLEERLGQPTSAIASNGYSSQADNWASELAQEQESERELRYEAESPDEAALVYAARAYNCVLVERLHDQVSVELPHLGRLTFELLHTLGFDSVRKRMSVVIRHPLTDEINVYTKGADSVVMDLLQPCSSVDARGRHQKKIRSKTQNYLNVYAAEGLRTLCIAKRVLSKEEYACWLQSHLEAESSLENSEELLFQSAIRLETNLHLLGATGIEDRLQDGVPETISKLRQAGLQIWVLTGDKQETAVNIAYACKLLDHDEEVITLNATSQEACAALLDQCLCYVQSRGLQRAPEKTKGKVSMRFSSLCPPSTSTASGRRPSLVIDGRSLAYALEKNLEDKFLFLAKQCRSVLCCRSTPLQKSMVVKLVRSKLKAMTLAIGDGANDVSMIQVADVGVGISGQEGMQAVMASDFAVPKFRYLERLLILHGHWCYSRLANMVLYFFYKNTMFVGLLFWFQFFCGFSASTMIDQWYLIFFNLLFSSLPPLVTGVLDRDVPANVLLTNPQLYKSGQNMEEYRPRTFWFNMADAAFQSLVCFSIPYLAYYDSNVDLFTWGTPIVTIALLTFLLHLGIETKTWTWLNWITCGFSVLLFFTVALIYNASCATCYPPSNPYWTMQALLGDPVFYLTCLMTPVAALLPRLFFRSLQGRVFPTQLQLARQLTRKSPRRCSAPKETFAQGRLPKDSGTEHSSGRTVKTSVPLSQPSWHTQQPVCSLEASGEPSTVDMSMPVREHTLLEGLSAPAPMSSAPGEAVLRSPGGCPEESKVRAASTGRVTPLSSLFSLPTFSLLNWISSWSLVSRLGSVLQFSRTEQLADGQAGRGLPVQPHSGRSGLQGPDHRLLIGASSRRSQ

SEQ ID NO: 873001 - protein, 1499 aa, Homo sapiens; identical to SEQ ID NO: 873000

SEQ ID NO: 873002 - protein, 1385 aa, Homo sapiens
MEREPAGTEEPGPPGRRRRREGRTRTVRSNLLPPPGAEDPAAGAAKGERRRRRGCAQHLADNRLKTTKYTLLSFLPKNLFEQFHRPANVYFVFIALLNFVPAVNAFQPGLALAPVLFILAITAFRDLWEDYSRHRSDHKINHLGCLVFSREEKKYVNRFWKEIHVGDFVRLRCNEIFPADILLLSSSDPDGLCHIETANLDGETNLKRRQVVRGFSELVSEFNPLTFTSVIECEKPNNDLSRFRGCIIHDNGKKAGLYKENLLLRGCTLRNTDAVVGIVIYAGHETKALLNNSGPRYKRSKLERQMNCDVLWCVLLLVCMSLFSAVGHGLWIWRYQEKKSLFYVPKSDGSSLSPVTAAVYSFLTMIIVLQVLIPISLYVSIEIVKACQVYFINQDMQLYDEETDSQLQCRALNITEDLGQIQYIFSDKTGTLTENKMVFRRCTVSGVEYSHDANAQRLARYQEADSEEEEVVPRGGSVSQRGSIGSHQSVRVVHRTQSTKSHRRTGSRAEAKRASMLSKHTAFSSPMEKDITPDPKLLEKVSECDKSLAVARHQEHLLAHLSPELSDVFDFFIALTICNTVVVTSPDQPRTKVRVRFELKSPVKTIEDFLRRFTPSCLTSGCSSIGSLAANKSSHKLGSSFPSTPSSDGMLLRLEERLGQPTSAIASNGYSSQADNWASELAQEQESERELRYEAESPDEAALVYAARAYNCVLVERLHDQVSVELPHLGRLTFELLHTLGFDSVRKRMSVVIRHPLTDEINVYTKGADSVVMDLLQPCSSVDARGRHQKKIRSKTQNYLNVYAAEGLRTLCIAKRVLSKEEYACWLQSHLEAESSLENSEELLFQSAIRLETNLHLLGATGIEDRLQDGVPETISKLRQAGLQIWVLTGDKQETAVNIAYACKLLDHDEEVITLNATSQEACAALLDQCLCYVQSRGLQRAPEKTKGKVSMRFSSLCPPSTSTASGRRPSLVIDGRSLAYALEKNLEDKFLFLAKQCRSVLCCRSTPLQKSMVVKLVRSKLKAMTLAIGDGANDVSMIQVADVGVGISGQEGMQAVMASDFAVPKFRYLERLLILHGHWCYSRLANMVLYFFYKNTMFVGLLFWFQFFCGFSASTMIDQWYLIFFNLLFSSLPPLVTGVLDRDVPANVLLTNPQLYKSGQNMEEYRPRTFWFNMADAAFQSLVCFSIPYLAYYDSNVDLFTWGTPIVTIALLTFLLHLGIETKTWTWLNWITCGFSVLLFFTVALIYNASCATCYPPSNPYWTMQALLGDPVFYLTCLMTPVAALLPRLFFRSLQGRVFPTQLQLARQLTRKSPRRCSAPKETFAQGRLPKDSGTEHSSGRTVKTSVPLSQPSWHTHPAGGAERTGPHVLCARGGCPEESRRVS

SEQ ID NO: 873003 - protein, 1306 aa, Homo sapiens
MEREPAGTEEPGPPGRRRRREGRTRTVRSNLLPPPGAEDPAAGAAKGERRRRRGCAQHLADNRLKTTKYTLLSFLPKNLFEQFHRPANVYFVFIALLNFVPAVNAFQPGLALAPVLFILAITAFRDLWEDYSRHRSDHKINHLGCLVFSREEKKYVNRFWKEIHVGDFVRLRCNEIFPADILLLSSSDPDGLCHIETANLDGETNLKRRQVVRGFSELVSEFNPLTFTSVIECEKPNNDLSRFRGCIIHDNGKKAGLYKENLLLRGCTLRNTDAVVGIVIYAGHETKALLNNSGPRYKRSKLERQMNCDVLWCVLLLVCMSLFSAVGHGLWIWRYQEKKSLFYVPKSDGSSLSPVTAAVYSFLTMIIVLQVLIPISLYVSIEIVKACQVYFINQDMQLYDEETDSQLQCRALNITEDLGQIQYIFSDKTGTLTENKMVFRRCTVSGVEYSHDANAQRLARYQEADSEEEEVVPRGGSVSQRGSIGSHQSVRVVHRTQSTKSHRRTGSRAEAKRASMLSKHTAFSSPMEKDITPDPKLLEKVSECDKSLAVARHQEHLLAHLSPELSDVFDFFIALTICNTVVVTSPDQPRTKVRVRFELKSPVKTIEDFLRRFTPSCLTSGCSSIGSLAANKSSHKLGSSFPSTPSSDGMLLRLEERLGQPTSAIASNGYSSQADNWASELAQEQESERELRYEAESPDEAALVYAARAYNCVLVERLHDQVSVELPHLGRLTFELLHTLGFDSVRKRMSVVIRHPLTDEINVYTKGADSVVMDLLQPCSSVDARGRHQKKIRSKTQNYLNVYAAEGLRTLCIAKRVLSKEEYACWLQSHLEAESSLENSEELLFQSAIRLETNLHLLGATGIEDRLQDGVPETISKLRQAGLQIWVLTGDKQETAVNIAYACKLLDHDEEVITLNATSQEACAALLDQCLCYVQSRGLQRAPEKTKGKVSMRFSSLCPPSTSTASGRRPSLVIDGRSLAYALEKNLEDKFLFLAKQCRSVLCCRSTPLQKSMVVKLVRSKLKAMTLAIGDGANDVSMIQVADVGVGISGQEGMQAVMASDFAVPKFRYLERLLILHGHWCYSRLANMVLYFFYKNTMFVGLLFWFQFFCGFSASTMIDQWYLIFFNLLFSSLPPLVTGVLDRDVPANVLLTNPQLYKSGQNMEEYRPRTFWFNMADAAFQSLVCFSIPYLAYYDSNVDLFTWGTPIVTIALLTFLLHLGIETKTWTWLNWITCGFSVLLFFTVALIYNASCATCYPPSNPYWTMQALLGDPVFYYDLQMDKRDVDFLSSPTQADQDFKGQTTDYL

SEQ ID NO: 873004 - protein, 1499 aa, Homo sapiens; identical to SEQ ID NO: 873000

SEQ ID NO: 873005 - protein, 1499 aa, Homo sapiens; identical to SEQ ID NO: 873000

SEQ ID NO: 873006 - protein, 1250 aa, Homo sapiens
MEREPAGTEEPGPPGRRRRREGRTRTVRSNLLPPPGAEDPAAGAAKGERRRRRGCAQHLADNRLKTTKYTLLSFLPKNLFEQFHRPANVYFVFIALLNFVPAVNAFQPGLALAPVLFILAITAFRDLWEDYSRHRSDHKINHLGCLVFSREEKKYVNRFWKEIHVGDFVRLRCNEIFPADILLLSSSDPDGLCHIETANLDGETNLKRRQVVRGFSELVSEFNPLTFTSVIECEKPNNDLSRFRGCIIHDNGKKAGLYKENLLLRGCTLRNTDAVVGIVIYAGHETKALLNNSGPRYKRSKLERQMNCDVLWCVLLLVCMSLFSAVGHGLWIWRYQEKKSLFYVPKSDGSSLSPVTAAVYSFLTMIIVLQVLIPISLYVSIEIVKACQVYFINQDMQLYDEETDSQLQCRALNITEDLGQIQYIFSDKTGTLTENKMVFRRCTVSGVEYSHDANAQRLARYQEADSEEEEVVPRGGSVSQRGSIGSHQSVRVVHRTQSTKSHRRTGSRAEAKRASMLSKHTAFSSPMEKDITPDPKLLEKVSECDKSLAVARHQEHLLAHLSPELSDVFDFFIALTICNTVVVTSPDQPRTKVRVRFELKSPVKTIEDFLRRFTPSCLTSGCSSIGSLAANKSSHKLGSSFPSTPSSDGMLLRLEERLGQPTSAIASNGYSSQADNWASELAQEQESERELRYEAESPDEAALVYAARAYNCVLVERLHDQVSVELPHLGRLTFELLHTLGFDSVRKRMSVVIRHPLTDEINVYTKGADSVVMDLLQPCSSVDARGRHQKKIRSKTQNYLNVYAAEGLRTLCIAKRVLSKEEYACWLQSHLEAESSLENSEELLFQSAIRLETNLHLLGATGIEDRLQDGVPETISKLRQAGLQIWVLTGDKQETAVNIAYACKLLDHDEEVITLNATSQEACAALLDQCLCYVQSRGLQRAPEKTKGKVSMRFSSLCPPSTSTASGRRPSLVIDGRSLAYALEKNLEDKFLFLAKQCRSVLCCRSTPLQKSMVVKLVRSKLKAMTLAIGDGANDVSMIQVADVGVGISGQEGMQAVMASDFAVPKFRYLERLLILHGHWCYSRLANMVLYFFYKNTMFVGLLFWFQFFCGFSASTMIDQWYLIFFNLLFSSLPPLVTGVLDRDVPANVLLTNPQLYKSGQNMEEYRPRTFWFNMADAAFQSLVCFSIPYLAYYDSNVDLFTWGTPIVTIALLTFLLHLGIETKTWVRAACMATSQKSTDAVDPTLPADS

SEQ ID NO: 873007 - protein, 134 aa, Homo sapiens
MPADLSGTWTLLSSDNFEGYMLALGIDFATRKIAKLLKPQKVIEQNGDSFTIHTNSSLRNYFVKFKVGEEFDEDNRGLDNRKCKSLVIWDNDRLTCIQKGEKKNRGWTHWIEGDKLHLEMFCEGQVCKQTFQRA

SEQ ID NO: 873008 - protein, 130 aa, Homo sapiens
WACIQGLFLGETVTEKALWGGELWAECPCSRAGGGSCFLPQGCSSSVGSSQGRAQGLPLSPQVREGFGGDKWSWVGVPWGSGAQVDGACLLLGEIDPHTHTHTHTHFVAHMHSCLLDKNSSITGHLLFGH

SEQ ID NO: 873009 - protein, 662 aa, Homo sapiens
SRRGRAAPSPRPDRSPAGEGLRRRRRRRPWWQWWRRSSLPGSCLELEERVVPGELCTGAAASPPVPPPQSPRSRRIRRRRRRQDMELENIVANSLLLKARQGGYGKKSGRSKKWKEILTLPPVSQCSELRHSIEKDYSSLCDKQPIGRRLFRQFCDTKPTLKRHIEFLDAVAEYEVADDEDRSDCGLSILDRFFNDKLAAPLPEIPPDVVTECRLGLKEENPSKKAFEECTRVAHNYLRGEPFEEYQESSYFSQFLQWKWLERQPVTKNTFRHYRVLGKGGFGEVCACQVRATGKMYACKKLQKKRIKKRKGEAMALNEKRILEKVQSRFVVSLAYAYETKDALCLVLTIMNGGDLKFHIYNLGNPGFDEQRAVFYAAELCCGLEDLQRERIVYRDLKPENILLDDRGHIRISDLGLATEIPEGQRVRGRVGTVGYMAPEVVNNEKYTFSPDWWGLGCLIYEMIQGHSPFKKYKEKVKWEEVDQRIKNDTEEYSEKFSEDAKSICRMLLTKNPSKRLGCRGEGAAGVKQHPVFKDINFRRLEANMLEPPFCPDPHAVYCKDVLDIEQFSAVKGIYLDTADEDFYARFATGCVSIPWQNEMIESGCFKDINKSESEEALPLDLDKNIHTPVSRPNRGFFYRLFRRGGCLTMVPSEKEVEPKQC

SEQ ID NO: 873010 - protein, 630 aa, Homo sapiens
SRRGRAAPSPRPDRSPAGEGLRRRRRRRPWWQWWRRSSLPGSCLELEERVVPGELCTGAAASPPVPPPQSPRSRRIRRRRRRQDMELENIVANSLLLKARQEKDYSSLCDKQPIGRRLFRQFCDTKPTLKRHIEFLDAVAEYEVADDEDRSDCGLSILDRFFNDKLAAPLPEIPPDVVTECRLGLKEENPSKKAFEECTRVAHNYLRGEPFEEYQESSYFSQFLQWKWLERQPVTKNTFRHYRVLGKGGFGEVCACQVRATGKMYACKKLQKKRIKKRKGEAMALNEKRILEKVQSRFVVSLAYAYETKDALCLVLTIMNGGDLKFHIYNLGNPGFDEQRAVFYAAELCCGLEDLQRERIVYRDLKPENILLDDRGHIRISDLGLATEIPEGQRVRGRVGTVGYMAPEVVNNEKYTFSPDWWGLGCLIYEMIQGHSPFKKYKEKVKWEEVDQRIKNDTEEYSEKFSEDAKSICRMLLTKNPSKRLGCRGEGAAGVKQHPVFKDINFRRLEANMLEPPFCPDPHAVYCKDVLDIEQFSAVKGIYLDTADEDFYARFATGCVSIPWQNEMIESGCFKDINKSESEEALPLDLDKNIHTPVSRPNRGFFYRLFRRGGCLTMVPSEKEVEPKQC

SEQ ID NO: 873011 - protein, 584 aa, Homo sapiens
SRRGRAAPSPRPDRSPAGEGLRRRRRRRPWWQWWRRSSLPGSCLELEERVVPGELCTGAAASPPVPPPQSPRSRRIRRRRRRQDMELENIVANSLLLKARQEKDYSSLCDKQPIGRRLFRQFCDTKPTLKRHIEFLDAVAEYEVADDEDRSDCGLSILDRFFNDKLAAPLPEIPPDVVTECRLGLKEENPSKKAFEECTRVAHNYLRGEPFEEYQESSYFSQFLQWKWLERQPVTKNTFRHYRVLGKGGFGEVCACQVRATGKMYACKKLQKKRIKKRKGEAMALNEKRILEKVQSRFVVSLAYAYETKDALCLVLTIMNGGDLKFHIYNLGNPGFDEQRAVFYAAELCCGLEDLQRERIVYRDLKPENILLDDRGHIRISDLGLATEIPEGQRVRGRVGTVGYMAPEVVNNEKYTFSPDWWGLGCLIYEMIQGHSPFKKYKEKVKWEEVDQRIKNDTEEYSEKFSEDAKSICRMLLTKNPSKRLGCRGEGAAGVKQHPVFKDINFRRLEANMLEPPFCPDPHAVYCKDVLDIEQFSAVKGIYLDTADEDFYARFATGCVSIPWQNEGCLTMVPSEKEVEPKQC

SEQ ID NO: 873012 - protein, 616 aa, Homo sapiens
SRRGRAAPSPRPDRSPAGEGLRRRRRRRPWWQWWRRSSLPGSCLELEERVVPGELCTGAAASPPVPPPQSPRSRRIRRRRRRQDMELENIVANSLLLKARQGGYGKKSGRSKKWKEILTLPPVSQCSELRHSIEKDYSSLCDKQPIGRRLFRQFCDTKPTLKRHIEFLDAVAEYEVADDEDRSDCGLSILDRFFNDKLAAPLPEIPPDVVTECRLGLKEENPSKKAFEECTRVAHNYLRGEPFEEYQESSYFSQFLQWKWLERQPVTKNTFRHYRVLGKGGFGEVCACQVRATGKMYACKKLQKKRIKKRKGEAMALNEKRILEKVQSRFVVSLAYAYETKDALCLVLTIMNGGDLKFHIYNLGNPGFDEQRAVFYAAELCCGLEDLQRERIVYRDLKPENILLDDRGHIRISDLGLATEIPEGQRVRGRVGTVGYMAPEVVNNEKYTFSPDWWGLGCLIYEMIQGHSPFKKYKEKVKWEEVDQRIKNDTEEYSEKFSEDAKSICRMLLTKNPSKRLGCRGEGAAGVKQHPVFKDINFRRLEANMLEPPFCPDPHAVYCKDVLDIEQFSAVKGIYLDTADEDFYARFATGCVSIPWQNEGCLTMVPSEKEVEPKQC

SEQ ID NO: 873013 - protein, 128 aa, Homo sapiens
AGGKSRGKVSPFFHSGAGVMTGEGPGRSEVMMVIMGVTAESGRVGARNRRSVSVRRQCSEADTQVTSLESPCSEMGNVAPFSEAPTLKGASCFKLLVLSSRFLQASLQSLVSKAIRPVRSRATCPVSP

SEQ ID NO: 873014 - protein, 43 aa, Homo sapiens
LGCVVLRMSHLEGRSKYMKIGFSGVQSNLFTLGLWQAPIPFMD

SEQ ID NO: 873015 - protein, 118 aa, Homo sapiens
MKLITILFLCSRLLLSLTQESQSEEIDCNDKDLFKAVDAALKKYNSQNQSNNQFVLYRITEATKTVRLALTRFIPSSTKSRRGIVLFKVAKPGRTVSTRMLQKHSKCIGHSWAFCFLR

SEQ ID NO: 873016 - protein, 467 aa, Homo sapiens
MLNEVKRAQRQVVAGLNFRITYSIVQTNCSKENFLFLTPDCKSLWNGDTGECTDNAYIDIQLRIASFSQNCDIYPGKDFVQPPTKICVGCPRDIPTNSPELEETLTHTITKLNAENNATFYFKIDNVKKARVQVVAGKKYFIDFVARETTCSKESNEELTESCETKKLGQSLDCNAEVYVVPWEKKIYPTVNCQPLGMISLMKRPPGFSPFRSSRIGEIKEETTVSPPHTSMAPAQDEERDSGKEQGHTRRHDWGHEKQRKHNLGHGHKHERDQGHGHQRGHGLGHGHEQQHGLGHGHKFKLDDDLEHQGGHVLDHGHKHKHGHGHGKHKNKGKKNGKHNGWKTEHLASSSEDSTTPSAQTQEKTEGPTPIPSLAKPGVTVTFSDFQDSDLIATMMPPISPAPTQSDDDWIPDIQIDPNGLSFNPISDFPDTTSPKCPGRPWKSVSEINPTTQMKESYYFDLTDGLS

SEQ ID NO: 873017 - protein, 467 aa, Homo sapiens; identical to SEQ ID NO: 873016

SEQ ID NO: 873018 - protein, 467 aa, Homo sapiens; identical to SEQ ID NO: 873016

SEQ ID NO: 873019 - protein, 437 aa, Homo sapiens
MLNEVKRAQRQVVAGLNFRITYSIVQTNCSKENFLFLTPDCKSLWNGDTGECTDNAYIDIQLRIASFSQNCDIYPGKDFVQPPTKICVGCPRDIPTNSPELEETLTHTITKLNAENNATFYFKIDNVKKARVQVVAGKKYFIDFVARETTCSKESNEELTESCETKKLGQSLDCNAEVYVVPWEKKIYPTVNCQPLGMISLMKRPPGFSPFRSSRIGEIKEETTVSPPHTSMAPAQDEERDSGKEQGHTRRHDWGHEKQRKHNLGHGHKHERDQGHGHQRGHGLGHGHEQQHGLGHGHKFKLDDDLEHQGGHVLDHGHKHKHGHGHGKHKNKGKKNGKHNGWKTEHLASSSEDSTTPSAQTQEKTEGPTPIPSLAKPGVTVTFSDFQDSDLIATMMPPISPAPTQSDDDWIPDIQIDPNGLSFNPISDFPDTTSPKK

SEQ ID NO: 873020 - protein, 449 aa, Homo sapiens
MLNESIVQTNCSKENFLFLTPDCKSLWNGDTGECTDNAYIDIQLRIASFSQNCDIYPGKDFVQPPTKICVGCPRDIPTNSPELEETLTHTITKLNAENNATFYFKIDNVKKARVQVVAGKKYFIDFVARETTCSKESNEELTESCETKKLGQSLDCNAEVYVVPWEKKIYPTVNCQPLGMISLMKRPPGFSPFRSSRIGEIKEETTVSPPHTSMAPAQDEERDSGKEQGHTRRHDWGHEKQRKHNLGHGHKHERDQGHGHQRGHGLGHGHEQQHGLGHGHKFKLDDDLEHQGGHVLDHGHKHKHGHGHGKHKNKGKKNGKHNGWKTEHLASSSEDSTTPSAQTQEKTEGPTPIPSLAKPGVTVTFSDFQDSDLIATMMPPISPAPTQSDDDWIPDIQIDPNGLSFNPISDFPDTTSPKCPGRPWKSVSEINPTTQMKESYYFDLTDGLS

SEQ ID NO: 873021 - protein, 199 aa, Homo sapiens
MLNEVKRAQRQVVAGLNFRITYSIVQTNCSKENFLFLTPDCKSLWNGDTGECTDNAYIDIQLRIASFSQNCDIYPGKDFVQPPTKICVGCPRDIPTNSPELEETLTHTITKLNAENNATFYFKIDNVKKARVQVVAGKKYFIDFVARETTCSKESNEELTESCETKKLGQSLDCNAEVYVVPWEKKIYPTVNCQPLGMV

SEQ ID NO: 873022 - protein, 631 aa, Homo sapiens
MKLITILFLCSRLLLSLTQESQSEEIDCNDKDLFKAVDAALKKYNSQNQSNNQFVLYRITEATKTVRLALTRFIPSSTKSRRGIVLFKVAKPGRTVSTRMLQKQKFSVATQTCQITPAEGPVVTAQYDCLGCVHPISTQSPDLEPILRHGIQYFNNNTQHSSLFMLNEVKRAQRQVVAGLNFRITYSIVQTNCSKENFLFLTPDCKSLWNGDTGECTDNAYIDIQLRIASFSQNCDIYPGKDFVQPPTKICVGCPRDIPTNSPELEETLTHTITKLNAENNATFYFKIDNVKKARVQVVAGKKYFIDFVARETTCSKESNEELTESCETKKLGQSLDCNAEVYVVPWEKKIYPTVNCQPLGMISLMKRPPGFSPFRSSRIGEIKEETTVSPPHTSMAPAQDEERDSGKEQGHTRRHDWGHEKQRKHNLGHGHKHERDQGHGHQRGHGLGHGHEQQHGLGHGHKFKLDDDLEHQGGHVLDHGHKHKHGHGHGKHKNKGKKNGKHNGWKTEHLASSSEDSTTPSAQTQEKTEGPTPIPSLAKPGVTVTFSDFQDSDLIATMMPPISPAPTQSDDDWIPDIQIDPNGLSFNPISDFPDTTSPKCPGRPWKSVSEINPTTQMKESYYFDLTDGLS

SEQ ID NO: 873023 - protein, 266 aa, Homo sapiens [sequence omitted]

SEQ ID NO: 873024 - protein, 250 aa, Homo sapiens
MLNEVKRAQRQVVAGLNFRITYSIVQTNCSKENFLFLTPDCKSLWNGDTGECTDNAYIDIQLRIASFSQNCDIYPGKDFVQPPTKICVGCPRDIPTNSPELEETLTHTITKLNAENNATFYFKIDNVKKARVQVVAGKKYFIDFVARETTCSKESNEELTESCETKKLGQSLDCNAEVYVVPWEKKIYPTVNCQPLGMISLMKRPPGFSPFRSSRIGEIKEETTSHLRSCEYKGRPPKAGAEPASEREVS

SEQ ID NO: 873025 - protein, 449 aa, Homo sapiens
MLNEVKRAQRQVVAGLNFRITYSIVQTNCSKENFLFLTPDCKSLWNGDTGECTDNAYIDIQLRIASFSQNCDIYPGKDFVQPPTKICVGCPRDIPTNSPELEETLTHTITKLNAENNATFYFKIDNVKKARVQVVAGKKYFIDFVARETTCSKESNEELTESCETKKLGQSLDCNAEVYVVPWEKKIYPTVNCQPLGMISLMKRPPGFSPFRSSRIGEIKEETTVSPPHTSMAPAQDEERDSGKEQGHTRRHDWGHEKQRKHNLGHGHKHERDQGHGHQRGHGLGHGHEQQHGLGHGHKFKLDDDLEHQGGHVLDHGHKHKHGHGHGKHKNKGKKNGKHNGWTQEKTEGPTPIPSLAKPGVTVTFSDFQDSDLIATMMPPISPAPTQSDDDWIPDIQIDPNGLSFNPISDFPDTTSPKCPGRPWKSVSEINPTTQMKESYYFDLTDGLS

SEQ ID NO: 873026 - protein, 467 aa, Homo sapiens; identical to SEQ ID NO: 873016

SEQ ID NO: 873027 - protein, 451 aa, Homo sapiens
MLNEVKRAQRQVVAGLNFRITYSIVQTNCSKENFLFLTPDCKSLWNGDTGECTDNAYIDIQLRIASFSQNCDIYPGKDFVQPPTKICVGCPRDIPTNSPELEETLTHTITKLNAENNATFYFKIDNVKKARVQVVAGKKYFIDFVARETTCSKESNEELTESCETKKLGQSLDCNAEVYVVPWEKKIYPTVNCQPLGMISLMKRPPGFSPFRSSRIGEIKEETTVSPPHTSMAPAQDEERDSGKEQGHTRRHDWGHEKQRKHNLGHGHKHERDQGHGHQRGHGLGHGHEQQHGLGHGHKFKLDDDLEHQGGHVLDHGHKHKHGHGHGKHKNKGKKNGKHNGWKTEHLASSSEDSTTPSAQTQEKTEGPTPIPSLAKPGVTVTFSDFQDSDLIATMMPPISPAPTQSDDDWIPDIQIDPNGCPGRPWKSVSEINPTTQMKESYYFDLTDGLS

SEQ ID NO: 873028 - protein, 626 aa, Homo sapiens
MKLITILFLCSRLLLSLTQESQSEEIDCNDKDLFKAVDAALKKYNSPVGSDTFYSFKYEIKEGDCPVQSGKTWQDCEYKDAAKAATGECTATVGKRSSTKFSVATQTCQITPAEGPVVTAQYDCLGCVHPISTQSPDLEPILRHGIQYFNNNTQHSSLFMLNEVKRAQRQVVAGLNFRITYSIVQTNCSKENFLFLTPDCKSLWNGDTGECTDNAYIDIQLRIASFSQNCDIYPGKDFVQPPTKICVGCPRDIPTNSPELEETLTHTITKLNAENNATFYFKIDNVKKARVQVVAGKKYFIDFVARETTCSKESNEELTESCETKKLGQSLDCNAEVYVVPWEKKIYPTVNCQPLGMISLMKRPPGFSPFRSSRIGEIKEETTVSPPHTSMAPAQDEERDSGKEQGHTRRHDWGHEKQRKHNLGHGHKHERDQGHGHQRGHGLGHGHEQQHGLGHGHKFKLDDDLEHQGGHVLDHGHKHKHGHGHGKHKNKGKKNGKHNGWKTEHLASSSEDSTTPSAQTQEKTEGPTPIPSLAKPGVTVTFSDFQDSDLIATMMPPISPAPTQSDDDWIPDIQIDPNGLSFNPISDFPDTTSPKCPGRPWKSVSEINPTTQMKESYYFDLTDGLS

SEQ ID NO: 873029 - protein, 621 aa, Homo sapiens
MKLITILFLCSRLLLSLTQESQSEEIDCNDKDLFKAVDAALKKYNSQNQSNNQFVLYRITEATKTVRLALTRFIPSSTKSRRGIVLFKVAKPGRTVSTRMLQKQPLENARQPWGRGAVRNSPWLPRPARLLQLEPILRHGIQYFNNNTQHSSLFMLNEVKRAQRQVVAGLNFRITYSIVQTNCSKENFLFLTPDCKSLWNGDTGECTDNAYIDIQLRIASFSQNCDIYPGKDFVQPPTKICVGCPRDIPTNSPELEETLTHTITKLNAENNATFYFKIDNVKKARVQVVAGKKYFIDFVARETTCSKESNEELTESCETKKLGQSLDCNAEVYVVPWEKKIYPTVNCQPLGMISLMKRPPGFSPFRSSRIGEIKEETTVSPPHTSMAPAQDEERDSGKEQGHTRRHDWGHEKQRKHNLGHGHKHERDQGHGHQRGHGLGHGHEQQHGLGHGHKFKLDDDLEHQGGHVLDHGHKHKHGHGHGKHKNKGKKNGKHNGWKTEHLASSSEDSTTPSAQTQEKTEGPTPIPSLAKPGVTVTFSDFQDSDLIATMMPPISPAPTQSDDDWIPDIQIDPNGLSFNPISDFPDTTSPKCPGRPWKSVSEINPTTQMKESYYFDLTDGLS

SEQ ID NO: 873030 - protein, 642 aa, Homo sapiens
MKLITILFLCSRLLLSLTQESQSEEIDCNDKDLFKAVDAALKKYNSQNQSNNQFVLYRITEATKTVRLALTRFIPSSTKSRRGIVLFKVAKPGRTVSTRMLQKHPRERHKTREKEPYPNPPAIQSCHILQTRAFVTNPNQWVCVHPISTQSPDLEPILRHGIQYFNNNTQHSSLFMLNEVKRAQRQVVAGLNFRITYSIVQTNCSKENFLFLTPDCKSLWNGDTGECTDNAYIDIQLRIASFSQNCDIYPGKDFVQPPTKICVGCPRDIPTNSPELEETLTHTITKLNAENNATFYFKIDNVKKARVQVVAGKKYFIDFVARETTCSKESNEELTESCETKKLGQSLDCNAEVYVVPWEKKIYPTVNCQPLGMISLMKRPPGFSPFRSSRIGEIKEETTVSPPHTSMAPAQDEERDSGKEQGHTRRHDWGHEKQRKHNLGHGHKHERDQGHGHQRGHGLGHGHEQQHGLGHGHKFKLDDDLEHQGGHVLDHGHKHKHGHGHGKHKNKGKKNGKHNGWKTEHLASSSEDSTTPSAQTQEKTEGPTPIPSLAKPGVTVTFSDFQDSDLIATMMPPISPAPTQSDDDWIPDIQIDPNGLSFNPISDFPDTTSPKCPGRPWKSVSEINPTTQMKESYYFDLTDGLS

SEQ ID NO: 873031 - protein, 102 aa, Homo sapiens
MKLITIPSLAKPGVTVTFSDFQDSDLIATMMPPISPAPTQSDDDWIPDIQIDPNGLSFNPISDFPDTTSPKCPGRPWKSVSEINPTTQMKESYYFDLTDGLS

SEQ ID NO: 873032 - protein, 623 aa, Homo sapiens
MEHAVAPCVLYPGTEPGAAGESESEGAASPAQTPCSLGASLCFSSGEESPPQSLASAAEGAATSPPSSGGPRVVERQWEAGSAGAASPEELASPEERACPEEPAAPSPEPRVWLEDPASPEEPGEPAPVPPGFGAVYGEPDLVLEVSGRRLRAHKAVLAARSDYFRARASRDVLRVQGVSLTALRLLLADAYSGRMAGVRPDNVAEVVAGARRLQLPGAAQRATDAVGPQLSLANCYEVLSAAKRQRLNELRDAAYCFMSDHYLEVLREPAVFGRLSGAERDLLLRRRLRAGRAHLLAAALGPAGERAGSRPQSPSGDADARGDAAVYCFHAAAGEWRELTRLPEGAPARGCGLCVLYNYLFVAGGVAPAGPDGRARPSDQVFCYNPATDSWSAVRPLRQARSQLRLLALDGHLYAVGGECLLSVERYDPRADRWAPVAPLPRGAFAVAHEATTCHGEIYVSGGSLFYRLLKYDPRRDEWQECPCSSSRERSADMVALDGFIYRFDLSGSRGEAQAAGPSGVSVSRYHCLAKQWSPCVAPLRLPGGPTGLQPFRCAALDGAIYCVSRAGTWRFQPAREGEAGGDAGQGGGFEALGAPLDVRGVLIPFALSLPEKPPRGEQGAP

SEQ ID NO: 873033 - protein, 623 aa, Homo sapiens; identical to SEQ ID NO: 873032

SEQ ID NO: 873034 - protein, 623 aa, Homo sapiens; identical to SEQ ID NO: 873032

SEQ ID NO: 873035 - protein, 115 aa, Homo sapiens
RRACSRQHGASLSSTAMNPGIHVRGSHCRTWKSGKRKANCLETKPECRRKSRVEGCLLPPTQQKQGIWPFPSPRLAMEASLGGLIPVLDPSGVPPIVTGEPRPATRWISWELCQK

SEQ ID NO: 873036 - protein, 133 aa, Homo sapiens
RARRCGPSPVGFSSASLSLPPCRGLAVLRVPVDLWNSGISSQSPLTFIILLYELGMMGAVMPLEQMGKPRLGSQSWWDTEPVTDIEEQWGRITVPSGAFSLSKAVSITTNRKSQGSETPGQCGVIHAHPSLWP

SEQ ID NO: 873037 - protein, 130 aa, Homo sapiens
MLASFSGSPSLVVAKRLPKPLGRYPTLSEIPTEKEGPRSMSDWTNLGHVPIPKPRTIARGMEFYFEWPSPATSLDLRDGTSSSEGIWTENVFPRKMVHCFQNKGDLMLNRQRQICPLQGWELHLSHAGNV

SEQ ID NO: 873038 - protein, 70 aa, Homo sapiens
NHVMLAKTAEDMGKKFYIVWTKLDMDLSTGALPEVQLLQIRENVLENLQKERSSRNQQVYPNHSHVPLAC

SEQ ID NO: 873039 - protein, 158 aa, Homo sapiens
RPRVSLQRGCGLNSGRRRNSGAALGREYKAGWWPLCGTAPAARLPGGPHPCVPETLLLKNALSNATVRPRATRARLEGSLFPFSNCSGHLNGLSLPESRPQPRCPHLAWAGPKLVSRFKSAPAISLPALPGRLGGGPPNGFLSSFQRLHISLNYLKYL

SEQ ID NO: 873040 - protein, 102 aa, Homo sapiens
SALVCWLRSLCPAGRVALSLLSPPVPSEPPFPSHSLVHQYTPATQALALFFRNLSSFACWFPYCYPLILRDFYSLIPPCSRCLRRRGRQIVCPVSIYNLSLF

SEQ ID NO: 873041 - protein, 122 aa, Homo sapiens
PESFRFPAKSFDVDSGPSQCCRALLRELLPLLLAPDPASLGWRRRKRKRGYCLHGPARKPHPGPGAFCLPVTRSRCYLLSPVLWVLPSTGPSIALLFHLADSSTFFTFLFFFLRRSLSCCPG

SEQ ID NO: 873042 - protein, 113 aa, Homo sapiens
MGKARRKPVPGPLGSLLLRAEAVHTRNPASPGLPRGSTPGGRAAAWARSRLCRKQIMTHFSGSPGPGPRAVASAKLSGPGHQLPASQPEATAAQHPAPFKVAPKRRKPNRSGW

SEQ ID NO: 873043 - protein, 113 aa, Homo sapiens; identical to SEQ ID NO: 873042

SEQ ID NO: 873044 - protein, 108 aa, Homo sapiens
VCTECRHTLPSLYQNVRLPAGEQVFCIKHIVCINSSGIVSHCYQKPRFLEATQESTLQEGLSKHKHLCLPCLTLLHSRGPTQNSQNNLGKKNKFGRLILPDFRTSTKV

SEQ ID NO: 873045 - protein, 340 aa, Homo sapiens
MSGEPELIELRELAPAGRAGKGRTRLERANALRIARGTACNPTRQLVPGRGHRFQPAGPATHTWCDLCGDFIWGVVRKGLQCAHCKFTCHYRCRALVCLDCCGPRDLGWEPAVERDTNVDEPVEWETPDLSQAEIEQKIKEYNAQINSNLFMSLNKDGSYTGFIKVQLKLVRPVSVPSSKKPPSLQDARRGPGRGTSVRRRTSFYLPKDAVKHLHVLSRTRAREVIEALLRKFLVVDDPRKFALFERAERHGQVYLRKLLDDEQPLRLRLLAGPSDKALSFVLKENDSGEVNWDAFSMPELHNFLRILQREEEEHLRQILQKYSYCRQKIQEALHACPLG

SEQ ID NO: 873046 - protein, 189 aa, Homo sapiens
MSLNKDGSYTGFIKVQLKLVRPVSVPSSKKPPSLQDARRGPGRGTSVRRRTSFYLPKDAVKHLHVLSRTRAREVIEALLRKFLVVDDPRKFALFERAERHGQVYLRKLLDDEQPLRLRLLAGPSDKALSFVLKENDSGEVNWDAFSMPELHNFLRILQREEEEHLRQILQKYSYCRQKIQEALHACPLG

SEQ ID NO: 873047 - protein, 152 aa, Homo sapiens
MSGEPELIELRELAPAGRAGKGRTRLERANALRIARGTACNPTRQLVPGRGHRFQPAGPATHTWCDLCGDFIWGVVRKGLQCAQQGRFLHRLHQGSAEAGAPCLCALQQEATLLAGCPAGPRTGHKCQAPHFLLPAQGCCQAPACAVTHKGT

SEQ ID NO: 873048 - protein, 189 aa, Homo sapiens; identical to SEQ ID NO: 873046

SEQ ID NO: 873049 - protein, 263 aa, Homo sapiens [sequence omitted]

SEQ ID NO: 873050 - protein, 145 aa, Homo sapiens [sequence omitted]

SEQ ID NO: 873051 - protein, 270 aa, Homo sapiens
MGEAEAPSFEMTWSSTTSSGYCSQEDSDSELEQYFTARTSLARRPRRDQDEPVEWETPDLSQAEIEQKIKEYNAQINSNLFMSLNKDGSYTGFIKVQLKLVRPVSVPSSKKPPSLQDARRGPGRGTSVRRRTSFYLPKDAVKHLHVLSRTRAREVIEALLRKFLVVDDPRKFALFERAERHGQVYLRKLLDDEQPLRLRLLAGPSDKALSFVLKENDSGEVNWDAFSMPELHNFLRILQREEEEHLRQILQKYSYCRQKIQEALHACPLG

SEQ ID NO: 873052 - protein, 189 aa, Homo sapiens; identical to SEQ ID NO: 873046

SEQ ID NO: 873053 - protein, 270 aa, Homo sapiens; identical to SEQ ID NO: 873051

SEQ ID NO: 873054 - protein, 189 aa, Homo sapiens; identical to SEQ ID NO: 873046

SEQ ID NO: 873055 - protein, 191 aa, Homo sapiens
LLAGCPAGGFLLEGTETGQHQLQLNLDEACVRTASLQDARRGPGRGTSVRRRTSFYLPKDAVKHLHVLSRTRAREVIEALLRKFLVVDDPRKFALFERAERHGQVYLRKLLDDEQPLRLRLLAGPSDKALSFVLKENDSGEVNWDAFSMPELHNFLRILQREEEEHLRQILQKYSYCRQKIQEALHACPLG

SEQ ID NO: 873056 - protein, 140 aa, Homo sapiens [sequence omitted]

SEQ ID NO: 873057 - protein, 122 aa, Homo sapiens
NGTKRRILYVVLRREQSPALLDVVLGNLLETMSLLHSESSGGFPVPLTWNQTPRLAMQSGPGILAPSPVHCGWLCWPRGSQALHPHAPLSTCTCVPPPALTSCPPALICDASVRPLLPACPL

SEQ ID NO: 873058 - protein, 118 aa, Homo sapiens [sequence omitted]

SEQ ID NO: 873059 - protein, 487 aa, Homo sapiens
TVLIVGRIAIGVSISLSSIATCVYIAEIAPQHRRGLLVSLNELMIVIGILSAYISNYAFANVFHGWKYMFGLVIPLGVLQAIAMYFLPPSPRFLVMKGQEGAASKVLGRLRALSDTTEELTVIKSSLKDEYQYSFWDLFRSKDNMRTRIMIGLTLVFFVQITGQPNILFYASTVLKSVGFQSNEAASLASTGVGVVKVISTIPATLLVDHVGSKTFLCIGSSVMAASLVTMGIVNLNIHMNFTHICRSHNSINQSLDESVIYGPGNLSTNNNTLRDHFKGISSHSRSSLMPLRNDVDKRGETTSASLLNAGLSHTEYQIVTDPGDVPAFLKWLSLASLLVYVAAFSIGLGPMPWLVLSEIFPGGIRGRAMALTSSMNWGINLLISLTFLTVTDLIGLPWVCFIYTIMSLASLLFVVMFIPETKGCSLEQISMELAKVNYVKNNICFMSHHQEELVPKQPQKRKPQEQLLECNKLCGRGQSRQLSPET

SEQ ID NO: 873060 - protein, 149 aa, Homo sapiens
RERVIPLSSQLEASLRTLEDRGIRKISGTGKALAKTEKYEHKSEVKTYDPSGDSTLPTCSKKRKIEQVDKEDEITEKKAKKAKIKVKVEEEEEEKVAEEEETSVKKKKKRGKKKHIKEEPLSEEEPCTSTAIASPEKKKKKKKKRENED

SEQ ID NO: 873061 - protein, 78 aa, Homo sapiens
MAEEEETSVKKKKKRGKKKHIKEEPLSEEEPCTSTAIASPEKKNEQNANDNERARRKSPCKELPIVSPRIHAREGTEL

SEQ ID NO: 873062 - protein, 59 aa, Homo sapiens
QPLRSSQFEVKTYDPSGDSTLPTCSKKRKIEQVDKEDEITEKKAKKAKIKVKVEEETQT

SEQ ID NO: 873063 - protein, 529 aa, Homo sapiens
MLVLFETSVGYAIFKVLNEKKLQEVDSLWKEFETPEKANKIVKLKHFEKFQDTAEALAAFTALMEGKINKQLKKVLKKIVKEAHEPLAVADAKLGGVIKEKLNLSCIHSPVVNELMRGIRSQMDGLIPGVEPREMAAMCLGLAHSLSRYRLKFSADKVDTMIVQAISLLDDLDKELNNYIMRCREWYGWHFPELGKIISDNLTYCKCLQKVGDRKNYASAKLSELLPEEVEAEVKAAAEISMGTEVSEEDICNILHLCTQVIEISEYRTQLYEYLQNRMMAIAPNVTVMVGELVGARLIAHAGSLLNLAKHAASTVQILGAEKALFRALKSRRDTPKYGLIYHASLVGQTSPKHKGKISRMLAAKTVLAIRYDAFGEDSSSAMGVENRAKLEARLRTLEDRGIRKISGTGKALAKTEKYEHKSEVKTYDPSGDSTLPTCSKKRKIEQVDKEDEITEKKAKKAKIKVKVEEEEEEKVAEEEETSVKKKKKRGKKKHIKEEPLSEEEPCTSTAIASPEKKKKKKKKRENED

SEQ ID NO: 873064 - protein, 529 aa, Homo sapiens; identical to SEQ ID NO: 873063

SEQ ID NO: 873065 - protein, 521 aa, Homo sapiens
MLVLFETSVGYAIFKVLNEKKLQEVDSLWKEFETPEKANKIVKLKHFEKFQDTAEALAAFTALMEGKINKQLKKVLKKIVKEAHEPLAVADAKLGGVIKEKLNLSCIHSPVVNELMRGIRSQMDGLIPGVEPREMAAMCLGLAHSLSRYRLKFSADKVDTMIVQAISLLDDLDKELNNYIMRCREWYGWHFPELGKIISDNLTYCKCLQKVGDRKNYASAKLSELLPEEVEAEVKAAAEISMGTEVSEEDICNILHLCTQVIEISEYRTQLYEYLQNRMMAIAPNVTVMVGELVGARLIAHAGSLLNLAKHAASTVQILGAEKALFRALKSRRDTPKYGLIYHASLVGQTSPKHKGKISRMLAAKTVLAIRYDAFGEDSSSAMGVENRAKLEARLRTLEDRGIRKISGTGKALAKTEKYEHKSEVKTYDPSGDSTLPTCSKKRKIEQVDKEDEITEKKAKKAKIKVKVEEEEEEKVAEEEETSVKKKKKRGKKKHIKEEPLSEEEPCTSTAIAVCLFLIIG

SEQ ID NO: 873066 - protein, 466 aa, Homo sapiens
MEGKINKQLKKVLKKIVKEAHEPLAVADAKLGGVIKEKLNLSCIHSPVVNELMRGIRSQMDGLIPGVEPREMAAMCLGLAHSLSRYRLKFSADKVDTMIVQAISLLDDLDKELNNYIMRCREWYGWHFPELGKIISDNLTYCKCLQKVGDRKNYASAKLSELLPEEVEAEVKAAAEISMGTEVSEEDICNILHLCTQVIEISEYRTQLYEYLQNRMMAIAPNVTVMVGELVGARLIAHAGSLLNLAKHAASTVQILGAEKALFRALKSRRDTPKYGLIYHASLVGQTSPKHKGKISRMLAAKTVLAIRYDAFGEDSSSAMGVENRAKLEARLRTLEDRGIRKISGTGKALAKTEKYEHKSEVKTYDPSGDSTLPTCSKKRKIEQVDKEDEITEKKAKKAKIKVKVEEEEEEKVAEEEETSVKKKKKRGKKKHIKEEPLSEEEPCTSTAIASPEKKKKKKKKRENED

SEQ ID NO: 873067 - protein, 466 aa, Homo sapiens; identical to SEQ ID NO: 873066

SEQ ID NO: 873068 - protein, 331 aa, Homo sapiens
MLVLFETSVGYAIFKVLNEKKLQEVDSLWKEFETPEKANKIVKLKHFEKFQDTAEALAAFTALMEGKINKQLKKVLKKIVKEAHEPLAVADAKLGGVIKEKLNLSCIHSPVVNELMRGIRSQMDGLIPGVEPREMAAMCLGLAHSLSRYRLKFSADKVDTMIVQAISLLDDLDKELNNYIMRCREWYGWHFPELGKIISDNLTYCKCLQKVGDRKNYASAKLSELLPEEVEAEVKAAAEISMGTEVSEEDICNILHLCTQVIEISEYRTQLYEYLQNRMMAIAPNVTVMVGELVGARLIAHAGDGFNVICKYECLKYFLVRILFTSLNYSC

SEQ ID NO: 873069 - protein, 545 aa, Homo sapiens
MMSEFTVGSSDRPVVHNSVVFSRIAVPRFNIIATVVMDTSFSLHSIVLYVQISSKLGSCYENDRFRFALSDHRSESACTPGRTSHCFMNELEPELIDSSDFFVFFAATIFLPEERDGPQPTAAAKMAVNELMRGIRSQMDGLIPGVEPREMAAMCLGLAHSLSRYRLKFSADKVDTMIVQAISLLDDLDKELNNYIMRCREWYGWHFPELGKIISDNLTYCKCLQKVGDRKNYASAKLSELLPEEVEAEVKAAAEISMGTEVSEEDICNILHLCTQVIEISEYRTQLYEYLQNRMMAIAPNVTVMVGELVGARLIAHAGSLLNLAKHAASTVQILGAEKALFRALKSRRDTPKYGLIYHASLVGQTSPKHKGKISRMLAAKTVLAIRYDAFGEDSSSAMGVENRAKLEARLRTLEDRGIRKISGTGKALAKTEKYEHKSEVKTYDPSGDSTLPTCSKKRKIEQVDKEDEITEKKAKKAKIKVKVEEEEEEKVAEEEETSVKKKKKRGKKKHIKEEPLSEEEPCTSTAIASPEKKKKKKKKRENED

SEQ ID NO: 873070 - protein, 451 aa, Homo sapiens
GCSEFGTSGTRADAKLGGVIKEKLNLSCIHSPVVNELMRGIRSQMDGLIPGVEPREMAAMCLGLAHSLSRYRLKFSADKVDTMIVQAISLLDDLDKELNNYIMRCREWYGWHFPELGKIISDNLTYCKCLQKVGDRKNYASAKLSELLPEEVEAEVKAAAEISMGTEVSEEDICNILHLCTQVIEISEYRTQLYEYLQNRMMAIAPNVTVMVGELVGARLIAHAGSLLNLAKHAASTVQILGAEKALFRALKSRRDTPKYGLIYHASLVGQTSPKHKGKISRMLAAKTVLAIRYDAFGEDSSSAMGVENRAKLEARLRTLEDRGIRKISGTGKALAKTEKYEHKSEVKTYDPSGDSTLPTCSKKRKIEQVDKEDEITEKKAKKAKIKVKVEEEEEEKVAEEEETSVKKKKKRGKKKHIKEEPLSEEEPCTSTAIASPEKKKKKKKKRENED

SEQ ID NO: 873071 - protein, 285 aa, Homo sapiens
PGNRGRRRCIFCSLHPVIEISEYRTQLYEYLQNRMMAIAPNVTVMVGELVGARLIAHAGSLLNLAKHAASTVQILGAEKALFRALKSRRDTPKYGLIYHASLVGQTSPKHKGKISRMLAAKTVLAIRYDAFGEDSSSAMGVENRAKLEARLRTLEDRGIRKISGTGKALAKTEKYEHKSEVKTYDPSGDSTLPTCSKKRKIEQVDKEDEITEKKAKKAKIKVKVEEEEEEKVAEEEETSVKKKKKRGKKKHIKEEPLSEEEPCTSTAIASPEKKKKKKKKRENED

SEQ ID NO: 873072 - protein, 173 aa, Homo sapiens
  misc_feature (10)..(10): Xaa can be any naturally occurring amino acid
GGGWVNRTRXVLAIRYDAFGEDSSSAMGVENRAKLEARLRTLEDRGIRKISGTGKALAKTEKYEHKSEVKTYDPSGDSTLPTCSKKRKIEQVDKEDEITEKKAKKAKIKVKVEEEEEEKVAEEEETSVKKKKKRGKKKHIKEEPLSEEEPCTSTAIASPEKKKKKKKKRENED

SEQ ID NO: 873073 - protein, 145 aa, Homo sapiens
MLVLFETSVGYAIFKVLNEKKLQEVDSLWKEFETPEKANKIVKLKHFEKFQDTAEALAAFTALMEGKINKQLKKVLKKIVKEAHEPLAVADAKLGGVIKEKLNLSCIHSPVVNELMRGIRSQMDGLIPGVEPREMAAMCLGLAHR

SEQ ID NO: 873074 - protein, 117 aa, Homo sapiens
MRGRVDYEHKSEVKTYDPSGDSTLPTCSKKRKIEQVDKEDEITEKKAKKAKIKVKVEEEEEEKVAEEEETSVKKKKKRGKKKHIKEEPLSEEEPCTSTAIASPEKKKKKKKKRENED

SEQ ID NO: 873075 - protein, 171 aa, Homo sapiens
MLVLFETSVGYAIFKVLNEKKLQEVDSLWKEFETPEKANKIVKLKHFEKFQDTAEALAAFTALMEGKINKQLKKVLKKIVKEAHEPLAVADAKLGGVIKEKLNLSCIHSPVVNELMRGIRSQMDGLIPGVEPREMAAMCLGLAHSLARIRLKEALISHHDGRNPGNDWIKL

SEQ ID NO: 873076 - protein, 529 aa, Homo sapiens; identical to SEQ ID NO: 873063

SEQ ID NO: 873077 - protein, 529 aa, Homo sapiens; identical to SEQ ID NO: 873063

SEQ ID NO: 873078 - protein, 529 aa, Homo sapiens; identical to SEQ ID NO: 873063

SEQ ID NO: 873079 - protein, 494 aa, Homo sapiens
MRRNFKRLIVYGKNLKLQRKQTKSFTALMEGKINKQLKKVLKKIVKEAHEPLAVADAKLGGVIKEKLNLSCIHSPVVNELMRGIRSQMDGLIPGVEPREMAAMCLGLAHSLSRYRLKFSADKVDTMIVQAISLLDDLDKELNNYIMRCREWYGWHFPELGKIISDNLTYCKCLQKVGDRKNYASAKLSELLPEEVEAEVKAAAEISMGTEVSEEDICNILHLCTQVIEISEYRTQLYEYLQNRMMAIAPNVTVMVGELVGARLIAHAGSLLNLAKHAASTVQILGAEKALFRALKSRRDTPKYGLIYHASLVGQTSPKHKGKISRMLAAKTVLAIRYDAFGEDSSSAMGVENRAKLEARLRTLEDRGIRKISGTGKALAKTEKYEHKSEVKTYDPSGDSTLPTCSKKRKIEQVDKEDEITEKKAKKAKIKVKVEEEEEEKVAEEEETSVKKKKKRGKKKHIKEEPLSEEEPCTSTAIASPEKKKKKKKKRENED

SEQ ID NO: 873080 - protein, 366 aa, Homo sapiens [sequence omitted]

SEQ ID NO: 873081 - protein, 369 aa, Homo sapiens
MIVQAISLLDDLDKELNNYIMRCREWYGWHFPELGKIISDNLTYCKCLQKVGDRKNYASAKLSELLPEEVEAEVKAAAEISMGTEVSEEDICNILHLCTQVIEISEYRTQLYEYLQNRMMAIAPNVTVMVGELVGARLIAHAGSLLNLAKHAASTVQILGAEKALFRALKSRRDTPKYGLIYHASLVGQTSPKHKGKISRMLAAKTVLAIRYDAFGEDSSSAMGVENRAKLEARLRTLEDRGIRKISGTGKALAKTEKYEHKSEVKTYDPSGDSTLPTCSKKRKIEQVDKEDEITEKKAKKAKIKVKVEEEEEEKVAEEEETSVKKKKKRGKKKHIKEEPLSEEEPCTSTAIASPEKKKKKKKKRENED

SEQ ID NO: 873082 - protein, 169 aa, Homo sapiens [sequence omitted]

SEQ ID NO: 873083 - protein, 162 aa, Homo sapiens
GLLLLNSRPVDSSSAMGVENRAKLEARLRTLEDRGIRKISGTGKALAKTEKYEHKSEVKTYDPSGDSTLPTCSKKRKIEQVDKEDEITEKKAKKAKIKVKVEEEEEEKVAEEEETSVKKKKKRGKKKHIKEEPLSEEEPCTSTAIASPEKKKKKKKKRENED

SEQ ID NO: 873084 - protein, 103 aa, Homo sapiens
RVARVGWLGAFLPSQVDCLRAPESPCSHSYPRLQAEGREGLGTFPLPFPPLQLQFPWPPLGIWKSLGNLKKIFLESLSIAPQPCEGATAKRKKEKEWVGVTRG

SEQ ID NO: 873085 - protein, 262 aa, Homo sapiens
KVDGSALSCCRKWEERKVVMAAIAASEVLVDSAEEGSLAAAAELAAQKREQRLRKFRELHLMRNEARKLNHQEVVEEDKRLKLPANWEAKKARLEWELKEEEKKKECAARGEDYEKVKLLEISAEDAERWERKKKRKNPDLGFSDYAAAQLRQYHRLTKQIKPDMETYERLREKHGEEFFPTSNSLLHGTHVPSTEEIDRMVIDLEKQIEKRDKYSRRRPYNDDADIDYINERNAKFNKKAERFYGKYTAEIKQNLERGTAV

SEQ ID NO: 873086 - protein, 262 aa, Homo sapiens; identical to SEQ ID NO: 873085

SEQ ID NO: 873087 - protein, 220 aa, Homo sapiens
KVDGSALSCCRKWEERKVVMAAIAASEVLVDSAEEGSLAAAAELAAQKREQRLRKFRELHLMRECAARGEDYEKVKLLEISAEDAERWERKKKRKNPDLGFSDYAAAQLRQYHRLTKQIKPDMETYERLREKHGEEFFPTSNSLLHGTHVPSTEEIDRMVIDLEKQIEKRDKYSRRRPYNDDADIDYINERNAKFNKKAERFYGKYTAEIKQNLERGTAV

SEQ ID NO: 873088 - protein, 95 aa, Homo sapiens
  misc_feature (9)..(9): Xaa can be any naturally occurring amino acid
  misc_feature (13)..(13): Xaa can be any naturally occurring amino acid
RRGTKEEEXKVEXVPLHGLLHGTHVPSTEEIDRMVIDLEKQIEKRDKYSRRRPYNDDADIDYINERNAKFNKKAERFYGKYTAEIKQNLERGTAV

SEQ ID NO: 873089 - protein, 262 aa, Homo sapiens; identical to SEQ ID NO: 873085

SEQ ID NO: 873090 - protein, 93 aa, Homo sapiens
KVDGSALSCCRKWEERKVVMAAIAASEVLVDSAEEGSLAAAAELAAQKREQRLRKFRELHLMRVSSLGGRLRSVIWPSLCAFVEGTRKPHHCV

SEQ ID NO: 873091 - protein, 201 aa, Homo sapiens
MRNEARKLNHQEVVEEDKRLKLPANWEAKKARLEWELKEEEKKKECAARGEDYEKVKLLEISAEDAERWERKKKRKNPDLGFSDYAAAQLRQYHRLTKQIKPDMETYERLREKHGEEFFPTSNSLLHGTHVPSTEEIDRMVIDLEKQIEKRDKYSRRRPYNDDADIDYINERNAKFNKKAERFYGKYTAEIKQNLERGTAV

SEQ ID NO: 873092 - protein, 115 aa, Homo sapiens
KVDGSALSCCRKWEERKVVMAAIAASEVLVDSAEEGSLAAAAELAAQKREQRLRKFRELHLMRNEARKLNHQEVAEKGKKSGDEEGRGKEKAAKQWFGWAVFQSIPPFKILIKYS

SEQ ID NO: 873093 - protein, 321 aa, Homo sapiens
MACYIYQLPSWVLDDLCRNMDALSEWDWMEFASYVITDLTQLRKIKSMERVQGVSITRELLWWWGMRQATVQQLVDLLCRLELYRAAQIILNWKPAPEIRCPIPAFPDSVKPEKPLAASVRKAEDEQEEGQPVRMATFPGPGSSPARAHQPAFLQPPEEDAPHSLRSDLPTSSDSKDFSTSIPKQEKLLSLAGDSLFWSEADVVQATDDFNQNRKISQGTFADVYRGHRHGKPFVFKKLRETACSSPGSIERFFQAELQICLRCCHPNVLPVLGFCAARQFHSFIYPYMANGSLQDRLQGQGGSDPLPWPQRVSICSGLLC

SEQ ID NO: 873094 - protein, 130 aa, Homo sapiens
VLDPMGAQQSQRCNLGHLWTSANGGVSSVEAVVGEDVLEKPSSGASVGTCPRGTASLTLSRVLSSLPASYVITDLTQLRKIKSMERVQGVSITRELLWWWGMRQATVQQLVDLLCRLELYRAAQIILNCE

SEQ ID NO: 873095 - protein, 72 aa, Homo sapiens
KWKAPLRSLFRASLRDSLAHHPRLPVECPRRSGAAVTLAVRTEEEAPWGAGRRRTIRPSASRTWAENPPAPR

SEQ ID NO: 873096 - protein, 101 aa, Homo sapiens
PQGGGLRRGSEKALGREGTRGGARGAAFPRVVVLRGTWKGMADKLPTTVGNKDTGAERVLTRGFKIWRRGATGKAETGVYIPGKCQSLASPAPPLRFLCSL

SEQ ID NO: 873097 - protein, 541 aa, Homo sapiens
MRLKMTTRNFPEREVPCDVEVERFTREVPCLSSLGDGWDCENQEGHLRQSALTLEKPGTQEAICEYPGFGEHLIASSDLPPSQRVLATNGFHAPDSNVSGLDCDPALPSYPKSYADKRTGDSDACGKGFNHSMEVIHGRNPVREKPYKYPESVKSFNHFTSLGHQKIMKRGKKSYEGKNFENIFTLSSSLNENQRNLPGEKQYRCTECGKCFKRNSSLVLHHRTHTGEKPYTCNECGKSFSKNYNLIVHQRIHTGEKPYECSKCGKAFSDGSALTQHQRIHTGEKPYECLECGKTFNRNSSLILHQRTHTGEKPYRCNECGKPFTDISHLTVHLRIHTGEKPYECSKCGKAFRDGSYLTQHERTHTGEKPFECAECGKSFNRNSHLIVHQKIHSGEKPYECKECGKTFIESAYLIRHQRIHTGEKPYGCNQCQKLFRNIAGLIRHQRTHTGEKPYECNQCGKAFRDSSCLTKHQRIHTKETPYQCPECGKSFKQNSHLAVHQRLHSREGPSRCPQCGKMFQKSSSLVRHQRAHLGEQPMET

SEQ ID NO: 873098 - protein, 541 aa, Homo sapiens; identical to SEQ ID NO: 873097

SEQ ID NO: 873099 - protein, 147 aa, Homo sapiens
MRLKMTTRNFPEREVPCDVEVERFTREVPCLSSLGDGWDCENQEGHLRQSALTLEKPGTQEAICEYPGFGEHLIASSDLPPSQRVLATNGFHAPDSNVSGLDCDPALPSYPKSYADKRTGDSDACGKGFNHSMEVIHGRNPVREKPL

SEQ ID NO: 873100 - protein, 541 aa, Homo sapiens; identical to SEQ ID NO: 873097

SEQ ID NO: 873101 - protein, 541 aa, Homo sapiens; identical to SEQ ID NO: 873097

SEQ ID NO: 873102 - protein, 634 aa, Homo sapiens
AGVGRALAALLLAASVLSAALLPPAALRGAMPRLRPPRDLDKKRHAELKMDQALLLIHNELLWTNLTVYWKSECCYHCLFQVLVNVPQSPKAGKPSAAAASVSTQHGSILQLNDTLEEKEVCRLEYRFGEFGNYSLLVKNIHNGVSEIACDLAVNEDPVDSNLPVSIAFLIGLAVIIVISFLRLLLSLDDFNNWISKAISSRETDRLINSELGSPSRTDPLDGDVQPATWRLSALPPRLRSVDTFRGIALILMVFVNYGGGKYWYFKHASWNGLTVADLVFPWFVFIMGSSIFLSMTSILQRGCSKFRLLGKIAWRSFLLICIGIIIVNPNYCLGPLSWDKVRIPGVLQRLGVTYFVVAVLELLFAKPVPEHCASERSCLSLRDITSSWPQWLLILVLEGLWLGLTFLLPVPGCPTGYLGPGGIGDFGKYPNCTGGAAGYIDRLLLGDDHLYQHPSSAVLYHTEVAYDPEGILGTINSIVMAFLGVQAGKILLYYKARTKDILIRFTAWCCILGLISVALTKVSENEGFIPVNKNLWSLSYVTTLSSFAFFILLVLYPVVDVKGLWTGTPFFYPGMNSILVYVGHEVFENYFPFQWKLKDNQSHKEHLTQNIVATALWVLIAYILYRKKIFWKI

SEQ ID NO: 873103 - protein, 634 aa, Homo sapiens; identical to SEQ ID NO: 873102

SEQ ID NO: 873104 - protein, 265 aa, Homo sapiens
NSTRRYAVCYFSHEGSGSSWPQWLLILVLEGLWLGLTFLLPVPGCPTGYLGPGGIGDFGKYPNCTGGAAGYIDRLLLGDDHLYQHPSSAVLYHTEVAYDPEGILGTINSIVMAFLGVQAGKILLYYKARTKDILIRFTAWCCILGLISVALTKVSENEGFIPVNKNLWSLSYVTTLSSFAFFILLVLYPVVDVKGLWTGTPFFYPGMNSILVYVGHEVFENYFPFQWKLKDNQSHKEHLTQNIVATALWVLIAYILYRKKIFWKI

SEQ ID NO: 873105 - protein, 634 aa, Homo sapiens; identical to SEQ ID NO: 873102

SEQ ID NO: 873106 - protein, 634 aa, Homo sapiens; identical to SEQ ID NO: 873102

SEQ ID NO: 873107 - protein, 634 aa, Homo sapiens; identical to SEQ ID NO: 873102

SEQ ID NO: 873108 - protein, 634 aa, Homo sapiens; identical to SEQ ID NO: 873102

SEQ ID NO: 873109 - protein, 196 aa, Homo sapiens
LEGEDFREEFFRKTVLLLNSHPACTCLLDPSTWRPAHVSGPALASSPQILSVFSLGFPGFVNGSCVSRYKPDIIFPPGLPPPDLPSSVSIFYLQLLCSHGHCCITESGPLLSFSNWPPSLVPHFLKSPVHCHQIKLSPARSPLSEKPPLTWKHHCLAHILTYSPSRLDPHTSFQPPLPLHSLLPPPPPHPLVSPPL

SEQ ID NO: 873110 - protein, 634 aa, Homo sapiens; identical to SEQ ID NO: 873102

SEQ ID NO: 873111 - protein, 634 aa, Homo sapiens; identical to SEQ ID NO: 873102

SEQ ID NO: 873112 - protein, 634 aa, Homo sapiens; identical to SEQ ID NO: 873102

SEQ ID NO: 873113 - protein, 514 aa, Homo sapiens
AGVGRALAALLLAASVLSAALLPPAALRGAMPRLRPPRDLDKKRHAELKMDQALLLIHNELLWTNLTVYWKSECCYHCLFQVLVNVPQSPKAGKPSAAAASVSTQHGSILQLNDTLEEKEVCRLEYRFGEFGNYSLLVKNIHNGVSEIACDLAVNEDPVDSNLPVSIAFLIGLAVIIVISFLRLLLSLDDFNNWISKAISSRETDRLINSELGSPSRTDPLDGDVQPATWRLSALPPRLRSVDTFRGIALILMVFVNYGGGKYWYFKHASWNGLTVADLVFPWFVFIMGSSIFLSMTSILQRGCSKFRLLGKIAWRSFLLICIGIIIVNPNYCLGPLSWDKVRIPGVLQRLGVTYFVVAVLELLFAKPVPEHCASERSCLSLRDITSSWPQWLLILVLEGLWLGLTFLLPVPGCPTGYLGPGGIGDFGKYPNCTGGAAGYIDRLLLGDDHLYQHPSSAVLYHTEVAYDPEGILGTINSIVMAFLGVQVFVHFIRLLFLTIYDILFTHLKTISLK

SEQ ID NO: 873114 - protein, 673 aa, Homo sapiens
AGVGRALAALLLAASVLSAALLPPAALRGAMPRLRPPRDLDKKRHAELKMDQALLLIHNELLWTNLTVYWKSECCYHCLFQVLVNVPQSPKAGKPSAAAASVSTQHGSILQLNDTLEEKEVCRLEYRFGEFGNYSLLVKNIHNGVSEIACDLAVNEDPVDSNLPVSIAFLIGLAVIIVISFLRLLLRVLLCHPGWSAVAPSRLTPSSASRVHTILLPQPPEYWNCSLDDFNNWISKAISSRETDRLINSELGSPSRTDPLDGDVQPATWRLSALPPRLRSVDTFRGIALILMVFVNYGGGKYWYFKHASWNGLTVADLVFPWFVFIMGSSIFLSMTSILQRGCSKFRLLGKIAWRSFLLICIGIIIVNPNYCLGPLSWDKVRIPGVLQRLGVTYFVVAVLELLFAKPVPEHCASERSCLSLRDITSSWPQWLLILVLEGLWLGLTFLLPVPGCPTGYLGPGGIGDFGKYPNCTGGAAGYIDRLLLGDDHLYQHPSSAVLYHTEVAYDPEGILGTINSIVMAFLGVQAGKILLYYKARTKDILIRFTAWCCILGLISVALTKVSENEGFIPVNKNLWSLSYVTTLSSFAFFILLVLYPVVDVKGLWTGTPFFYPGMNSILVYVGHEVFENYFPFQWKLKDNQSHKEHLTQNIVATALWVLIAYILYRKKIFWKI

SEQ ID NO: 873115 - protein, 339 aa, Homo sapiens [sequence omitted]

SEQ ID NO: 873116 - protein, 634 aa, Homo sapiens; identical to SEQ ID NO: 873102

SEQ ID NO: 873117 - protein, 634 aa, Homo sapiens; identical to SEQ ID NO: 873102

SEQ ID NO: 873118 - protein, 634 aa, Homo sapiens; identical to SEQ ID NO: 873102

SEQ ID NO: 873119 - protein, 163 aa, Homo sapiens
TDRIEPVPRLASSPQILSVFSLGFPGFVNGSCVSRYKPDIIFPPGLPPPDLPSSVSIFYLQLLCSHGHCCITESGPLLSFSNWPPSLVPHFLKSPVHCHQIKLSPARSPLSEKPPLTWKHHCLAHILTYSPSRLDPHTSFQPPLPLHSLLPPPPPHPLVSPPL

SEQ ID NO: 873120 - protein, 69 aa, Homo sapiens
  misc_feature (19)..(19): Xaa can be any naturally occurring amino acid
KLCKTLIRSDHKHDIPKQXLRKMEQQTEDIFNMVLGDTFGKDAFPSRGQHCGEIGPEPLLAQLSRSFAF

SEQ ID NO: 873121 - protein, 531 aa, Homo sapiens
AGVGRALAALLLAASVLSAALLPPAALRGAMPRLRPPRDLDKKRHAELKMDQALLLIHNELLWTNLTVYWKSECCYHCLFQVLVNVPQSPKAGKPSAAAASVSTQHGSILQLNDTLEEKEVCRLEYRFGEFGNYSLLVKNIHNGVSEIACDLAVNEDPVDSNLPVSIAFLIGLAVIIVISFLRLLLSLDDFNNWISKAISSRETDRLINSELGSPSRTDPLDGDVQPATWRLSALPPRLRSVDTFRGIALILMVFVNYGGGKYWYFKHASWNGLTVADLVFPWFVFIMGSSIFLSMTSILQRGCSKFRLLGKIAWRSFLLICIGIIIVNPNYCLGPLSWDKVRIPGVLQRLGVTYFVVAVLELLFAKPVPEHCASERSCLSLRDITSSWPQWLLILVLEGLWLGLTFLLPVPGCPTGYLGPGGIGDFGKYPNCTGGAAGYIDRLLLGDDHLYQHPSSAVLYHTEVAYDPEGILGTINSIVMAFLGVQAGKILLYYKARTKDILIRFTAWCCILVSKQHSSLKFLSFTCIDI

SEQ ID NO: 873122 - protein, 283 aa, Homo sapiens
AGVGRALAALLLAASVLSAALLPPAALRGAMPRLRPPRDLDKKRHAELKMDQALLLIHNELLWTNLTVYWKSECCYHCLFQVLVNVPQSPKAGKPSAAAASVSTQHGSILQLNDTLEEKEVCRLEYRFGEFGNYSLLVKNIHNGVSEIACDLAVNEDPVDSNLPVSIAFLIGLAVIIVISFLRLLLSLDDFNNWISKAISSRETDRLINSELGSPSRTDPLDGDVQPATWRLSALPPRLRSVDTFRGIALILMVFVNYGGGKYWYFKHASWNGLTVADLVFPW

SEQ ID NO: 873123 - protein, 206 aa, Homo sapiens
MALGLCRCFHPRHSMAAFGLFPALPSALNSHPACTCLLDPSTWRPAHVSGPALASSPQILSVFSLGFPGFVNGSCVSRYKPDIIFPPGLPPPDLPSSVSIFYLQLLCSHGHCCITESGPLLSFSNWPPSLVPHFLKSPVHCHQIKLSPARSPLSEKPPLTWKHHCLAHILTYSPSRLDPHTSFQPPLPLHSLLPPPPPHPLVSPPL

SEQ ID NO: 873124 - protein, 74 aa, Homo sapiens
GSLGHSTLCPCCGWEPWVLHGTLRAGRIRPNLSPRGKQPLPAERVGLGQEARGEWGVGTIRNPSRGCQGRLHLL

SEQ ID NO: 873125 - protein, 269 aa, Homo sapiens
DQRGTCHQFQFCPSWPEAARDFPGWKDRSGGQATWRQGQVLRTPSPAQLSAGEAALGSWSGLATEVCASLAALISPGALEQVFLRLPTHQPRPKIITTKDVLGPLSPQNESFKNSCPEVSEKNSRMRVRGTRPSALPRLKDEVETTKAPKTKPSSPHLQAVPKEGKRGMGWGGRVEPPPRAVSTGVSREAGPWPGSASDRTDRVLGRSVVKLASNPQTTKTASFPSSVLMLLRPAEESSASPAERSQASCQRRGRRKPQVPGDPSPKFA

SEQ ID NO: 873126 - protein, 1692 aa, Homo sapiens
ERTAAAEAAAAGPRSDSRSCSGGERSRAAAGREVSGAELNVQQWMTTAWMSLWPGAQGRMDTHRSALRTRQVTLKKAAWGSSGDSGDDSDSEHGDGTDGEDEGASEEEDLEDRSGSEDSEDDGETLLEVAGTQGKLEAAGSFNSDDDAESCPICLNAFRDQAVGTPENCAHYFCLDCIVEWSKNANSCPVDRTLFKCICIRAQFGGKILKKIPVENTKASEEEEDPTFCEVCGRSDREDRLLLCDGCDAGYHMECLDPPLQEVPVDEWFCPECAAPGVVLAADAGPVSEEEVSLLLADVVPTTSRLRPRAGRTRAIARTRQSERVRATVNRNRISTARRVQHTPGRLGSSLLDEAIEAVATGLSTAVYQRPLTPRTPARRKRKTRRRKKVPGRKKTPSGPSAKSKSSATRSKKRQHRVKKRRGKKVKSEATTRSRIARTLGLRRPVHSSCIPSVLKPVEPSLGLLRADIGAASLSLFGDPYELDPFDSSEELSANPLSPLSAKRRALSRSALQSHQPVARPVSVGLSRRRLPAAVPEPDLEEEPVPDLLGSILSGQSLLMLGSSDVIIHRDGSLSAKRAAPVSFQRNSGSLSRGEEGFKGCLQPRALPSGSPAQGPSGNRPQSTGLSCQGRSRTPARTAGAPVRLDLPAAPGAVQARNLSNGSVPGFRQSHSPWFNGTNKHTLPLASAASKISSRDSKPPCRSVVPGPPLKPAPRRTDISELPRIPKIRRDDGGGRRDAAPAHGQSIEIPSACISRLTGREGTGQPGRGTRAESEASSRVPREPGVHTGSSRPPAPSSHGSLAPLGPSRGKGVGSTFESFRINIPGNMAHSSQLSSPGFCNTFRPVDDKEQRKENPSPLFSIKKTKQLRSEVYDPSDPTGSDSSAPGSSPERSGPGLLPSEITRTISINSPKAQTVQAVRCVTSYTVESIFGTEPEPPLGPSSAMSKLRGAVAAEGASDTEREEPTESQGLAARLRRPSPPEPWDEEDGASCSTFFGSEERTVTCVTVVEPEAPPSPDVLQAATHRVVELRPPSRSRSTSSSRSRKKAKRKRVSREHGRTRSGTRSESRDRSSRSASPSVGEERPRRQRSKAKSRRSSSDRSSSRERAKRKKAKDKSREHRRGPWGHSRRTSRSRSGSPGSSSYEHYESRKKKKRRSASRPRGRECSPTSSLERLCRHKHQRERSHERPDRKESVAWPRDRRKRRSRSPSSEHRAREHRRPRSREKWPQTRSHSPERKGAVREASPAPLAQGEPGREDLPTRLPALGEAHVSPEVATADKAPLQAPPVLEVAAECEPDDLDLDYGDSVEAGHVFDDFSSDAVFIQLDDMSSPPSPESTDSSPERDFPLKPALPPASLAVAAIQREVSLMHDEDPSQPPPLPEGTQEPHLLRPDAAEKAEAPSSPDVAPAGKEDSPSASGRVQEAARPEEVVSQTPLLRSRALVKRVTWNLQESESSAPAEDRAPRAPLHRPQKPREGAWDMEDVAPTGVRQVFSELPFPSHVLPEPGFPDTDPSQVYSPGLPPAPAQPSSIPPCALVSQPTVQFILQGSLPLVGCGAAQTLAPVPAALTPASEPASQATAASNSEEKTPAPRLAAEKTKKEEYMKKLHMQERAVEEVKLAIKPFYQKREVTKEEYKDILRKAVQKICHSKSGEINPVKVANLVKAYVDKYRHMRRHKKPEAGEEPPTQGAEG

SEQ ID NO: 873127 - protein, 892 aa, Homo sapiens
ERTAAAEAAAAGPRSDSRSCSGGERSRAAAGREVSGAELNVQQWMTTAWMSLWPGAQGRMDTHRSALRTRQVTLKKAAWGSSGDSGDDSDSEHGDGTDGEDEGASEEEDLEDRSGSEDSEDDGETLLEVAGTQGKLEAAGSFNSDDDAESCPICLNAFRDQAVGTPENCAHYFCLDCIVEWSKNANSCPVDRTLFKCICIRAQFGGKILKKIPVENTKASEEEEDPTFCEVCGRSDREDRLLLCDGCDAGYHMECLDPPLQEVPVDEWFCPECAAPGVVLAADAGPVSEEEVSLLLADVVPTTSRLRPRAGRTRAIARTRQSERVRATVNRNRISTARRVQHTPGRLGSSLLDEAIEAVATGLSTAVYQRPLTPRTPARRKRKTRRRKKVPGRKKTPSGPSAKSKSSATRSKKRQHRVKKRRGKKVKSEATTRSRIARTLGLRRPVHSSCIPSVLKPVEPSLGLLRADIGAASLSLFGDPYELDPFDSSEELSANPLSPLSAKRRALSRSALQSHQPVARPVSVGLSRRRLPAAVPEPDLEEEPVPDLLGSILSGQSLLMLGSSDVIIHRDGSLSAKRAAPVSFQRNSGSLSRGEEGFKGCLQPRALPSGSPAQGPSGNRPQSTGLSCQGRSRTPARTAGAPVRLDLPAAPGAVQARNLSNGSVPGFRQSHSPWFNGTNKHTLPLASAASKISSRDSKPPCRSVVPGPPLKPAPRRTDISELPRIPKIRRDDGGGRRDAAPAHGQSIEIPSACISRLTGREGTGQPGRGTRAESEASSRVPREPGVHTGSSRPPAPSSHGSLAPLGPSRGKGVGSTFESFRINIPGNMAHSSQLSSPGFCNTFRPVDDKEQRKENPSPLFSIKKTKQLRSEVYDPSDPTGSDSSAPGSSPEG

SEQ ID NO: 873128 - protein, 123 aa, Homo sapiens
SGPEHLDVKGHLVIAPLSPDLPQQEWRDQPREGGQPGEGVRGQVQAHAQAQETRGRGGAAHAGGRGLRPGNHGLCPGSCREWRESGPCPGSCREWRESGPCPGSCREWREMGGITMPAVGFLR

SEQ ID NO: 873129 - protein, 1604 aa, Homo sapiens
ERTAAAEAAAAGPRSDSRSCSGGERSRAAAGREVSGAELNVQQWMTTAWMSLWPGAQGRMDTHRSALRTRQVTLKKAAWGSSGDSGDDSDSEHGDGTDGEDEGASEEEDLEDRSGSEDSEDDGETLLEVAGTQGKLEAAGSFNSDDDAESCPICLNAFRDQAVGTPENCAHYFCLDCIVEWSKNANSCPVDRTLFKCICIRAQFGGKILKKIPVENTKASEEEEDPTFCEVCGRSDREDRLLLCDGCDAGYHMECLDPPLQEVPVDEWFCPECAAPGVVLAADAGPVSEEEVSLLLADVVPTTSRLRPRAGRTRAIARTRQSERVRATVNRNRISTARRVQHTPGRLGSSLLDEAIEAVATGLSTAVYQRPLTPRTPARRKRKTRRRKKVPGRKKTPSGPSAKSKSSATRSKKRQHRVKKRRGKKVKSEATTRSRIARTLGLRRPVHSSCIPSVLKPVEPSLGLLRADIGAASLSLFGDPYELDPFDSSEELSANPLSPLSAKRRALSRSALQSHQPVARPVSVGLSRRRLPAAVPEPDLEEEPVPDLLGSILSGQSLLMLGSSDVIIHRDGSLSAKRAAPVSFQRNSGSLSRGEEGFKGCLQPRALPSGSPAQGPSGNRPQSTGLSCQGRSRTPARTAGAPVRLDLPAAPGAVQARNLSNGSVPGFRQSHSPWFNGTNKHTLPLASAASKISSRDSKPPCRSVVPGPPLKPAPRRTDISELPRIPKIRRDDGGGRRDAAPAHGQSIEIPSACISRLTGREGTGQPGRGTRAESEASSRVPREPGVHTGSSRPPAPSSHGSLAPLGPSRGKGVGSTFESFRINIPGNMAHSSQLSSPGFCNTFRPVDDKEQRKENPSPLFSIKKTKQLRSEVYDPSDPTGSDSSAPGSSPERSGPGLLPSEITRTISINSPKAQTVQAVRCVTSYTVESIFGTEPEPPLGPSSAMSKLRGAVAAEGASDTEREEPTESQGLAARLRRPSPPEPWDEEDGASCSTFFGSEERTVTCVTVVEPEAPPSPDVLQAATHRVVELRPPSRSRSTSSSRSRKKAKRKRVSREHGRTRSGTRSESRDRSSRSASPSVGEERPRRQRSKAKSRRSSSDRSSSRERAKRKKAKDKSREHRRGPWGHSRRTSRSRSGSPGSSSYEHYESRKKKKRRSASRPRGRECSPTSSLERLCRHKHQRERSHERPDRKESVAWPRDRRKRRSRSPSSEHRAREHRRPRSREKWPQTRSHSPERKGAVREASPAPLAQGEPGREDLPTRLPALGEAHVSPEVATADKAPLQAPPVLEVAAECEPDDLDLDYGDSVEAGHVFDDFSSDAVFIQLDDMSSPPSPESTDSSPERDFPLKPALPPASLAVAAIQREVSLMHDEDPSQPPPLPEGTQEPHLLRPDAAEKAEAPSSPDVAPAGKEDSPSASGRVQEAARPEEVVSQTPLLRSRALVKRVTWNLQESESSAPAEDRAPRAPLHRPQKPREGAWDMEDAGPHRGQAGVLRAALSQSRASGTRVPRHRPLSGLQPRPAACPGPALKHPIKPFYQKREVTKEEYKDILRKAVQKICHSKSGEINPVKVANLVKAYVDKYRHMRRHKKPEAGEEPPTQGAEG

SEQ ID NO: 873130 - protein, 948 aa, Homo sapiens
ERTAAAEAAAAGPRSDSRSCSGGERSRAAAGREVSGAELNVQQWMTTAWMSLWPGAQGRMDTHRSALRTRQVTLKKAAWGSSGDSGDDSDSEHGDGTDGEDEGASEEEDLEDRSGSEDSEDDGETLLEVAGTQGKLEAAGSFNSDDDAESCPICLNAFRDQAVGTPENCAHYFCLDCIVEWSKNANSCPVDRTLFKCICIRAQFGGKILKKIPVENTKASEEEEDPTFCEVCGRSDREDRLLLCDGCDAGYHMECLDPPLQEVPVDEWFCPECAAPGVVLAADAGPVSEEEVSLLLADVVPTTSRLRPRAGRTRAIARTRQSERVRATVNRNRISTARRVQHTPGRLGSSLLDEAIEAVATGLSTAVYQRPLTPRTPARRKRKTRRRKKVPGRKKTPSGPSAKSKSSATRSKKRQHRVKKRRGKKVKSEATTRSRIARTLGLRRPVHSSCIPSVLKPVEPSLGLLRADIGAASLSLFGDPYELDPFDSSEELSANPLSPLSAKRRALSRSALQSHQPVARPVSVGLSRRRLPAAVPEPDLEEEPVPDLLGSILSGQSLLMLGSSDVIIHRDGSLSAKRAAPVSFQRNSGSLSRGEEGFKGCLQPRALPSGSPAQGPSGNRPQSTGLSCQGRSRTPARTAGAPVRLDLPAAPGAVQARNLSNGSVPGFRQSHSPWFNGTNKHTLPLASAASKISSRDSKPPCRSVVPGPPLKPAPRRTDISELPRIPKIRRDDGGGRRDAAPAHGQSIEIPSACISRLTGREGTGQPGRGTRAESEASSRVPREPGVHTGSSRPPAPSSHGSLAPLGPSRGKGVGSTFESFRINIPGNMAHSSQLSSPGFCNTFRPVDDKEQRKENPSPLFSIKKTKQRCQAPMSQCGAGASPEASAQKRQTSLSYPGYQRSGEMTVVADGSGPAQGQSIEIPVPDQRLTGREGRAAGEAHGKASTGAG

SEQ ID NO: 873131 - protein, 167 aa, Homo sapiens
AALNGNTELISLLLEAQAAVDIKDNKGMRPLHYAAWQGRKEPMKLVLKAGSAVNIPSDEGHIPLHLAAQHGHYDVSEMLLQHQSNPCMVDNSGKTPLDLACEFGRVGVVQLLLSSNMCAALLEPRPGDATDPNGTSPLHLAAKNGHIDIIRLLLQAGIDINRQTKSG

SEQ ID NO: 873132 - protein, 200 aa, Homo sapiens
  misc_feature (182)..(182): Xaa can be any naturally occurring amino acid
AALNGNTELISLLLEAQAAVDIKDNKGMRPLHYAAWQGRKEPMKLVLKAGSAVNIPSDEGHIPLHLAAQHGHYDVSEMLLQHQSNPCMVDNSGKTPLDLACEFGRVGVVQLLLSSNMCAALLEPRPGDATDPNGTSPLHLAAKNGHIDIIRYEPVAGRASALGVPRGFSSSLGLQGHQFLAXGDKGREQGQGPRSLVQAS

SEQ ID NO: 873133 - protein, 83 aa, Homo sapiens
APGPGLRVRPRWGESPVEPCGVGLGSPTSGPPYPDPSFKVVQLLLSSNMCAALLEPRPGDATDPNGTSPLHLAAKNGHIDIIR

SEQ ID NO: 873134 - protein, 815 aa, Homo sapiens
MREPEELMPDSGAVFTFGKSKFAENNPGKFWFKNDVPVHLSCGDEHSAVVTGNNKLYMFGSNNWGQLGLGSKSAISKPTCVKALKPEKVKLAACGRNHTLVSTEGGNVYATGGNNEGQLGLGDTEERNTFHVISFFTSEHKIKQLSAGSNTSAALTEDGRLFMWGDNSEGQIGLKNVSNVCVPQQVTIGKPVSWISCGYYHSAFVTTDGELYVFGEPENGKLGLPNQLLGNHRTPQLVSEIPEKVIQVACGGEHTVVLTENAVYTFGLGQFGQLGLGTFLFETSEPKVIENIRDQTISYISCGENHTALITDIGLMYTFGDGRHGKLGLGLENFTNHFIPTLCSNFLRFIVKLVACGGCHMVVFAAPHRGVAKEIEFDEINDTCLSVATFLPYSSLTSGNVLQRTLSARMRRRERERSPDSFSMRRTLPPIEGTLGLSACFLPNSVFPRCSERNLQESVLSEQDLMQPEEPDYLLDEMTKEAEIDNSSTVESLGETTDILNMTHIMSLNSNEKSLKLSPVQKQKKQQTIGELTQDTALTENDDSDEYEEMSEMKEGKACKQHVSQGIFMTQPATTIEAFSDEEVEIPEEKEGAEDSKGNGIEEQEVEANEENVKVHGGRKEKTEILSDDLTDKAEDHEFSKTEELKLEDVDEEINAENVESKKKTVGDDESVPTGYHSKTEGAERTNDDSSAETIEKKEKANLEERAICEYNENPKGYMLDDADSSSLEILENSETTPSKDMKKTKKIFLFKRVPSINQKIVKNNNEPLPEIKSIGDQIILKSDNKDADQNHMSQNHQNIPPTNTERRSKSCTIL

SEQ ID NO: 873135 - protein, 815 aa, Homo sapiens; identical to SEQ ID NO: 873134

SEQ ID NO: 873136 - protein, 779 aa, Homo sapiens
MREPEELMPDSGAVFTFGKSKFAENNPGKFWFKNDVPVHLSCGDEHSAVVTGNNKLYMFGSNNWGQLGLGSKSAISKPTCVKALKPEKVKLAACGRNHTLVSTEGGNVYATGGNNEGQLGLGDTEERNTFHVISFFTSEHKIKQLSAGSNTSAALTEDGRLFMWGDNSEGQIGLKNVSNVCVPQQVTIGKPVSWISCGYYHSAFVTTDGELYVFGEPENGKLGLPNQLLGNHRTPQLVSEIPEKVIQVACGGEHTVVLTENAVYTFGLGQFGQLGLGTFLFETSEPKVIENIRDQTISYISCGENHTALITDIGLMYTFGDGRHGKLGLGLENFTNHFIPTLCSNFLRFIVKLVACGGCHMVVFAAPHRGVAKEIEFDEINDTCLSVATFLPYSSLTSGNVLQRTLSARMRRRERERSPDSFSMRRTLPPIEGTLGLSACFLPNSVFPRCSERNLQESVLSEQDLMQPEEPDYLLDEMTKEAEIDNSSTVESLGETTDILNMTHIMSLNSNEKSLKLSPVQKQKKQQTIGELTQDTALTENDDSDEYEEMSEMKEGKACKQHVSQGIFMTQPATTIEAFSDEEVEIPEEKEGAEDSKGNGIEEQEVEANEENVKVHGGRKEKTEILSDDLTDKAEVSEGKAKSVGEAEDGPEGRGDGTCEEGSSGAEHWQDEEREKGEKDKGRGEMERPGEGEKELAEKEEWKKRDGEEQEQKEREQGHQKERNQEMEEGGEEEHGEGEEEEETDREEEEERGGRRERSRKSSTAEEPEEEGDSASSMR

SEQ ID NO: 873137 - protein, 440 aa, Homo sapiens
MREPEELMPDSGAVFTFGKSKFAENNPGKFWFKNDVPVHLSCGDEHSAVVTGNNKLYMFGSNNWGQLGLGSKSAISKPTCVKALKPEKVKLAACGRNHTLVSTEGGNVYATGGNNEGQLGLGDTEERNTFHVISFFTSEHKIKQLSAGSNTSAALTEDGRLFMWGDNSEGQIGLKNVSNVCVPQQVTIGKPVSWISCGYYHSAFVTTDGELYVFGEPENGKLGLPNQLLGNHRTPQLVSEIPEKVIQVACGGEHTVVLTENAVYTFGLGQFGQLGLGTFLFETSEPKVIENIRDQTISYISCGENHTALITDIGLMYTFGDGRHGKLGLGLENFTNHFIPTLCSNFLRFIVKLVACGGCHMVVFAAPHRGVAKEIEFDEINDTCLSVATFLPYSSLTSGNVLQRTLSARMRRRERLSLMSSGSLYTINNEMGKQRNKDFN

SEQ ID NO: 873138 - protein, 828 aa, Homo sapiens
MREPEELMPDSGAVFTFGKSKFAENNPGKFWFKNDVPVHLSCGDEHSAVVTGNNKLYMFGSNNWGQLGLGSKSAISKPTCVKALKPEKVKLAACGRNHTLVSTEGGNVYATGGNNEGQLGLGDTEERNTFHVISFFTSEHKIKQLSAGSNTSAALTEDGRLFMWGDNSEGQIGLKNVSNVCVPQQVTIGKPVSWISCGYYHSAFVTTDGELYVFGEPENGKLGLPNQLLGNHRTPQLVSEIPEKVIQVACGGEHTVVLTENAVYTFGLGQFGQLGLGTFLFETSEPKVIENIRDQTISYISCGENHTALITDIGLMYTFGDGRHGKLGLGLENFTNHFIPTLCSNFLRFIVKLVACGGCHMVVFAAPHRGVAKEIEFDEINDTCLSVATFLPYSSLTSGNVLQRTLSARMRRRERERSPDSFSMRRTLPPIEGTLGLSACFLPNSVFPRCSERNLQESVLSEQDLMQPEEPDYLLDEMTKEAEIDNSSTVESLGETTDILNMTHIMSLNSNEKSLKLSPVQKQKKQQTIGELTQDTALTENDDSDEYEEMSEMKEGKACKQHVSQGIFMTQPATTIEAFSDEEVEIPEEKEGAEDSKGNGIEEQEVEANEENVKVHGGRKEKTEILSDDLTDKAEYSASHSQIVSVEKDHEFSKTEELKLEDVDEEINAENVESKKKTVGDDESVPTGYHSKTEGAERTNDDSSAETIEKKEKANLEERAICEYNENPKGYMLDDADSSSLEILENSETTPSKDMKKTKKIFLFKRVPSINQKIVKNNNEPLPEIKSIGDQIILKSDNKDADQNHMSQNHQNIPPTNTERRSKSCTIL

SEQ ID NO: 873139 - protein, 560 aa, Homo sapiens
MREPEELMPDSGAVFTFGKSKFAENNPGKFWFKNDVPVHLSCGDEHSAVVTGNNKLYMFGSNNWGQLGLGSKSAISKPTCVKALKPEKVKLAACGRNHTLVSTEGGNVYATGGNNEGQLGLGDTEERNTFHVISFFTSEHKIKQLSAGSNTSAALTEDGRLFMWGDNSEGQIGLKNVSNVCVPQQVTIGKPVSWISCGYYHSAFVTTDGELYVFGEPENGKLGLPNQLLGNHRTPQLVSEIPEKVIQVACGGEHTVVLTENAVYTFGLGQFGQLGLGTFLFETSEPKVIENIRDQTISYISCGENHTALITDIGLMYTFGDGRHGKLGLGLENFTNHFIPTLCSNFLRFIVKLVACGGCHMVVFAAPHRGVAKEIEFDEINDTCLSVATFLPYSSLTSGNVLQRTLSARMRRRERERSPDSFSMRRTLPPIEGTLGLSACFLPNSVFPRCSERNLQESVLSEQDLMQPEEPDYLLDEMTKEAEIDNSSTVESLGETTDILNMTHIMSLNSNEKSLKLSPVQKQKKQQTIGELTQDTALTENDDSDEYEEMSEMKEENCGR

SEQ ID NO: 873140 - protein, 225 aa, Homo sapiens
MREPEELMPDSGAVFTFGKSKFAENNPGKFWFKNDVPVHLSCGDEHSAVVTGNNKLYMFGSNNWGQLGLGSKSAISKPTCVKALKPEKVKLAACGRNHTLVSTEGGNVYATGGNNEGQLGLGDTEERNTFHVISFFTSEHKIKQLSAGSNTSAALTEDGRLFMWGDNSEGQIGLKNVSNVCVPQQVTIGKPVSWISCGYYHSAFVTSKTHFEVIMLSPTSMLLLN

SEQ ID NO: 873141 - protein, 119 aa, Homo sapiens
PSCEDEIENSGFWLGDRVTEQPRGDSAGGPRAGTGWDRGALFSERCLPRSPLRGTGGCQLGPQPWVPRLLARGLRCRRGLGTGPAGPDRVSGAQRCRAGGAAGEPPDSASRGSWSLMDR

SEQ ID NO: 873142 - protein, 115 aa, Homo sapiens
PSQSGPGGDQEVSGKHKLCSGAGEAWPAQPVLSVMGTALEVTPLSSGIWIRWGLLQTSVLSRCDRRPLECSPGSSTGPSRWELRGNRGSQRGTWSTSPGPSTLPAFPALHWIKPV

SEQ ID NO: 873143 - protein, 653 aa, Homo sapiens
MADTLPSEFDVIVIGTGLPESIIAAACSRSGRRVLHVDSRSYYGGNWASFSFSGLLSWLKEYQENSDIVSDSPVWQDQILENEEAIALSRKDKTIQHVEVFCYASQDLHEDVEEAGALQKNHALVTSANSTEAADSAFLPTEDESLSTMSCEMLTEQTPSSDPENALEVNGAEVTGEKENHCDDKTCVPSTSAEDMSENVPIAEDTTEQPKKNRITYSQIIKEGRRFNIDLVSKLLYSRGLLIDLLIKSNVSRYAEFKNITRILAFREGRVEQVPCSRADVFNSKQLTMVEKRMLMKFLTFCMEYEKYPDEYKGYEEITFYEYLKTQKLTPNLQYIVMHSIAMTSETASSTIDGLKATKNFLHCLGRYGNTPFLFPLYGQGELPQCFCRMCAVFGGIYCLRHSVQCLVVDKESRKCKAIIDQFGQRIISEHFLVEDSYFPENMCSRVQYRQISRAVLITDRSVLKTDSDQQISILTVPAEEPGTFAVRVIELCSSTMTCMKGTYLVHLTCTSSKTAREDLESVVQKLFVPYTEMEIENEQVEKPRILWALYFNMRDSSDISRSCYNDLPSNVYVCSGPDCGLGNDNAVKQAETLFQEICPNEDFCPPPPNPEDIILDGDSLQPEASESSAIPEANSETFKESTNLGNLEESSE

SEQ ID NO: 873144 - protein, 358 aa, Homo sapiens
RRRPRRASSTSEARPCSSGYEEITFYEYLKTQKLTPNLQYIVMHSIAMTSETASSTIDGLKATKNFLHCLGRYGNTPFLFPLYGQGELPQCFCRMCAVFGGIYCLRHSVQCLVVDKESRKCKAIIDQFGQRIISEHFLVEDSYFPENMCSRVQYRQISRAVLITDRSVLKTDSDQQISILTVPAEEPGTFAVRVIELCSSTMTCMKGTYLVHLTCTSSKTAREDLESVVQKLFVPYTEMEIENEQVEKPRILWALYFNMRDSSDISRSCYNDLPSNVYVCSGPDCGLGNDNAVKQAETLFQEICPNEDFCPPPPNPEDIILDGDSLQPEASESSAIPEANSETFKESTNLGNLEESSE

SEQ ID NO: 873145 - protein, 97 aa, Homo sapiens
PGLQDSARASEFDVIVIGTGLPESIIAAACSRSGRRVLHVDSRSYYGGNWASFSFSGLLSWLKEYQENSDIVSDSPVWQDQILENEEAIALSRKDKM

SEQ ID NO: 873146 - protein, 117 aa, Homo sapiens
PGLQDSARASEFDVIVIGTGLPESIIAAACSRSGRRVLHVDSRSYYGGNWASFSFSGLLSWLKEYQENSDIVSDSPVWQDQILENEEAIALSRKDKTIQHVEVFCYARYEKYLLQVN

SEQ ID NO: 873147 - protein, 436 aa, Homo sapiens
EFRLKTSALEHGTCSTRPSRNARILVIFLNSAYRLTLDLIRRSISNPREYSSFDTKSILNLLHVFNSKQLTMVEKRMLMKFLTFCMEYEKYPDEYKGYEEITFYEYLKTQKLTPNLQYIVMHSIAMTSETASSTIDGLKATKNFLHCLGRYGNTPFLFPLYGQGELPQCFCRMCAVFGGIYCLRHSVQCLVVDKESRKCKAIIDQFGQRIISEHFLVEDSYFPENMCSRVQYRQISRAVLITDRSVLKTDSDQQISILTVPAEEPGTFAVRVIELCSSTMTCMKGTYLVHLTCTSSKTAREDLESVVQKLFVPYTEMEIENEQVEKPRILWALYFNMRDSSDISRSCYNDLPSNVYVCSGPDCGLGNDNAVKQAETLFQEICPNEDFCPPPPNPEDIILDGDSLQPEASESSAIPEANSETFKESTNLGNLEESSE

SEQ ID NO: 873148 - protein, 110 aa, Homo sapiens
MADTLPSEFDVIVIGTGLPESIIAAACSRSGRRVLHVDSRSYYGGNWASFSFSGLLSWLKEYQENSDIVSDSPVWQDQILENEEAIALSRKDKTIQHVEVFCYARSTLLL

SEQ ID NO: 873149 - protein, 197 aa, Homo sapiens
MPRRGLILHTRTHWLLLGLALLCSLVLFMYLLECAPQTDGNASLPGVVGENYGKEYYQALLQEQEEHYQTRATSLKRQIAQLKQELQEMSEKMRSLQERRNVGANGIGYQSNKEQAPSDLLEFLHSQIDKAEVSIGAKLPSEYGVIPFESFTLMKVFQLEMGLTRHPEEKPVRKDKRDELVEVIEAGLEVINNPDED

SEQ ID NO: 873150 - protein, 113 aa, Homo sapiens
PTPALPVLPHPSLPGERPLQEAVAFLCWLLVDVLLKATVSKVGGGSALASVARVMKAQAFSPLLRILHKASTSSFRARKDSAHTPSCLLTPSGPERAGPLTQDSCQPSPHDSF

SEQ ID NO: 873151 - protein, 754 aa, Homo sapiens
YKIISIKGEMLPFAPQDEPWDREMEVFSGGGASSGEVNGLKMVDEPMEEGEADSCHDEGVVKEIPITHHVKEGYEKADPAQFELLKVLGQGSFGKVFLVRKKTGPDAGQLYAMKVLKKASLKVRDRVRTKMERDILVEVNHPFIVKLHYAFQTEGKLYLILDFLRGGDVFTRLSKEVLFTEEDVKFYLAELALALDHLHQLGIVYRDLKPENILLDEIGHIKLTDFGLSKESVDQEKKAYSFCGTVEYMAPEVVNRRGHSQSADWWSYGVLMFEMLTGTLPFQGKDRNETMNMILKAKLGMPQFLSAEAQSLLRMLFKRNPANRLGSEGVEEIKRHLFFANIDWDKLYKREVQPPFKPASGKPDDTFCFDPEFTAKTPKDSPGLPASANAHQLFKGFSFVATSIAEEYKITPITSANVLPIVQINGNAAQFGEVYELKEDIGVGSYSVCKRCIHATTNMEFAVKIIDKSKRDPSEEIEILMRYGQHPNIITLKDVFDDGRYVYLVTDLMKGGELLDRILKQKCFSEREASDILYVISKTVDYLHCQGVVHRDLKPSNILYMDESASADSIRICDFGFAKQLRGENGLLLTPCYTANFVAPEVLMQQGYDAACDIWSLGVLFYTMLAGYTPFANGPNDTPEEILLRIGNGKFSLSGGNWDNISDGAKDLLSHMLHMDPHQRYTAEQILKHSWITHRDQLPNDQPKRNDVSHVVKGAMVATYSALTHKTFQPVLEPVAASSLAQRRSMKKRTSTGL

SEQ ID NO: 873152 - protein, 698 aa, Homo sapiens
MGLSTSAIWKNTRVEIVNPYEVKRKVKVNGLKMVDEPMEEGEADSCHDEGVVKEIPITHHVKEGYEKADPAQFELLKVLGQGSFGKVFLVRKKTGPDAGQLYAMKVLKKASLKVRDRVRTKMERDILVEVNHPFIVKLHYAFQTEGKLYLILDFLRGGDVFTRLSKEVLFTEEDVKFYLAELALALDHLHQLGIVYRDLKPENILLDEIGHIKLTDFGLSKESVDQEKKAYSFCGTVEYMAPEVVNRRGHSQSADWWSYGVLMFEMLTGTLPFQGKDRNETMNMILKAKLGMPQFLSAEAQSLLRMLFKRNPANRLGSEGVEEIKRHLFFANIDWDKLYKREVQPPFKPASGKPDDTFCFDPEFTAKTPKDSPGLPASANAHQLFKGFSFVATSIAEEYKITPITSANVLPIVQINGNAAQFGEVYELKEDIGVGSYSVCKRCIHATTNMEFAVKIIDKSKRDPSEEIEILMRYGQHPNIITLKDVFDDGRYVYLVTDLMKGGELLDRILKQKCFSEREASDILYVISKTVDYLHCQGVVHRDLKPSNILYMDESASADSIRICDFGFAKQLRGENGLLLTPCYTANFVAPEVLMQQGYDAACDIWSLGVLFYTMLAGYTPFANGPNDTPEEILLRIGNGKFSLSGGNWDNISDGAKGAMVATYSALTHKTFQPVLEPVAASSLAQRRSMKKRTSTGL

SEQ ID NO: 873153 - protein, 1099 aa, Homo sapiens [sequence omitted]

SEQ ID NO: 873154 - protein, 427 aa, Homo sapiens
MSLNNSSNVFLDSVPSNTNRFQVSVINENHESSAAADDNTDPPHYEETSFGDEAQKRLRISFRPGNQECYDNFLQSGETAKTDASFHAYDSHTNTYYLQTFGHNTMDAVPKIEYYRNTGSISGPKVNRPSLLEIHEQLAKNVAVTPSSADRVANGDGIPGDEQAENKEDDQAGVVKFGWVKGVLVRCMLNIWGVMLFIRLSWIVGEAGIGLGVIIIGLSVVVTTLTGISMSAICTNGVVRGGGAYYLISRSLGPEFGGSIGLIFAFANAVAVAMYVVGFAETVVDLLKESDSMMVDPTNDIRIIGSITVVILLGISVAGMEWEAKAQVILLVILLIAIANFFIGTVIPSNNEKKSRGFFNYQASIFAENFGPRFTKGEGFFSVFAIFFPAATGILAGANISGDLEVRCLLCFAVLGVVVHLVGSTRS

SEQ ID NO: 873155 - protein, 182 aa, Homo sapiens
LRISFRPGNQECYDNFLQSGETAKTDASFHAYDSHTNTYYLQTFGHNTMDAVPKIEYYRNTGSISGPKVNRPSLLEIHEQLAKVSLKDTSKSPPLFITSDNFLLFHYTMNECETVKWRGLFQTLSILLTKLSLVPRKVFHRCFFFGFFFFLRQSLALSPSLKCGGHCSFELLGSNNPPTSTS

SEQ ID NO: 873156 - protein, 217 aa, Homo sapiens
MSLNNSSNVFLDSVPSNTNRFQVSVINENHESSAAADDNTDPPHYEETSFGDEAQKRLRISFRPGNQECYDNFLQSGETAKTDASFHAYDSHTNTYYLQTFGHNTMDAVPKIEYYRNTGSISGPKVNRPSLLEIHEQLAKNVAVTPSSADRVANGDGIPGDEQAENKEDDQAGVVKFGWVKGVLVRCMLNIWGVMLFIRLSWIVGEAGIEYPSWHDW

SEQ ID NO: 873157 - protein, 890 aa, Homo sapiens
GLGVIIIGLAVTVTGITGLSTSAIATNGCVRGGGAYYLISRSLGPEFGGSIGLIFAFANAVAVAMYVVGFAETVVDLLKESDSMMVDPTNDIRIIGSITVVILLGISVAGMEWEAKAQVILLVILLIAIANFFIGTVIPSNNEKKSRGFFNYQASIFAENFGPRFTKGEGFFSVFAIFFPAATGILAGANISGDLEDPQDAIPRGTMLAIFITTVAYLGVAICVGACVVRDATGNMNDTIISGMNCNGSAACGLGYDFSRCRHEPCQYGLMNNFQVMSMVSGFGPLITAGIFSATLSSALASLVSAPKVFQALCKDNIYKALQFFAKGYGKNNEPLRGYILTFLIAMAFILIAELNTIAPIISNFFLASYALINFSCFHASYAKSPGWRPAYGIYNMWVSLFGAVLCCAVMFVINWWAAVITYVIEFFLYVYVTCKKPDVNWGSSTQALSYVSALDNALELTTVEDHVKNFRPQCIVLTGGPMTRPALLDITHAFTKNSGLCICCEVFVGPRKLCVKEMNSGMAKKQAWLIKNKIKAFYAAVAADCFRDGVRSLLQASGLGRMKPNTLVIGYKKNWRKAPLTEIENYVGIIHDAFDFEIGVVIVRISQGFDISQVLQVQEELERLEQERLALEATIKDNECEEESGGIRGLFKKAGKLNITKTTPKKDGSINTSQSMHVGEFNQKLVEASTQFKKKQEKGTIDVWWLFDDGGLTLLIPYILTLRKKWKDCKLRIYVGGKINRIEEEKIAMASLLSKFRIKFADIHIIGDINIRPNKESWKVFEEMIEPYRLHESCKDLTTAEKLKRETPWKITDAELEAVKEKSYRQVRLNELLQEHSRAANLIVLSLPVARKGSISDLLYMAWLEILTKNLPPVLLVRGNHKNVLTFYS

SEQ ID NO: 873158 - protein, 32 aa, Homo sapiens
AGGLGPLSLRQQLASGSYNEQFFGPGTRLTVH

SEQ ID NO: 873159 - protein, 31 aa, Homo sapiens
ELGDSALYLCASSWTADTEAFFGQGTRLTVV

SEQ ID NO: 873160 - protein, 36 aa, Homo sapiens
TSSQTSVYFCAISDGTVELWLHLRFGDQVNRCRGRL

SEQ ID NO: 873161 - protein, 33 aa, Homo sapiens
SWGTRPFIFAPAAGQRTDTQYFGPGTRLTVLED

SEQ ID NO: 873162 - protein, 30 aa, Homo sapiens
AGGLGPLSLRQQLASDNEKLFFGSGTQLSV

SEQ ID NO: 873163 - protein, 42 aa, Homo sapiens
  misc_feature (15)..(15): Xaa can be any naturally occurring amino acid
SFVTLLCISVPAAEXGGWSPLHFGNGTRLTVTEDLNKVFPPE

SEQ ID NO: 873164 - protein, 32 aa, Homo sapiens
AGGLGPLSLRQQLASEGYYEQYFGPGTRLTVT

SEQ ID NO: 873165 - protein, 36 aa, Homo sapiens
TSSQTSVYFCAISDGTVGCNQPQHFGDGTRLSILED

SEQ ID NO: 873166 - protein, 34 aa, Homo sapiens
SFVTLLCISVPAARAQANTGELFFGEGSRLTVLG

SEQ ID NO: 873167 - protein, 35 aa, Homo sapiens
LQNWRILEFIFCASSQGCNQPQHFGDGTRLSILED

SEQ ID NO: 873168 - protein, 35 aa, Homo sapiens
ELGDSALYLCASSWTAGCNQPQHFGDGTRLSILED

SEQ ID NO: 873169 - protein, 35 aa, Homo sapiens
LQNWRILEFIFCASSQQANTGELFFGEGSRLTVLG

SEQ ID NO: 873170 - protein, 33 aa, Homo sapiens
SFVTLLCISVPAAKQRGSYNEQFFGPGTRLTVH

SEQ ID NO: 873171 - protein, 35 aa, Homo sapiens
ELGDSALYLCASSWTAQANTGELFFGEGSRLTVLG

SEQ ID NO: 873172 - protein, 42 aa, Homo sapiens
AAASQTSVYFCAISEAAMLREFLAANTGELFFGEGSRLTVLG

SEQ ID NO: 873173 - protein, 38 aa, Homo sapiens
KRTRQLSISVPVPPHGVRVANYGYTFGSGTRLTVVEDG

SEQ ID NO: 873174 - protein, 31 aa, Homo sapiens
RRLSPVSLRQQPRQRSYNEQFFGPGTRLTVH

SEQ ID NO: 873175 - protein, 30 aa, Homo sapiens
PEDSALYLCASSQDSDTEAFFGQGTRLTVV

SEQ ID NO: 873176 - protein, 32 aa, Homo sapiens
HGDSALYFCASIVGMFRETQYFGPGTRLLVLG

SEQ ID NO: 873177 - protein, 31 aa, Homo sapiens
GRLGCVSLCQKLSTALCSGNTIYFGEGSWLT

SEQ ID NO: 873178 - protein, 70 aa, Homo sapiens
SLDQGLQFLIQYYNGEERAKGNILERFSAQQFPDLHSELNLSSLELGDSALYFCASSRSTALHEHQPSVQ

SEQ ID NO: 873179 - protein, 36 aa, Homo sapiens
LQNWRILEFIFCASSQLGTSETQYFGPGTRLTVLED

SEQ ID NO: 873180 - protein, 33 aa, Homo sapiens
SFVTLLCISVPAAKQREGYYEQYFGPGTRLTVT

SEQ ID NO: 873181 - protein, 35 aa, Homo sapiens
LQNWRILEFIFCASSQELWLHLRFGDQVNRCRGRL

SEQ ID NO: 873182 - protein, 31 aa, Homo sapiens
ELRDSAVYFCASSQAAGTLKLSLDKAPDSQL

SEQ ID NO: 873183 - protein, 34 aa, Homo sapiens
SFVTLLCISVPAARAGCNQPQHFGDGTRLSILED

SEQ ID NO: 873184 - protein, 34 aa, Homo sapiens
SFVTLLCISVPAARAELWLHLRFGDQVNRCRGRL

SEQ ID NO: 873185 - protein, 40 aa, Homo sapiens
ELGDSALYLCASSWTAPGEGEHFTPPLWERDQAHCDRGPE

SEQ ID NO: 873186 - protein, 34 aa, Homo sapiens
TSSQTSVYFCAISDGTVGATMSSSSGQGHGSPCI

SEQ ID NO: 873187 - protein, 35 aa, Homo sapiens
AAPSQTSVYFCASSEGERQGYYEQYFGPGTRLTVT

SEQ ID NO: 873188 - protein, 33 aa, Homo sapiens
LQNWRILEFIFCASSQHRYAVFWPRHPADSARG

SEQ ID NO: 873189 - protein, 77 aa, Homo sapiens
SLDQGLQFLIQYYNGEERAKGNILERFSAQQFPDLHSELNLSSLELGDSALYFCASSEAQPFWGQRPDFRGRQQADR

SEQ ID NO: 873190 - protein, 38 aa, Homo sapiens
CCLPDICVLLCQQLPYLWGNWKGYYEQYFGPGTRLTVT

SEQ ID NO: 873191 - protein, 32 aa, Homo sapiens
ELRDSAVYFCASSQSKGYYEQYFGPGTRLTVT

SEQ ID NO: 873192 - protein, 32 aa, Homo sapiens
TSSQTSVYFCAISDGTVDTEAFFGQGTRLTVV

SEQ ID NO: 873193 - protein, 30 aa, Homo sapiens
PGTQLCIFVLVSEEGQTLKLSLDKAPDSQL

SEQ ID NO: 873194 - protein, 31 aa, Homo sapiens
QGDLAVYLCASSSATADTEAFFGQGTRLTVV

SEQ ID NO: 873195 - protein, 31 aa, Homo sapiens
GDSALYLCASSDRTRLVGETQYFGAGTRLSV

SEQ ID NO: 873196 - protein, 42 aa, Homo sapiens
RDSAMYRCASSLSGSGLNSPLHFGNGTRLTVTEDLNKVFPPE

SEQ ID NO: 873197 - protein, 240 aa, Homo sapiens
QPRGLIFIEYQEQNLPKGTRCQTKNKERKPKKSRSIPSETYSPPTPVPSSGAGGSSSPFSPPQVLEPPLNSFLGGSAPAPPQPCLGPAPFAVYWLLPTPAVWVTSREAWRGLLRTPKALGLEQEKGSGGASETMKRGIRRDPFRKRKLGGRAKKVREPTAVNSFYREASLPSVWASLRRREMVRSGARPGQVRAEDLRSPLWGWRGTGGFSGQELVKLCSKKDKDNAATLKCWDRGAGNT

SEQ ID NO: 873198 - protein, 240 aa, Homo sapiens
QPRGLIFIEYQEQNLPKGTRCQTKNKERKPKKSRSIPSETYSPPTPVPSSGAGGSSSPFSPPQVLEPPLNSFLGGSAPAPPQPCLGPAPFAVYWLLPTPAVWVTSREAWRGLLRTPKALGLEQEKGSGGASETMKRGIRRDPFRKRKLGGRAKKVREPTAVNSFYREASLPSVWASLRRREMVRSGARPGQVLSSGRHTGPAKLTNGKKAKYLKTFTTSDFKEFFRSLGWMTCRLPQKIR

SEQ ID NO: 873199 - protein, 594 aa, Homo sapiens
MYSPIIYQALCEHVQTQMSLMNDLTSKNIPNGIPAVPCHAPSHSESQATPHSSYGLCTSTPVWSLQRPPCPPKVHSEVQTDGNSQFASQEDSEIQRLITEMEACISVLPTVSGNTDIQVEIALAMQPLRSENAQLRRQLRILNQQLREQQKTQKPSGAVDCNLELFSLQSLNMSLQNQLEESLKSQELLQSKNEELLKVIENQKDENKKFSSIFKDKDQTILENKQQYDIEITRIKIELEEALVNVKSSQFKLETAEKENQILGITLRQRDAEVTRLRELTRTLQTSMAKLLSDLSVDSARCKPGNNLTKSLLNIHDKQLQHDPAPAHTSIMSYLNKLETNYSFTHSEPLSTIKNEETIEPDKTYENVLSSRGPQNSNTRGMEEASAPGIISALSKQDSDEGSETMALIEDEHNLDNTIYIPFARSTPEKKSPLSKRLSPQPQIRAATTQLVSNSGLAVSGKENKLCTPVICSSSTKEAEDAPEKLSRASDMKDTQLLKKIKEAIGKIPAATKEPEEQTACHGPSGCLSNSLQVKGNTVCDGSVFTSDLMSDWSISSFSTFTSRDEQDFRNGLAALDANIARLQKSLRTGLLEK

SEQ ID NO: 873200 - protein, 1086 aa, Homo sapiens
QPRGLIFIEYQEQNLPKGTRCQTKNKERKPKKSRSIPSETYSPPTPVPSSGAGGSSSPFSPPQVLEPPLNSFLGGSAPAPPQPCLGPAPFAVYWLLPTPAVWVTSREAWRGLLRTPKALGLEQEKGSGGASETMKRGIRRDPFRKRKLGGRAKKVREPTAVNSFYREASLPSVWASLRRREMVRSGARPGQVLSSGRHTGPAKLTNGKKATYLRKIPRFNADSGYSIHSDSESQAETVHGLDGCASLLRDILRNEDSGSETAYLENRSNSRPLESKRYGSKKKRHEKHTIPLVVQKETSSSDNKKQIPNEASARSERDTSDLEQNWSLQDHYRMYSPIIYQALCEHVQTQMSLMNDLTSKNIPNGIPAVPCHAPSHSESQATPHSSYGLCTSTPVWSLQRPPCPPKVHSEVQTDGNSQFASQGKTVSATCTDVLRNSFNTSPGVPCSLPKTDISAIPTLQQLGLVNGILPQQGIHKETDLLKCIQTYLSLFRSHGKETHLDSQTHRSPTQSQPAFLATNEEKCAREQIREATSERKDLNIHVRDTKTVKDVQKAKNVNKTAEKVRIIKYLLGELKALVAEQEDSEIQRLITEMEACISVLPTVSGNTDIQVEIALAMQPLRSENAQLRRQLRILNQQLREQQKTQKPSGAVDCNLELFSLQSLNMSLQNQLEESLKSQELLQSKNEELLKVIENQKDENKKFSSIFKDKDQTILENKQQYDIEITRIKIELEEALVNVKSSQFKLETAEKENQILGITLRQRDAEVTRLRELTRTLQTSMAKLLSDLSVDSARCKPGNNLTKSLLNIHDKQLQHDPAPAHTSIMSYLNKLETNYSFTHSEPLSTIKNEETIEPDKTYENVLSSRGPQNSNTRGMEEASAPGIISALSKQDSDEGSETMALIEDEHNLDNTIYIPFARSTPEKKSPLSKRLSPQPQIRAATTQLVSNSGLAVSGKENKLCTPVICSSSTKEAEDAPEKLSRASDMKDTQLLKKIKEAIGKIPAATKEPEEQTACHGPSGCLSNSLQVKGNTVCDGSVFTSDLMSDWSISSFSTFTSRDEQDFRNGLAALDANIARLQKSLRTGLLEK

SEQ ID NO: 873201 - protein, 753 aa, Homo sapiens
MYSPIIYQALCEHVQTQMSLMNDLTSKNIPNGIPAVPCHAPSHSESQATPHSSYGLCTSTPVWSLQRPPCPPKVHSEVQTDGNSQFASQGKTVSATCTDVLRNSFNTSPGVPCSLPKTDISAIPTLQQLGLVNGILPQQGIHKETDLLKCIQTYLSLFRSHGKETHLDSQTHRSPTQSQPAFLATNEEKCAREQIREATSERKDLNIHVRDTKTVKDVQKAKNVNKTAEKVRIIKYLLGELKALVAEQEDSEIQRLITEMEACISVLPTVSGNTDIQVEIALAMQPLRSENAQLRRQLRILNQQLREQQKTQKPSGAVDCNLELFSLQSLNMSLQNQLEESLKSQELLQSKNEELLKVIENQKDENKKFSSIFKDKDQTILENKQQYDIEITRIKIELEEALVNVKSSQFKLETAEKENQILGITLRQRDAEVTRLRELTRTLQTSMAKLLSDLSVDSARCKPGNNLTKSLLNIHDKQLQHDPAPAHTSIMSYLNKLETNYSFTHSEPLSTIKNEETIEPDKTYENVLSSRGPQNSNTRGMEEASAPGIISALSKQDSDEGSETMALIEDEHNLDNTIYIPFARSTPEKKSPLSKRLSPQPQIRAATTQLVSNSGLAVSGKENKLCTPVICSSSTKEAEDAPEKLSRASDMKDTQLLKKIKEAIGKIPAATKEPEEQTACHGPSGCLSNSLQVKGNTVCDGSVFTSDLMSDWSISSFSTFTSRDEQDFRNGLAALDANIARLQKSLRTGLLEK

SEQ ID NO: 873202 - protein, 1022 aa, Homo sapiens
QPRGLIFIEYQEQNLPKGTRCQTKNKERKPKKSRSIPSETYSPPTPVPSSGAGGSSSPFSPPQVLEPPLNSFLGGSAPAPPQPCLGPAPFAVYWLLPTPAVWVTSREAWRGLLRTPKALGLEQEKGSGGASETMKRGIRRDPFRKRKLGGRAKKVREPTAVNSFYREASLPSVWASLRRREMVRSGARPGQVLSSGRHTGPAKLTNGKKATYLRKIPRFNADSGYSIHSDSEKSASSDNKKQIPNEASARSERDTSDLEQNWSLQDHYRMYSPIIYQALCEHVQTQMSLMNDLTSKNIPNGIPAVPCHAPSHSESQATPHSSYGLCTSTPVWSLQRPPCPPKVHSEVQTDGNSQFASQGKTVSATCTDVLRNSFNTSPGVPCSLPKTDISAIPTLQQLGLVNGILPQQGIHKETDLLKCIQTYLSLFRSHGKETHLDSQTHRSPTQSQPAFLATNEEKCAREQIREATSERKDLNIHVRDTKTVKDVQKAKNVNKTAEKVRIIKYLLGELKALVAEQEDSEIQRLITEMEACISVLPTVSGNTDIQVEIALAMQPLRSENAQLRRQLRILNQQLREQQKTQKPSGAVDCNLELFSLQSLNMSLQNQLEESLKSQELLQSKNEELLKVIENQKDENKKFSSIFKDKDQTILENKQQYDIEITRIKIELEEALVNVKSSQFKLETAEKENQILGITLRQRDAEVTRLRELTRTLQTSMAKLLSDLSVDSARCKPGNNLTKSLLNIHDKQLQHDPAPAHTSIMSYLNKLETNYSFTHSEPLSTIKNEETIEPDKTYENVLSSRGPQNSNTRGMEEASAPGIISALSKQDSDEGSETMALIEDEHNLDNTIYIPFARSTPEKKSPLSKRLSPQPQIRAATTQLVSNSGLAVSGKENKLCTPVICSSSTKEAEDAPEKLSRASDMKDTQLLKKIKEAIGKIPAATKEPEEQTACHGPSGCLSNSLQVKGNTVCDGSVFTSDLMSDWSISSFSTFTSRDEQDFRNGLAALDANIARLQKSLRTGLLEK

SEQ ID NO: 873203 - protein, 736 aa, Homo sapiens
MSLMNDLTSKNIPNGIPAVPCHAPSHSESQATPHSSYGLCTSTPVWSLQRPPCPPKVHSEVQTDGNSQFASQGKTVSATCTDVLRNSFNTSPGVPCSLPKTDISAIPTLQQLGLVNGILPQQGIHKETDLLKCIQTYLSLFRSHGKETHLDSQTHRSPTQSQPAFLATNEEKCAREQIREATSERKDLNIHVRDTKTVKDVQKAKNVNKTAEKVRIIKYLLGELKALVAEQEDSEIQRLITEMEACISVLPTVSGNTDIQVEIALAMQPLRSENAQLRRQLRILNQQLREQQKTQKPSGAVDCNLELFSLQSLNMSLQNQLEESLKSQELLQSKNEELLKVIENQKDENKKFSSIFKDKDQTILENKQQYDIEITRIKIELEEALVNVKSSQFKLETAEKENQILGITLRQRDAEVTRLRELTRTLQTSMAKLLSDLSVDSARCKPGNNLTKSLLNIHDKQLQHDPAPAHTSIMSYLNKLETNYSFTHSEPLSTIKNEETIEPDKTYENVLSSRGPQNSNTRGMEEASAPGIISALSKQDSDEGSETMALIEDEHNLDNTIYIPFARSTPEKKSPLSKRLSPQPQIRAATTQLVSNSGLAVSGKENKLCTPVICSSSTKEAEDAPEKLSRASDMKDTQLLKKIKEAIGKIPAATKEPEEQTACHGPSGCLSNSLQVKGNTVCDGSVFTSDLMSDWSISSFSTFTSRDEQDFRNGLAALDANIARLQKSLRTGLLEK

SEQ ID NO: 873204 - protein, 735 aa, Homo sapiens
VTRLRELTRTLQTSMAKLLSDLSVDSARCKPGNNLTKSLLNIHDKQLQHDPAPAHTSIMSYLNKLETNYSFTHSEPLSTIKNEETIEPDKTYENVLSSRGPQNSNTRGMEEASAPGILPQQGIHKETDLLKCIQTYLSLFRSHGKETHLDSQTHRSPTQSQPAFLATNEEKCAREQIREATSERKDLNIHVRDTKTVKDVQKAKNVNKTAEKVRIIKYLLGELKALVAEQEDSEIQRLITEMEACISVLPTVSGNTDIQVEIALAMQPLRSENAQLRRQLRILNQQLREQQKTQKPSGAVDCNLELFSLQSLNMSLQNQLEESLKSQELLQSKNEELLKVIENQKDENKKFSSIFKDKDQTILENKQQYDIEITRIKIELEEALVNVKSSQFKLETAEKENQILGITLRQRDAEVTRLRELTRTLQTSMAKLLSDLSVDSARCKPGNNLTKSLLNIHDKQLQHDPAPAHTSIMSYLNKLETNYSFTHSEPLSTIKNEETIEPDKTYENVLSSRGPQNSNTRGMEEASAPGIISALSKQDSDEGSETMALIEDEHNLDNTIYIPFARSTPEKKSPLSKRLSPQPQIRAATTQLVSNSGLAVSGKENKLCTPVICSSSTKEAEDAPEKLSRASDMKDTQLLKKIKEAIGKIPAATKEPEEQTACHGPSGCLSNSLQVKGNTVCDGSVFTSDLMSDWSISSFSTFTSRDEQDFRNGLAALDANIARLQKSLRTGLLEK

SEQ ID NO: 873205 - protein, 1086 aa, Homo sapiens; identical to SEQ ID NO: 873200

SEQ ID NO: 873206 - protein, 1069 aa, Homo sapiens
QPRGLIFIEYQEQNLPKGTRCQTKNKERKPKKSRSIPSETYSPPTPVPSSGAGGSSSPFSPPQVLEPPLNSFLGGSAPAPPQPCLGPAPFAVYWLLPTPAVWVTSREAWRGLLRTPKALGLEQEKGSGGASETMKRGIRRDPFRKRKLGGRAKKVREPTAVNSFYREASLPSVWASLRRREMVRSGARPGQVLSSGRHTGPAKLTNGKKATYLRKIPRFNADSGYSIHSDSESQAETVHGLDGCASLLRDILRNEDSGSETAYLENRSNSRPLESKRYGSKKKRHEKHTIPLVVQKETSSSDNKKQIPNEASARSERDTSDLEQNWSLQDHYRMYSPIIYQALCEHVQTQMSLMNDLTSKNIPNGIPAVPCHAPSHSESQATPHSSYGLCTSTPVWSLQRPPCPPKVHSEVQTDGNSQFASQGKTVSATCTDVLRNSFNTSPGVPCSLPKTDISAIPTLQQLGLVNGILPQQGIHKETDLLKCIQTYLSLFRSHGKETHLDSQTHRSPTQSQPAFLATNEEKCAREQIREATSERKDLNIHVRDTKTVKDVQKAKNVNKTAEKVRIIKYLLGELKALVAEQEDSEIQRLITEMEACISVLPTVSGNTDIQVEIALAMQPLRSENAQLRRQLRILNQQLREQQKTQKPSGAVDCNLELFSLQSLNMSLQNQLEESLKSQELLQSKNEELLKVIENQKDENKKFSSIFKDKDQTILENKQQYDIEITRIKIELEEALVNVKSSQFKLETAEKENQILGITLRQRDAEVTRLRELTRTLQTSMAKLLSDLSVDSARCKPGNNLTKSLLNIHDKQLQHDPAPAHTSIMSYLNKLETNYSFTHSEPLSTIKNEETIEPDKTYENVLSSRGPQNSNTRGMEEASAPGIISALSKQDSDEGSETMALIEDEHNLDNTIYIPFARSTPEKKSPLSKRLSPQPQIRAATTQLVSNSGLAVSGKENKLCTPVICSSSTKEAEDAPEKEAIGKIPAATKEPEEQTACHGPSGCLSNSLQVKGNTVCDGSVFTSDLMSDWSISSFSTFTSRDEQDFRNGLAALDANIARLQKSLRTGLLEK

SEQ ID NO: 873207 - protein, 946 aa, Homo sapiens
QPRGLIFIEYQEQNLPKGTRCQTKNKERKPKKSRSIPSETYSPPTPVPSSGAGGSSSPFSPPQVLEPPLNSFLGGSAPAPPQPCLGPAPFAVYWLLPTPAVWVTSREAWRGLLRTPKALGLEQEKGSGGASETMKRGIRRDPFRKRKLGGRAKKVREPTAVNSFYREASLPSVWASLRRREMVRSGARPGQVLSSGRHTGPAKLTNGKKATYLRKIPRFNADSGYSIHSDSESQAETVHGLDGCASLLRDILRNEDSGSETAYLENRSNSRPLESKRYGSKKKRHEKHTIPLVVQKETSSSDNKKQIPNEASARSERDTSDLEQNWSLQDHYRMYSPIIYQALCEHVQTQMSLMNDLTSKNIPNGIPAVPCHAPSHSESQATPHSSYGLCTSTPVWSLQRPPCPPKVHSEVQTDGNSQFASQGKTVSATCTDVLRNSFNTSPGVPCSLPKTDISAIPTLQQLGLVNGILPQQGIHKETDLLKCIQTYLSLFRSHGKETHLDSQTHRSPTQSQPAFLATNEEKCAREQIREATSERKDLNIHVRDTKTVKDVQKAKNVNKTAEKVRIIKYLLGELKALVAEQEDSEIQRLITEMEACISVLPTVSGNTDIQVEIALAMQPLRSENAQLRRQLRILNQQLREQQKTQKPSGAVDCNLELFSLQSLNMSLQNQLEESLKSQELLQSKNEELLKVIENQKDENKKFSSIFKDKDQTILENKQQYDIEITRIKIELEEALVNVKSSQFKLETAEKENQILGITLRQRDAEVTRLRELTRTLQTSMAKLLSDLSVDSARCKPGNNLTKSLLNIHDKQLQHDPAPAHTSIMSYLNKLETNYSFTHSEPLSTIKNEETIEPDKTYENVLSSRGPQNSNTRGMEEASAPGIISALSKQDSDEGSETMALIEDEHNLDNTIYIPFARSTPEKKSPLSKRLSPQHHWLRMATPHHGC

SEQ ID NO: 873208 - protein, 737 aa, Homo sapiens
QPRGLIFIEYQEQNLPKGTRCQTKNKERKPKKSRSIPSETYSPPTPVPSSGAGGSSSPFSPPQVLEPPLNSFLGGSAPAPPQPCLGPAPFAVYWLLPTPAVWVTSREAWRGLLRTPKALGLEQEKGSGGASETMKRGIRRDPFRKRKLGGRAKKVREPTAVNSFYREASLPSVWASLRRREMVRSGARPGQVLSSGRHTGPAKLTNGKKATYLRKIPRFNADSGYSIHSDSESQAETVHGLDGCASLLRDILRNEDSGSETAYLENRSNSRPLESKRYGSKKKRHEKHTIPLVVQKETSSSDNKKQIPNEASARSERDTSDLEQNWSLQDHYRMYSPIIYQALCEHVQTQMSLMNDLTSKNIPNGIPAVPCHAPSHSESQATPHSSYGLCTSTPVWSLQRPPCPPKVHSEVQTDGNSQFASQGKTVSATCTDVLRNSFNTSPGVPCSLPKTDISAIPTLQQLGLVNGILPQQGIHKETDLLKCIQTYLSLFRSHGKETHLDSQTHRSPTQSQPAFLATNEEKCAREQIREATSERKDLNIHVRDTKTVKDVQKAKNVNKTAEKVRIIKYLLGELKALVAEQEDSEIQRLITEMEACISVLPTVSGNTDIQVEIALAMQPLRSENAQLRRQLRILNQQLREQQKTQKPSGAVDCNLELFSLQSLNMSLQNQLEESLKSQELLQSKNEELLKVIENQKDENKKFSSIFKDKDQTILENKQQYDIEITRIKIGTYLDSSY

SEQ ID NO: 873209 - protein, 658 aa, Homo sapiens
QPRGLIFIEYQEQNLPKGTRCQTKNKERKPKKSRSIPSETYSPPTPVPSSGAGGSSSPFSPPQVLEPPLNSFLGGSAPAPPQPCLGPAPFAVYWLLPTPAVWVTSREAWRGLLRTPKALGLEQEKGSGGASETMKRGIRRDPFRKRKLGGRAKKVREPTAVNSFYREASLPSVWASLRRREMVRSGARPGQVLSSGRHTGPAKLTNGKKATYLRKIPRFNADSGYSIHSDSESQAETVHGLDGCASLLRDILRNEDSGSETAYLENRSNSRPLESKRYGSKKKRHEKHTIPLVVQKETSSSDNKKQIPNEASARSERDTSDLEQNWSLQDHYRMYSPIIYQALCEHVQTQMSLMNDLTSKNIPNGIPAVPCHAPSHSESQATPHSSYGLCTSTPVWSLQRPPCPPKVHSEVQTDGNSQFASQGKTVSATCTDVLRNSFNTSPGVPCSLPKTDISAIPTLQQLGLVNGILPQQGIHKETDLLKCIQTYLSLFRSHGKETHLDSQTHRSPTQSQPAFLATNEEKCAREQIREATSERKDLNIHVRDTKTVKDVQKAKNVNKTAEKVRIIKYLLGELKALVAEQEDSEIQRLITEMEACISVLPTVSGNTDIQVEIALAMQPLRSENAQLRRQLRILNQQLREQQKTQKPSGAVDCNLECR

SEQ ID NO: 873210 - protein, 304 aa, Homo sapiens
QPRGLIFIEYQEQNLPKGTRCQTKNKERKPKKSRSIPSETYSPPTPVPSSGAGGSSSPFSPPQVLEPPLNSFLGGSAPAPPQPCLGPAPFAVYWLLPTPAVWVTSREAWRGLLRTPKALGLEQEKGSGGASETMKRGIRRDPFRKRKLGGRAKKVREPTAVNSFYREASLPSVWASLRRREMVRSGARPGQVLSSGRHTGPAKLTNGKKATYLRKIPRFNADSGYSIHSDSESQAETVHGLDGCASLLRDILRNEDSGSETAYLENRSNSRPLESKRYGSKKKRHEKHTIPLVVQKETCKPFFS

SEQ ID NO: 873211 - protein, 193 aa, Homo sapiens
QPRGLIFIEYQEQNLPKGTRCQTKNKERKPKKSRSIPSETYSPPTPVPSSGAGGSSSPFSPPQVLEPPLNSFLGGSAPAPPQPCLGPAPFAVYWLLPTPAVWVTSREAWRGLLRTPKALGLEQEKGSGGASETMKRGIRRDPFRKRKLGGRAKKVREPTAVNSFYREASLPSVWASLRRREMVRSGARPGQTF

SEQ ID NO: 873212 - protein, 927 aa, Homo sapiens
QPRGLIFIEYQEQNLPKGTRCQTKNKERKPKKSRSIPSETYSPPTPVPSSGAGGSSSPFSPPQVLEPPLNSFLGGSAPAPPQPCLGPAPFAVYWLLPTPAVWVTSREAWRGLLRTPKALGLEQEKGSGGASETMKRGIRRDPFRKRKLGGRAKKVREPTAVNSFYREASLPSVWASLRRREMVRSGARPGQVLSSGRHTGPAKLTNGKKATYLRKIPRFNADSGYSIHSDSESQAETVHGLDGCASLLRDILRNEDSGSETAYLENRSNSRPLESKRYGSKKKRHEKHTIPLVVQKETSSSDNKKQIPNEASARSERDTSDLEQNWSLQDHYRMYSPIIYQALCEHVQTQMSLMNDLTSKNIPNGIPAVPCHAPSHSESQATPHSSYGLCTSTPVWSLQRPPCPPKVHSEVQTDGNSQFASQEDSEIQRLITEMEACISVLPTVSGNTDIQVEIALAMQPLRSENAQLRRQLRILNQQLREQQKTQKPSGAVDCNLELFSLQSLNMSLQNQLEESLKSQELLQSKNEELLKVIENQKDENKKFSSIFKDKDQTILENKQQYDIEITRIKIELEEALVNVKSSQFKLETAEKENQILGITLRQRDAEVTRLRELTRTLQTSMAKLLSDLSVDSARCKPGNNLTKSLLNIHDKQLQHDPAPAHTSIMSYLNKLETNYSFTHSEPLSTIKNEETIEPDKTYENVLSSRGPQNSNTRGMEEASAPGIISALSKQDSDEGSETMALIEDEHNLDNTIYIPFARSTPEKKSPLSKRLSPQPQIRAATTQLVSNSGLAVSGKENKLCTPVICSSSTKEAEDAPEKLSRASDMKDTQLLKKIKEAIGKIPAATKEPEEQTACHGPSGCLSNSLQVKGNTVCDGSVFTSDLMSDWSISSFSTFTSRDEQDFRNGLAALDANIARLQKSLRTGLLEK

SEQ ID NO: 873213 - protein, 594 aa, Homo sapiens; identical to SEQ ID NO: 873199

SEQ ID NO: 873214 - protein, 1045 aa, Homo sapiens
QPRGLIFIEYQEQNLPKGTRCQTKNKERKPKKSRSIPSETYSPPTPVPSSGAGGSSSPFSPPQVLEPPLNSFLGGSAPAPPQPCLGPAPFAVYWLLPTPAVWVTSREAWRGLLRTPKALGLEQEKGSGGASETMKRGIRRDPFRKRKLGGRAKKVREPTAVNSFYREASLPSVWASLRRREMVRSGARPGQVLSSGRHTGPAKLTNGKKATYLRKIPRFNADSGYSIHSDSESQAETVHGLDGCASLLRDILRNEDSASSDNKKQIPNEASARSERDTSDLEQNWSLQDHYRMYSPIIYQALCEHVQTQMSLMNDLTSKNIPNGIPAVPCHAPSHSESQATPHSSYGLCTSTPVWSLQRPPCPPKVHSEVQTDGNSQFASQGKTVSATCTDVLRNSFNTSPGVPCSLPKTDISAIPTLQQLGLVNGILPQQGIHKETDLLKCIQTYLSLFRSHGKETHLDSQTHRSPTQSQPAFLATNEEKCAREQIREATSERKDLNIHVRDTKTVKDVQKAKNVNKTAEKVRIIKYLLGELKALVAEQEDSEIQRLITEMEACISVLPTVSGNTDIQVEIALAMQPLRSENAQLRRQLRILNQQLREQQKTQKPSGAVDCNLELFSLQSLNMSLQNQLEESLKSQELLQSKNEELLKVIENQKDENKKFSSIFKDKDQTILENKQQYDIEITRIKIELEEALVNVKSSQFKLETAEKENQILGITLRQRDAEVTRLRELTRTLQTSMAKLLSDLSVDSARCKPGNNLTKSLLNIHDKQLQHDPAPAHTSIMSYLNKLETNYSFTHSEPLSTIKNEETIEPDKTYENVLSSRGPQNSNTRGMEEASAPGIISALSKQDSDEGSETMALIEDEHNLDNTIYIPFARSTPEKKSPLSKRLSPQPQIRAATTQLVSNSGLAVSGKENKLCTPVICSSSTKEAEDAPEKLSRASDMKDTQLLKKIKEAIGKIPAATKEPEEQTACHGPSGCLSNSLQVKGNTVCDGSVFTSDLMSDWSISSFSTFTSRDEQDFRNGLAALDANIARLQKSLRTGLLEK

SEQ ID NO: 873215 - protein, 1021 aa, Homo sapiens
QPRGLIFIEYQEQNLPKGTRCQTKNKERKPKKSRSIPSETYSPPTPVPSSGAGGSSSPFSPPQVLEPPLNSFLGGSAPAPPQPCLGPAPFAVYWLLPTPAVWVTSREAWRGLLRTPKALGLEQEKGSGGASETMKRGIRRDPFRKRKLGGRAKKVREPTAVNSFYREASLPSVWASLRRREMVRSGARPGQVLSSGRHTGPAKLTNGKKSAETVHGLDGCASLLRDILRNEDSASSDNKKQIPNEASARSERDTSDLEQNWSLQDHYRMYSPIIYQALCEHVQTQMSLMNDLTSKNIPNGIPAVPCHAPSHSESQATPHSSYGLCTSTPVWSLQRPPCPPKVHSEVQTDGNSQFASQGKTVSATCTDVLRNSFNTSPGVPCSLPKTDISAIPTLQQLGLVNGILPQQGIHKETDLLKCIQTYLSLFRSHGKETHLDSQTHRSPTQSQPAFLATNEEKCAREQIREATSERKDLNIHVRDTKTVKDVQKAKNVNKTAEKVRIIKYLLGELKALVAEQEDSEIQRLITEMEACISVLPTVSGNTDIQVEIALAMQPLRSENAQLRRQLRILNQQLREQQKTQKPSGAVDCNLELFSLQSLNMSLQNQLEESLKSQELLQSKNEELLKVIENQKDENKKFSSIFKDKDQTILENKQQYDIEITRIKIELEEALVNVKSSQFKLETAEKENQILGITLRQRDAEVTRLRELTRTLQTSMAKLLSDLSVDSARCKPGNNLTKSLLNIHDKQLQHDPAPAHTSIMSYLNKLETNYSFTHSEPLSTIKNEETIEPDKTYENVLSSRGPQNSNTRGMEEASAPGIISALSKQDSDEGSETMALIEDEHNLDNTIYIPFARSTPEKKSPLSKRLSPQPQIRAATTQLVSNSGLAVSGKENKLCTPVICSSSTKEAEDAPEKLSRASDMKDTQLLKKIKEAIGKIPAATKEPEEQTACHGPSGCLSNSLQVKGNTVCDGSVFTSDLMSDWSISSFSTFTSRDEQDFRNGLAALDANIARLQKSLRTGLLEK

SEQ ID NO: 873216 - protein, 679 aa, Homo sapiens
MYSPIIYQALCEHVQTQMSLMNDLTSKNIPNGIPAVPCHAPSHSESQATPHSSYGLCTSTPVWSLQRPPCPPKVHSEVQTDGNSQFASQETHLDSQTHRSPTQSQPAFLATNEEKCAREQIREATSERKDLNIHVRDTKTVKDVQKAKNVNKTAEKVRIIKYLLGELKALVAEQEDSEIQRLITEMEACISVLPTVSGNTDIQVEIALAMQPLRSENAQLRRQLRILNQQLREQQKTQKPSGAVDCNLELFSLQSLNMSLQNQLEESLKSQELLQSKNEELLKVIENQKDENKKFSSIFKDKDQTILENKQQYDIEITRIKIELEEALVNVKSSQFKLETAEKENQILGITLRQRDAEVTRLRELTRTLQTSMAKLLSDLSVDSARCKPGNNLTKSLLNIHDKQLQHDPAPAHTSIMSYLNKLETNYSFTHSEPLSTIKNEETIEPDKTYENVLSSRGPQNSNTRGMEEASAPGIISALSKQDSDEGSETMALIEDEHNLDNTIYIPFARSTPEKKSPLSKRLSPQPQIRAATTQLVSNSGLAVSGKENKLCTPVICSSSTKEAEDAPEKLSRASDMKDTQLLKKIKEAIGKIPAATKEPEEQTACHGPSGCLSNSLQVKGNTVCDGSVFTSDLMSDWSISSFSTFTSRDEQDFRNGLAALDANIARLQKSLRTGLLEK

SEQ ID NO: 873217 - protein, 1013 aa, Homo sapiens
QPRGLIFIEYQEQNLPKGTRCQTKNKERKPKKSRSIPSETYSPPTPVPSSGAGGSSSPFSPPQVLEPPLNSFLGGSAPAPPQPCLGPAPFAVYWLLPTPAVWVTSREAWRGLLRTPKALGLEQEKGSGGASETMKRGIRRDPFRKRKLGGRAKKVREPTAVNSFYREASLPSVWASLRRREMVRSGARPGQVLSSGRHTGPAKLTNGKKATYLRKIPRFNADSGYSIHSDSESQAETVHGLDGCASLLRDILRNEDSGSETAYLENRSNSRPLESKRYGSKKKRHEKHTIPLVVQKETSSSDNKKQIPNEASARSERDTSDLEQNWSLQDHYRMYSPIIYQALCEHVQTQMSLMNDLTSKNIPNGIPAVPCHAPSHSESQATPHSSYGLCTSTPVWSLQRPPCPPKVHSEVQTDGNSQFASQGKTVSATCTDVLRNSFNTSPGVPCSLPKTDISAIPTLQQLGLVNGILPQQGIHKETDLLKCIQTYLSLFRSHGKETHLDSQTHRSPTQSQPAFLATNEEKCAREQIREATSERKDLNIHVRDTKTVKDVQKAKNVNKTAEKVRIIKYLLGELKALVAEQEDSEIQRLITEMEACISVLPTVSGNTDIQVEIALAMQPLRSENAQLRRQLRILNQQLREQQKTQKPSGAVDCNLEYLEEALVNVKSSQFKLETAEKENQILGITLRQRDAEVTRLRELTRTLQTSMAKLLSDLSVDSARCKPGNNLTKSLLNIHDKQLQHDPAPAHTSIMSYLNKLETNYSFTHSEPLSTIKNEETIEPDKTYENVLSSRGPQNSNTRGMEEASAPGIISALSKQDSDEGSETMALIEDEHNLDNTIYIPFARSTPEKKSPLSKRLSPQPQIRAATTQLVSNSGLAVSGKENKLCTPVICSSSTKEAEDAPEKLSRASDMKDTQLLKKIKEAIGKIPAATKEPEEQTACHGPSGCLSNSLQVKGNTVCDGSVFTSDLMSDWSISSFSTFTSRDEQDFRNGLAALDANIARLQKSLRTGLLEK

SEQ ID NO: 873218 - protein, 1086 aa, Homo sapiens; identical to SEQ ID NO: 873200

SEQ ID NO: 873219 - protein, 833 aa, Homo sapiens
QPRGLIFIEYQEQNLPKGTRCQTKNKERKPKKSRSIPSETYSPPTPVPSSGAGGSSSPFSPPQVLEPPLNSFLGGSAPAPPQPCLGPAPFAVYWLLPTPAVWVTSREAWRGLLRTPKALGLEQEKGSGGASETMKRGIRRDPFRKRKLGGRAKKVREPTAVNSFYREASLPSVWASLRRREMVRSGARPGQVLSSGRHTGPAKLTNGKKATYLRKIPRFNADSGYSIHSDSESQAETVHGLDGCASLLRDILRNEDSGSETAYLENRSNSRPLESKRYGSKKKRHEKHTIPLVVQKETSSSDNKKQIPNEASARSERDTSDLEQNWSLQDHYRMYSPIIYQALCEHVQTQMSLMNDLTSKNIPNGIPAVPCHAPSHSESQATPHSSYGLCTSTPVWSLQRPPCPPKVHSEVQTDGNSQFASQGKTVSATCTDVLRNSFNTSPGVPCSLPKTDISAIPTLQQLGLVNGILPQQGIHKETDLLKCIQTYLSLFRSHGKETHLDSQTHRSPTQSQPAFLATNEEKCAREQIREATSERKDLNIHVRDTKTVKDVQKAKNVNKTAEKVRIIKYLLGELKALVAEQEDSEIQRLITEMEACISVLPTVSGNTDIQVEIALAMQPLRSENAQLRRQLRILNQQLREQQKTQKPSGAVDCNLELFSLQSLNMSLQNQLEESLKSQELLQSKNEELLKVIENQKDENKKFSSIFKDKDQTILENKQQYDIEITRIKIELEEALVNVKSSQFKLETAEKENQILGITLRQRDAEVTRLRELTRLFKTVDLNVLQSLTQKPNTVHELRKSRTALNKEEVGDLSPGPSTHFNFSHLLGIWGSAA

SEQ ID NO: 873220 - protein, 582 aa, Homo sapiens
QPRGLIFIEYQEQNLPKGTRCQTKNKERKPKKSRSIPSETYSPPTPVPSSGAGGSSSPFSPPQVLEPPLNSFLGGSAPAPPQPCLGPAPFAVYWLLPTPAVWVTSREAWRGLLRTPKALGLEQEKGSGGASETMKRGIRRDPFRKRKLGGRAKKVREPTAVNSFYREASLPSVWASLRRREMVRSGARPGQVLSSGRHTGPAKLTNGKKATYLRKIPRFNADSGYSIHSDSESQAETVHGLDGCASLLRDILRNEDSGSETAYLENRSNSRPLESKRYGSKKKRHEKHTIPLVVQKETSSSDNKKQIPNEASARSERDTSDLEQNWSLQDHYRMYSPIIYQALCEHVQTQMSLMNDLTSKNIPNGIPAVPCHAPSHSESQATPHSSYGLCTSTPVWSLQRPPCPPKVHSEVQTDGNSQFASQGKTVSATCTDVLRNSFNTSPGVPCSLPKTDISAIPTLQQLGLVNGILPQQGIHKETDLLKCIQTYLSLFRSHGKETHLDSQTHRSPTQSQPAFLATNEEKCAREQIREATSERKDLNIHVRDTKTVKDVQKAKNVNKTAEKVRIIKYLLGELKALVAEQG

SEQ ID NO: 873221 - protein, 75 aa, Homo sapiens
PVAAHPPGRGPAHLRHWRRGYWSGPYPTLLPDAGLSGNLSDLCRVLIAPFNPGHFSQVHKDSGEKEHPRWSMKAM

SEQ ID NO: 873222 - protein, 111 aa, Homo sapiens
SAVILGTQTPRLEEAGDTSRLEFLPREGDAANWPGDRSQRSVVYAGTSTWGQGCLHMDWVGIPLQGQALFFPPPARRGLVSWFTNKSGAFVLFISRGSQSPLSFFCEQVIS

SEQ ID NO: 873223 - protein, 210 aa, Homo sapiens
CEEKERRTAAFWGKPRSRGSLSQVCDSLFGALWFLASLNFQASPCSPCPDTVPAACMLYIWSSLSLSRSWHLCWLLELPTRHSSWRAWLCAADGPSTCLPTHFSPLRAWLVFGRCGIPASSKSQVQPARPSRQNKPSRPEQKLGRRYHQPQRFPAGEVTPQRSCDITGCILRNTEHIYSDMAKQTGKQNKNMIKTFYSQNSEVSADNMHT

SEQ ID NO: 873224 - protein, 167 aa, Homo sapiens [sequence omitted]

SEQ ID NO: 873225 - protein, 109 aa, Homo sapiens
AHYFSVILLTCIMFTGTASSAGQDQEYRGSRPGVGSKLGAELQRARVPGDPNRFCLQQTCCSAPSQHTPDAETRPLPCLPCAWYLQGTENRAVGMKSGTWRARGRPRSY

SEQ ID NO: 873226 - protein, 87 aa, Homo sapiens
TGQSYRGRGLWKTGRDFEDLGLVDGELTWGGEGGGATLGSWAKSSPGRLRYPCACVAHKLVVRRTRLGGIAPGRSERGRAWSAAAAG

SEQ ID NO: 873227 - protein, 119 aa, Homo sapiens
MNLTHIYRTFYLTDAEYIFFSSAHGSFSRTDHMLRHRQASKYLKSQNQSHILSDNIGMKLEVNNKRNFGNYINSCKLNTMLLNDHWVNEEIKIKIQKFLKTNENRNTTYQNLWDTAKAV

SEQ ID NO: 873228 - protein, 130 aa, Homo sapiens
TFEKWFLFLLNDPDMYIYLYHGKRPSSESHSCIRVLAFGDKDFSLLTCAVPTAYVLCGICHSSFVSVLCLLNWRLSFLMVCRTRLSESSFQNSVALVSLYTISLRKHPTLCCCPEVWAVLEAYPFLSGTA

SEQ ID NO: 873229 - protein, 433 aa, Homo sapiens
MLKVSAVLCVCAAAWCSQSLAAAAAVAAAGGRSDGGNFLDDKQWLTTISQYDKEVGQWNKFRDDDYFRTWSPGKPFDQALDPAKDPCLKMKCSRHKVCIAQDSQTAVCISHRRLTHRMKEAGVDHRQWRGPILSTCKQCPVVYPSPVCGSDGHTYSFQCKLEYQACVLGKQISVKCEGHCPCPSDKPTSTSRNVKRACSDLEFREVANRLRDWFKALHESGSQNKKTKTLLRPERSRFDTSILPICKDSLGWMFNRLDTNYDLLLDQSELRSIYLDKNEQCTKAFFNSCDTYKDSLISNNEWCYCFQRQQDPPCQTELSNIQKRQGVKKLLGQYIPLCDEDGYYKPTQCHGSVGQCWCVDRYGNEVMGSRINGVADCAIDFEISGDFASGDFHEWTDDEDDEDDIMNDEDEIEDDDEDEGDDDDGGDDHDVYI

SEQ ID NO: 873230 - protein, 433 aa, Homo sapiens; identical to SEQ ID NO: 873229

SEQ ID NO: 873231 - protein, 393 aa, Homo sapiens
MLKVSAVLCVCAAAWCSQSLAAAAAVAAAGGRSDGGNFLDDKQWLTTISQYDKEVGQWNKFRDDDYFRTWSPGKPFDQALDPAKDPCLKMKCSRHKVCIAQDSQTAVCISHRRLTHRMKEAGVDHRQWRGPILSTCKQCPVVYPSPVCGSDGHTYSFQCKLEYQACVLGKQISVKCEGHCPCPSDKPTSTSRNVKRGFDTSILPICKDSLGWMFNRLDTNYDLLLDQSELRSIYLDKNEQCTKAFFNSCDTYKDSLISNNEWCYCFQRQQDPPCQTELSNIQKRQGVKKLLGQYIPLCDEDGYYKPTQCHGSVGQCWCVDRYGNEVMGSRINGVADCAIDFEISGDFASGDFHEWTDDEDDEDDIMNDEDEIEDDDEDEGDDDDGGDDHDVYI

SEQ ID NO: 873232 - protein, 240 aa, Homo sapiens
SGAGARVSAGLRPAEQRDLAAGVLVWGREQTLLLKSHWPLVLGRFDTSILPICKDSLGWMFNRLDTNYDLLLDQSELRSIYLDKNEQCTKAFFNSCDTYKDSLISNNEWCYCFQRQQDPPCQTELSNIQKRQGVKKLLGQYIPLCDEDGYYKPTQCHGSVGQCWCVDRYGNEVMGSRINGVADCAIDFEISGDFASGDFHEWTDDEDDEDDIMNDEDEIEDDDEDEGDDDDGGDDHDVYI

SEQ ID NO: 873233 - protein, 313 aa, Homo sapiens
MLKVSAVLCVCAAAWCSQSLAAAAAVAAAGGRSDGGNFLDDKQWLTTISQYDKEVGQWNKFRDDDYFRTWSPGKPFDQALDPAKDPCLKMKCSRHKVCIAQDSQTAVCISHRRLTHRMKEAGVDHRQWRGPILSTCKQCPVVYPSPVCGSDGHTYSFQCKLEYQACVLGKQISVKCEGHCPCPSDKPTSTSRNVKRACSDLEFREVANRLRDWFKALHESGSQNKKTKTLLRPERSRFDTSILPICKDSLGWMFNRLDTNYDLLLDQSELRSIYLDKNEQCTKAFFNSCDTYKDSLISNNEWCYCFQRQQGKR

SEQ ID NO: 873234 - protein, 433 aa, Homo sapiens; identical to SEQ ID NO: 873229

SEQ ID NO: 873235 - protein, 396 aa, Homo sapiens
VTLQDLPNTAISQYDKEVGQWNKFRDDDYFRTWSPGKPFDQALDPAKDPCLKMKCSRHKVCIAQDSQTAVCISHRRLTHRMKEAGVDHRQWRGPILSTCKQCPVVYPSPVCGSDGHTYSFQCKLEYQACVLGKQISVKCEGHCPCPSDKPTSTSRNVKRACSDLEFREVANRLRDWFKALHESGSQNKKTKTLLRPERSRFDTSILPICKDSLGWMFNRLDTNYDLLLDQSELRSIYLDKNEQCTKAFFNSCDTYKDSLISNNEWCYCFQRQQDPPCQTELSNIQKRQGVKKLLGQYIPLCDEDGYYKPTQCHGSVGQCWCVDRYGNEVMGSRINGVADCAIDFEISGDFASGDFHEWTDDEDDEDDIMNDEDEIEDDDEDEGDDDDGGDDHDVYI

SEQ ID NO: 873236 - protein, 200 aa, Homo sapiens
MCLLAVSPDGNWLAASGTSAGVHVYNVKQLKLHCTVPAYNFPVTAMAIAPNTNNLVIAHSDQQVFEYSIPDKQYTDWSRTVQKQGFHHLWLQRDTPITHISFHPKRPMHILLHDAYMFCIIDKSLPLPNDKTLLYNPFPPTNESDVIRRRTAHAFKISKIYKPLLFMDLLDERTLVAVERPLDDIIAQLPPPIKKKKFGT

SEQ ID NO: 873237 - protein, 745 aa, Homo sapiens
AANGRQPNLPPPSPPPRALPAHFRLCARSTSGAEPESARARGAGAERGEHREGERGAAGMGEFKVHRVRFFNYVPSGIRCVAYNNQSNRLAVSRTDGTVEIYNLSANYFQEKFFPGHESRATEALCWAEGQRLFSAGLNGEIMEYDLQALNIKYAMDAFGGPIWSMAASPSGSQLLVGCEDGSVKLFQITPDKIQFERNFDRQKSRILSLSWHPSGTHIAAGSIDYISVFDVKSGSAVHKMIVDRQYMGVSKRKCIVWGVAFLSDGTIISVDSAGKVQFWDSATGTLVKSHLIANADVQSIAVADQEDSFVVGTAEGTVFHFQLVPVTSNSSEKQWVRTKPFQHHTHDVRTVAHSPTALISGGTDTHLVFRPLMEKVEVKNYDAALRKITFPHRCLISCSKKRQLLLFQFAHHLELWRLGSTVATGKNGDTLPLSKNADHLLHLKTKGPENIICSCISPCGSWIAYSTVSRFFLYRLNYEHDNISLKRVSKMPAFLRSALQILFSEDSTKLFVASNQGALHIVQLSGGSFKHLHAFQPQSGTVEAMCLLAVSPDGNWLAASGTSAGVHVYNVKQLKLHCTVPAYNFPVTAMAIAPNTNNLVIAHSDQQVFEYSIPDKQYTDWSRTVQKQGFHHLWLQRDTPITHISFHPKRPMHILLHDAYMFCIIDKSLPLPNDKTLLYNPFPPTNESDVIRRRTAHAFKISKIYKPLLFMDLLDERTLVAVERPLDDIIAQLPPPIKKKKFGT

SEQ ID NO: 873238 - protein, 686 aa, Homo sapiens
MGEFKVHRVRFFNYVPSGIRCVAYNNQSNRLAVSRTDGTVEIYNLSANYFQEKFFPGHESRATEALCWAEGQRLFSAGLNGEIMEYDLQALNIKYAMDAFGGPIWSMAASPSGSQLLVGCEDGSVKLFQITPDKIQFERNFDRQKSRILSLSWHPSGTHIAAGSIDYISVFDVKSGSAVHKMIVDRQYMGVSKRKCIVWGVAFLSDGTIISVDSAGKVQFWDSATGTLVKSHLIANADVQSIAVADQEDSFVVGTAEGTVFHFQLVPVTSNSSEKQWVRTKPFQHHTHDVRTVAHSPTALISGGTDTHLVFRPLMEKVEVKNYDAALRKITFPHRCLISCSKKRQLLLFQFAHHLELWRLGSTVATGKNGDTLPLSKNADHLLHLKTKGPENIICSCISPCGSWIAYSTVSRFFLYRLNYEHDNISLKRVSKMPAFLRSALQILFSEDSTKLFVASNQGALHIVQLSGGSFKHLHAFQPQSGTVEAMCLLAVSPDGNWLAASGTSAGVHVYNVKQLKLHCTVPAYNFPVTAMAIAPNTNNLVIAHSDQQVFEYSIPDKQYTDWSRTVQKQGFHHLWLQRDTPITHISFHPKRPMHILLHDAYMFCIIDKSLPLPNDKTLLYNPFPPTNESDVIRRRTAHAFKISKIYKPLLFMDLLDERTLVAVERPLDDIIAQLPPPIKKKKFGT

SEQ ID NO: 873239 - protein, 575 aa, Homo sapiens
YLFLKKVGCEDGSVKLFQITPDKIQFERNFDRQKSRILSLSWHPSGTHIAAGSIDYISVFDVKSGSAVHKMIVDRQYMGVSKRKCIVWGVAFLSDGTIISVDSAGKVQFWDSATGTLVKSHLIANADVQSIAVADQEDSFVVGTAEGTVFHFQLVPVTSNSSEKQWVRTKPFQHHTHDVRTVAHSPTALISGGTDTHLVFRPLMEKVEVKNYDAALRKITFPHRCLISCSKKRQLLLFQFAHHLELWRLGSTVATGKNGDTLPLSKNADHLLHLKTKGPENIICSCISPCGSWIAYSTVSRFFLYRLNYEHDNISLKRVSKMPAFLRSALQILFSEDSTKLFVASNQGALHIVQLSGGSFKHLHAFQPQSGTVEAMCLLAVSPDGNWLAASGTSAGVHVYNVKQLKLHCTVPAYNFPVTAMAIAPNTNNLVIAHSDQQVFEYSIPDKQYTDWSRTVQKQGFHHLWLQRDTPITHISFHPKRPMHILLHDAYMFCIIDKSLPLPNDKTLLYNPFPPTNESDVIRRRTAHAFKISKIYKPLLFMDLLDERTLVAVERPLDDIIAQLPPPIKKKKFGT

SEQ ID NO: 873240 - protein, 684 aa, Homo sapiens
AANGRQPNLPPPSPPPRALPAHFRLCARSTSGAEPESARARGAGAERGEHREGERGAAGMGEFKVHRVRFFNYVPSGIRCVAYNNQSNRLAVSRTDGTVEIYNLSANYFQEKFFPGHESRATEALCWAEGQRLFSAGLNGEIMEYDLQALNIKYAMDAFGGPIWSMAASPSGSQLLVGCEDGSVKLFQITPDKIQFERNFDRQKSRILSLSWHPSGTHIAAGSIDYISVFDVKSGSAVHKMIVDRQYMGVSKRKCIVWGVAFLSDGTIISVDSAGKVQFWDSATGTLVKSHLIANADVQSIAVADQEDSFVVGTAEGTVFHFQLVPVTSNSSEKQWVRTKPFQHHTHDVRTVAHSPTALISGGTDTHLVFRPLMEKVEVKNYDAALRKITFPHRCLISCSKKRQLLLFQFAHHLELWRLGSTVATGKNGDTLPLSKNADHLLHLKTKGPENIICSCISPCGSWIAYSTVSRFFLYRLNYEHDNISLKRVSKMPAFLRSALQILFSEDSTKLFVASNQGALHIVQLSGGSFKHLHAFQPQSGTVEAMCLLAVSPDGNWLAASGTSAGVHVYNVKQLKLHCTVPAYNFPVTAMAIAPNTNNLVIAHSDQQVFEYSIPDKQYTDWSRTVQKQGFHHLWLQRDTPITHISFHPKRPMHILLHDAYMFCIIDKSLVSSSLLPPKSSSES

SEQ ID NO: 873241 - protein, 708 aa, Homo sapiens
TRLVEAAVNRTRAREGERGAAGMGEFKVHRVRFFNYVPSGIRCVAYNNQSNRLAVSRTDGTVEIYNLSANYFQEKFFPGHESRATEALCWAEGQRLFSAGLNGEIMEYDLQALNIKYAMDAFGGPIWSMAASPSGSQLLVGCEDGSVKLFQITPDKIQFERNFDRQKSRILSLSWHPSGTHIAAGSIDYISVFDVKSGSAVHKMIVDRQYMGVSKRKCIVWGVAFLSDGTIISVDSAGKVQFWDSATGTLVKSHLIANADVQSIAVADQEDSFVVGTAEGTVFHFQLVPVTSNSSEKQWVRTKPFQHHTHDVRTVAHSPTALISGGTDTHLVFRPLMEKVEVKNYDAALRKITFPHRCLISCSKKRQLLLFQFAHHLELWRLGSTVATGKNGDTLPLSKNADHLLHLKTKGPENIICSCISPCGSWIAYSTVSRFFLYRLNYEHDNISLKRVSKMPAFLRSALQILFSEDSTKLFVASNQGALHIVQLSGGSFKHLHAFQPQSGTVEAMCLLAVSPDGNWLAASGTSAGVHVYNVKQLKLHCTVPAYNFPVTAMAIAPNTNNLVIAHSDQQVFEYSIPDKQYTDWSRTVQKQGFHHLWLQRDTPITHISFHPKRPMHILLHDAYMFCIIDKSLPLPNDKTLLYNPFPPTNESDVIRRRTAHAFKISKIYKPLLFMDLLDERTLVAVERPLDDIIAQLPPPIKKKKFGT

SEQ ID NO: 873242 - protein, 727 aa, Homo sapiens
AANGRQPNLPPPSPPPRALPAHFRLCARSTSGAEPESARARGAGAERGEHREGERGAAGIRCVAYNNQSNRLAVSRTDGTVEIYNLSANYFQEKFFPGHESRATEALCWAEGQRLFSAGLNGEIMEYDLQALNIKYAMDAFGGPIWSMAASPSGSQLLVGCEDGSVKLFQITPDKIQFERNFDRQKSRILSLSWHPSGTHIAAGSIDYISVFDVKSGSAVHKMIVDRQYMGVSKRKCIVWGVAFLSDGTIISVDSAGKVQFWDSATGTLVKSHLIANADVQSIAVADQEDSFVVGTAEGTVFHFQLVPVTSNSSEKQWVRTKPFQHHTHDVRTVAHSPTALISGGTDTHLVFRPLMEKVEVKNYDAALRKITFPHRCLISCSKKRQLLLFQFAHHLELWRLGSTVATGKNGDTLPLSKNADHLLHLKTKGPENIICSCISPCGSWIAYSTVSRFFLYRLNYEHDNISLKRVSKMPAFLRSALQILFSEDSTKLFVASNQGALHIVQLSGGSFKHLHAFQPQSGTVEAMCLLAVSPDGNWLAASGTSAGVHVYNVKQLKLHCTVPAYNFPVTAMAIAPNTNNLVIAHSDQQVFEYSIPDKQYTDWSRTVQKQGFHHLWLQRDTPITHISFHPKRPMHILLHDAYMFCIIDKSLPLPNDKTLLYNPFPPTNESDVIRRRTAHAFKISKIYKPLLFMDLLDERTLVAVERPLDDIIAQLPPPIKKKKFGT

SEQ ID NO: 873243 - protein, 684 aa, Homo sapiens; identical to SEQ ID NO: 873240

SEQ ID NO: 873244 - protein, 688 aa, Homo sapiens
AANGRQPNLPPPSPPPRALPAHFRLCARSTSGAEPESARARGAGAERGEHREGERGAAGMGEFKVHRVRFFNYVPSGIRCVAYNNQSNRLAVSRTDGTVEIYNLSANYFQEKFFPGHESRATEALCWAEGQRLFSAGLNGEIMEYDLQALNIKYAMDAFGGPIWSMAASPSGSQLLVGCEDGSVKLFQITPDKIQFERNFDRQKSRILSLSWHPSGTHIAAGSIDYISVFDVKSGSAVHKMIVDRQYMGVSKRKCIVWGVAFLSDGTIISVDSAGKVQFWDSATGTLVKSHLIANADVQSIAVADQEDSFVVGTAEGTVFHFQLVPVTSNSSEKQWVRTKPFQHHTHDVRTVAHSPTALISGGTDTHLVFRPLMEKVEVKNYDAALRKITFPHRCLISCSKKRQLLLFQFAHHLELWRLGSTVATGKNGDTLPLSKNADHLLHLKTKGPENIICSCISPCGSWIAYSTVSRFFLYRLNYEHDNISLKRVSKMPAFLRSALQILFSEDSTKLFVASNQGALHIVQLSGGSFKHLHAFQPQSGTVEAMCLLAVSPDGNWLAASGTSAGVHVYNVKQLKLHCTVPAYNFPVTAMAIAPNTNNLVIAHSDQQVFEYSIPDKQYTDWSRTVQKQGFHHLWLQRDTPITHISFHPKRPMHILLHDAYMFCIIDKSLPLPNDKTLLYNPFPPTNE

SEQ ID NO: 873245 - protein, 704 aa, Homo sapiens
AANGRQPNLPPPSPPPRALPAHFRLCARSTSGAEPESARARGAGAERGEHREGERGAAGMGEFKVHRVRFFNYVPSGIRCVAYNNQSNRLAVSRTDGTVEIYNLSANYFQEKFFPGHESRATEALCWAEGQRLFSAGLNGEIMEYDLQALNIKYAMDAFGGPIWSMAASPSGSQLLVGCEDGSVKLFQITPDKIQFERNFDRQKSRILSLSWHPSGTHIAAGSIDYISVFDVKSGSAVHKMIVDRQYMGVSKRKCIVWGVAFLSDGTIISVDSAGKVQFWDSATGTLVKSHLIANADVQSIAVADQEDSFVVGTAEGTVFHFQLVPVTSNSSEKQWVRTKPFQHHTHDVRTVAHSPTALISGGTDTHLVFRPLMEKVEVKNYDAALRKITFPHRCLISCSKKRQLLLFQFAHHLELWRLGSTVATGKNGDTLPLSKNADHLLHLKTKGPENIICSCISPCGSWIAYSTVSRFFLYRLNYEHDNISLKRVSKMPAFLRSALQILFSEDSTKLFVASNQGALHIVQLSGGSFKHLHAFQPQSGTVEAMCLLAVSPDGNWLAASGTSAGVHVYNVKQLKLHCTVPAYNFPVTAMAIAPNTNNLVIAHSDQQVFEYSIPDKQYTDWSRTVQKQGFHHLWLQRDTPITHISFHPKRPMHILLHDAYMFCIIDKSLQMSSGGAQLMLLKFLRYISLYSSWIFWMKEHSWQ

SEQ ID NO: 873246 - protein, 688 aa, Homo sapiens
AANGRQPNLPPPSPPPRALPAHFRLCARSTSGAEPESARARGAGAERGEHREGERGAAGMGEFKVHRVRFFNYVPSGIRCVAYNNQSNRLAVSRTDGTVEIYNLSANYFQEKFFPGHESRATEALCWAEGQRLFSAGLNGEIMEYDLQALNIKYAMDAFGGPIWSMAASPSGSQLLVGCEDGSVKLFQITPDKIQFERNFDRQKSRILSLSWHPSGTHIAAGSIDYISVFDVKSGSAVHKMIVDRQYMGVSKRKCIVWGVAFLSDGTIISVDSAGKVQFWDSATGTLVKSHLIANADVQSIAVADQEDSFVVGTAEGTVFHFQLVPVTSNSSEKQWVRTKPFQHHTHDVRTVAHSPTALISGGTDTHLVFRPLMEKVEVKNYDAALRKITFPHRCLISCSKKRQLLLFQFAHHLELWRLGSTVATGKNGDTLPLSKNADHLLHLKTKGPENIICSCISPCGSWIAYSTVSRFFLYRLNYEHDNISLKRVSKMPAFLRSALQILFSEDSTKLFVASNQGALHIVQLSGGSFKHLHAFQPQSGTVEAMCLLAVSPDGNWLAASGTSAGVHVYNVKQLKLHCTVPAYNFPVTAMAIAPNTNNLVIAHSDQQVFEYSIPDKQYTDWSRTVQKQGFHHLWLQRDTPITHISFHPKRPMHILLHDAYMFCIIDKSLDDIIAQLPPPIKKKKFGT

SEQ ID NO: 873247 - protein, 656 aa, Homo sapiens
AANGRQPNLPPPSPPPRALPAHFRLCARSTSGAEPESARARGAGAERGEHREGERGAAGMGEFKVHRVRFFNYVPSGIRCVAYNNQSNRLAVSRTDGTVEIYNLSANYFQEKFFPGHESRATEALCWAEGQRLFSAGLNGEIMEYDLQALNIKYAMDAFGGPIWSMAASPSGSQLLVGCEDGSVKLFQITPDKIQFERNFDRQKSRILSLSWHPSGTHIAAGSIDYISVFDVKSGSAVHKMIVDRQYMGVSKRKCIVWGVAFLSDGTIISVDSAGKVQFWDSATGTLVKSHLIANADVQSIAVADQEDSFVVGTAEGTVFHFQLVPVTSNSSEKQWVRTKPFQHHTHDVRTVAHSPTALISGGTDTHLVFRPLMEKVEVKNYDAALRKITFPHRCLISCSKKRQLLLFQFAHHLELWRLGSTVATGKNGDTLPLSKNADHLLHLKTKGPENIICSCISPCGSWIAYSTVSRFFLYRLNYEHDNISLKRVSKMPAFLRSALQILFSEDSTKLFVASNQGALHIVQLSGGSFKHLHAFQPQSGTVEAMCLLAVSPDGNWLAASGTSAGVHVYNVKQLKVFEYSIPDKQYTDWSRTVQKQGFHHLWLQRDTPITHISFHPKRPMHILLHDAYMFCIIDKSLDDIIAQLPPPIKKKKFGT

SEQ ID NO: 873248 - protein, 630 aa, Homo sapiens
AANGRQPNLPPPSPPPRALPAHFRLCARSTSGAEPESARARGAGAERGEHREGERGAAGMGEFKVHRVRFFNYVPSGIRCVAYNNQSNRLAVSRTDGTVEIYNLSANYFQEKFFPGHESRATEALCWAEGQRLFSAGLNGEIMEYDLQALNIKYAMDAFGGPIWSMAASPSGSQLLVGCEDGSVKLFQITPDKIQFERNFDRQKSRILSLSWHPSGTHIAAGSIDYISVFDVKSGSAVHKMIVDRQYMGVSKRKCIVWGVAFLSDGTIISVDSAGKVQFWDSATGTLVKSHLIANADVQSIAVADQEDSFVVGTAEGTVFHFQLVPVTSNSSEKQWVRTKPFQHHTHDVRTVAHSPTALISGGTDTHLVFRPLMEKVEVKNYDAALRKITFPHRCLISCSKKRQLLLFQFAHHLELWRLGSTVATGTVEAMCLLAVSPDGNWLAASGTSAGVHVYNVKQLKLHCTVPAYNFPVTAMAIAPNTNNLVIAHSDQQVFEYSIPDKQYTDWSRTVQKQGFHHLWLQRDTPITHISFHPKRPMHILLHDAYMFCIIDKSLPLPNDKTLLYNPFPPTNESDVIRRRTAHAFKISKIYKPLLFMDLLDERTLVAVERPLDDIIAQLPPPIKKKKFGT

SEQ ID NO: 873249 - protein, 745 aa, Homo sapiens; identical to SEQ ID NO: 873237

SEQ ID NO: 873250 - protein, 456 aa, Homo sapiens
EKIRGVYSFVISVRGTRRLVCKLHGAVGCQSIIQLVPVTSNSSEKQWVRTKPFQHHTHDVRTVAHSPTALISGGTDTHLVFRPLMEKVEVKNYDAALRKITFPHRCLISCSKKRQLLLFQFAHHLELWRLGSTVATGKNGDTLPLSKNADHLLHLKTKGPENIICSCISPCGSWIAYSTVSRFFLYRLNYEHDNISLKRVSKMPAFLRSALQILFSEDSTKLFVASNQGALHIVQLSGGSFKHLHAFQPQSGTVEAMCLLAVSPDGNWLAASGTSAGVHVYNVKQLKLHCTVPAYNFPVTAMAIAPNTNNLVIAHSDQQVFEYSIPDKQYTDWSRTVQKQGFHHLWLQRDTPITHISFHPKRPMHILLHDAYMFCIIDKSLPLPNDKTLLYNPFPPTNESDVIRRRTAHAFKISKIYKPLLFMDLLDERTLVAVERPLDDIIAQLPPPIKKKKFGT

SEQ ID NO: 873251 - protein, 500 aa, Homo sapiens
AANGRQPNLPPPSPPPRALPAHFRLCARSTSGAEPESARARGAGAERGEHREGERGAAGMGEFKVHRVRFFNYVPSGIRCVAYNNQSNRLAVSRTDGTVEIYNLSANYFQEKFFPGHESRATEALCWAEGQRLFSAGLNGEIMEYDLQALNIKYAMDAFGGPIWSMAASPSGSQLLVGCEDGSVKLFQITPDKIQFERNFDRQKSRILSLSWHPSGTHIAAGSIDYISVFDVKSGSAVHKMIVDRQYMGVSKRKCIVWGVAFLSDGTIISVDSAGKVQFWDSATGTLVKSHLIANADVQSIAVADQEDSFVVGTAEGTVFHFQLVPVTSNSSEKQWVRTKPFQHHTHDVRTVAHSPTALISGGTDTHLVFRPLMEKVEVKNYDAALRKITFPHRCLISCSKKRQLLLFQFAHHLELWRLGSTVATGKNGDTLPLSKNADHLLHLKTKGPENIICSCISPCGSWIAYSTVSRFFLYRLNYEHDDDIIAQLPPPIKKKKFGT

SEQ ID NO: 873252 - protein, 1041 aa, Homo sapiens
MAAAAAAGAASGLPGPVAQGLKEALVDTLTGILSPVQEVRAAAEEQIKVLEVTEEFGVHLAELTVDPQGALAIRQLASVILKQYVETHWCAQSEKFRPPETTERAKIVIRELLPNGLRESISKVRSSVAYAVSAIAHWDWPEAWPQLFNLLMEMLVSGDLNAVHGAMRVLTEFTREVTDTQMPLVAPVILPEMYKIFTMAEVYGIRTRSRAVEIFTTCAHMICNMEELEKGAAKVLIFPVVQQFTEAFVQALQIPDGPTSDSGFKMEVLKAVTALVKNFPKHMVSSMQQILPIVWNTLTESAAFYVRTEVNYTEEVEDPVDSDGEVLGFENLVFSIFEFVHALLENSKFKSTVKKALPELIYYIILYMQITEEQIKVWTANPQQFVEDEDDDTFSYTVRIAAQDLLLAVATDFQNESAAALAAAATRHLQEAEQTKNSGTEHWWKIHEACMLALGSVKAIITDSVKNGRIHFDMHGFLTNVILADLNLSVSPFLLGRALWAASRFTVAMSPELIQQFLQATVSGLHETQPPSVRISAVRAIWGYCDQLKVSESTHVLQPFLPSILDGLIHLAAQFSSEVLNLVMETLCIVCTVDPEFTASMESKICPFTIAIFLKYSNDPVVASLAQDIFKELSQIEACQGPMQMRLIPTLVSIMQAPADKIPAGLCATAIDILTTVVRNTKPPLSQLLICQAFPAVAQCTLHTDDNATMQNGGECLRAYVSVTLEQVAQWHDEQGHNGLWYVMQVVSQLLDPRTSEFTAAFVGRLVSTLISKAGRELGENLDQILRAILSKMQQAETLSVMQSLIMVFAHLVHTQLEPLLEFLCSLPGPTGKPALEFVMAEWTSRQHLFYGQYEGKVSSVALCKLLQHGINADDKRLQDIRVKGEEIYSMDEGIRTRSKSAKNPERWTNIPLLVKILKLIINELSNVMEANAARQATPAEWSQDDSNDMWEDQEEEEEEEEDGLAGQLLSDILATSKYEEDYYEDDEEDDPDALKDPLYQIDLQAYLTDFLCQFAQQPCYIMFSGHLNDNERRVLQTIGI

SEQ ID NO: 873253 - protein, 579 aa, Homo sapiens
RKTLARRRPGLIRQRLHNVILAELNLSVSPFLLGRALWAASRFTVAMSPELIQQFLQATVSGLHETQPPSVRISAVRAIWGYCDQLKVSESTHVLQPFLPSILDGLIHLAAQFSSEVLNLVMETLCIVCTVDPEFTASMESKICPFTIAIFLKYSNDPVVASLAQDIFKELSQIEACQGPMQMRLIPTLVSIMQAPADKIPAGLCATAIDILTTVVRNTKPPLSQLLICQAFPAVAQCTLHTDDNATMQNGGECLRAYVSVTLEQVAQWHDEQGHNGLWYVMQVVSQLLDPRTSEFTAAFVGRLVSTLISKAGRELGENLDQILRAILSKMQQAETLSVMQSLIMVFAHLVHTQLEPLLEFLCSLPGPTGKPALEFVMAEWTSRQHLFYGQYEGKVSSVALCKLLQHGINADDKRLQDIRVKGEEIYSMDEGIRTRSKSAKNPERWTNIPLLVKILKLIINELSNVMEANAARQATPAEWSQDDSNDMWEDQEEEEEEEEDGLAGQLLSDILATSKYEEDYYEDDEEDDPDALKDPLYQIDLQAYLTDFLCQFAQQPCYIMFSGHLNDNERRVLQTIGI

SEQ ID NO: 873254 - protein, 1041 aa, Homo sapiens; identical to SEQ ID NO: 873252

SEQ ID NO: 873255 - protein, 202 aa, Homo sapiens
SSVPLSSWQHLFYGQWRQVSSVALCKLLQHGINADDKRLQDIRVKGEEIYSMDEGIRTRSKSAKNPERWTNIPLLVKILKLIINELSNVMEANAARQATPAEWSQDDSNDMWEDQEEEEEEEEDGLAGQLLSDILATSKYEEDYYEDDEEDDPDALKDPLYQIDLQAYLTDFLCQFAQQPCYIMFSGHLNDNERRVLQTIGI

SEQ ID NO: 873256 - protein, 933 aa, Homo sapiens
MAAAAAAGAASGLPGPVAQGLKEALVDTLTGILSPVQEVRAAAEEQIKVLEVTEEFGVHLAELTVDPQGALAIRQLASVILKQYVETHWCAQSEKFRPPETTERAKIVIRELLPNGLRESISKVRSSVAYAVSAIAHWDWPEAWPQLFNLLMEMLVSGDLNAVHGAMRVLTEFTREVTDTQMPLVAPVILPEMYKIFTMAEVYGIRTRSRAVEIFTTCAHMICNMEELEKGAAKVLIFPVVQQFTEAFVQALQIPDGPTSDSGFKMEVLKAVTALVKNFPKHMVSSMQQILPIVWNTLTESAAFYVRTEVNYTEEVEDPVDSDGEVLGFENLVFSIFEFVHALLENSKFKSTVKKALPELIYYIILYMQITEEQIKVWTANPQQFVEDEDDDTFSYTVRIAAQDLLLAVATDFQNESAAALAAAATRHLQEAEQTKNSGTEHWWKIHEACMLALGSVKAIITDSVKNGRIHFDMHGFLTNVILADLNLSVSPFLLGRALWAASRFTVAMSPELIQQFLQATVSGLHETQPPSVRISAVRAIWGYCDQLKVSESTHVLQPFLPSILDGLIHLAAQFSSEVLNLVMETLCIVCTVDPEFTASMESKICPFTIAIFLKYSNDPVVASLAQDIFKELSQIEACQGPMQMRLIPTLVSIMQAPADKIPAGLCATAIDILTTVVRNTKPPLSQLLICQAFPAVAQCTLHTDDNATMQNGGECLRAYVSVTLEQVAQWHDEQGHNGLWYVMQVVSQLLDPRTSEFTAAFVGRLVSTLISKAGRELGENLDQILRAILSKMQQAETLSVMQSLIMVFAHLVHTQLEPLLEFLCSLPGPTGKPALEFVMAEWTSRQHLFYGQYEGKVSSVALCKLLQHGINADDKRLQDIRVKGEEIYSMDEGIRTRSKSAKNPERWTNIPQSLIFKGYPLSLRKPLKCFKL

SEQ ID NO: 873257 - protein, 80 aa, Homo sapiens
GRVGRPTRRTHASATSKYEEDYYEDDEEDDPDALKDPLYQIDLQAYLTDFLCQFAQQPCYIMFSGHLNDNERRVLQTIGI

SEQ ID NO: 873258 - protein, 923 aa, Homo sapiens
MAAAAAAGAASGLPGPVAQGLKEALVDTLTGILSPVQEVRAAAEEQIKVLEVTEEFGVHLAELTVDPQGALAIRQLASVILKQYVETHWCAQSEKFRPPETTERAKIVIRELLPNGLRESISKVRSSVAYAVSAIAHWDWPEAWPQLFNLLMEMLVSGDLNAVHGAMRVLTEFTREVTDTQMPLVAPVILPEMYKIFTMAEVYGIRTRSRAVEIFTTCAHMICNMEELEKGAAKVLIFPVVQQFTEAFVQALQIPDGPTSDSGFKMEVLKAVTALVKNFPKHMVSSMQQILPIVWNTLTESAAFYVRTEVNYTEEVEDPVDSDGEVLGFENLVFSIFEFVHALLENSKFKSTVKKALPELIYYIILYMQITEEQIKVWTANPQQFVEDEDDDTFSYTVRIAAQDLLLAVATDFQNESAAALAAAATRHLQEAEQTKNSGTEHWWKIHEACMLALGSVKAIITDSVKNGRIHFDMHGFLTNVILADLNLSVSPFLLGRALWAASRFTVAMSPELIQQFLQATVSGLHETQPPSVRISAVRAIWGYCDQLKVSESTHVLQPFLPSILDGLIHLAAQFSSEVLNLVMETLCIVCTVDPEFTASMESKICPFTIAIFLKYSNDPVVASLAQDIFKELSQIEACQGPMQMRLIPTLVSIMQAPADKIPAGLCATAIDILTTVVRNTKPPLSQLLICQAFPAVAQCTLHTDDNATMQNGGECLRAYVSVTLEQVAQWHDEQGHNGLWYVMQVVSQLLDPRTSEFTAAFVGRLVSTLISKAGRELGENLDQILRAILSKMQQAETLSVMQSLIMVFAHLVHTQLEPLLEFLCSLPGPTGKPALEFVMAEWTSRQHLFYGQYEGKVSSVALCKLLQHGINADDKRLQDIRVKGEEIYSMDEGIRTRSKSAKNPEAGQTFLCWISRSSEILR

SEQ ID NO: 873259 - protein, 997 aa, Homo sapiens
PSGRRPRSEKEFGVHLAELTVDPQGALAIRQLASVILKQYVETHWCAQSEKFRPPETTERAKIVIRELLPNGLRESISKVRSSVAYAVSAIAHWDWPEAWPQLFNLLMEMLVSGDLNAVHGAMRVLTEFTREVTDTQMPLVAPVILPEMYKIFTMAEVYGIRTRSRAVEIFTTCAHMICNMEELEKGAAKVLIFPVVQQFTEAFVQALQIPDGPTSDSGFKMEVLKAVTALVKNFPKHMVSSMQQILPIVWNTLTESAAFYVRTEVNYTEEVEDPVDSDGEVLGFENLVFSIFEFVHALLENSKFKSTVKKALPELIYYIILYMQITEEQIKVWTANPQQFVEDEDDDTFSYTVRIAAQDLLLAVATDFQNESAAALAAAATRHLQEAEQTKNSGTEHWWKIHEACMLALGSVKAIITDSVKNGRIHFDMHGFLTNVILADLNLSVSPFLLGRALWAASRFTVAMSPELIQQFLQATVSGLHETQPPSVRISAVRAIWGYCDQLKVSESTHVLQPFLPSILDGLIHLAAQFSSEVLNLVMETLCIVCTVDPEFTASMESKICPFTIAIFLKYSNDPVVASLAQDIFKELSQIEACQGPMQMRLIPTLVSIMQAPADKIPAGLCATAIDILTTVVRNTKPPLSQLLICQAFPAVAQCTLHTDDNATMQNGGECLRAYVSVTLEQVAQWHDEQGHNGLWYVMQVVSQLLDPRTSEFTAAFVGRLVSTLISKAGRELGENLDQILRAILSKMQQAETLSVMQSLIMVFAHLVHTQLEPLLEFLCSLPGPTGKPALEFVMAEWTSRQHLFYGQYEGKVSSVALCKLLQHGINADDKRLQDIRVKGEEIYSMDEGIRTRSKSAKNPERWTNIPLLVKILKLIINELSNVMEANAARQATPAEWSQDDSNDMWEDQEEEEEEEEDGLAGQLLSDILATSKYEEDYYEDDEEDDPDALKDPLYQIDLQAYLTDFLCQFAQQPCYIMFSGHLNDNERRVLQTIGI

SEQ ID NO: 873260 - protein, 832 aa, Homo sapiens
SEDPKSALFYITICNMEELEKGAAKVLIFPVVQQFTEAFVQALQIPDGPTSDSGFKMEVLKAVTALVKNFPKHMVSSMQQILPIVWNTLTESAAFYVRTEVNYTEEVEDPVDSDGEVLGFENLVFSIFEFVHALLENSKFKSTVKKALPELIYYIILYMQITEEQIKVWTANPQQFVEDEDDDTFSYTVRIAAQDLLLAVATDFQNESAAALAAAATRHLQEAEQTKNSGTEHWWKIHEACMLALGSVKAIITDSVKNGRIHFDMHGFLTNVILADLNLSVSPFLLGRALWAASRFTVAMSPELIQQFLQATVSGLHETQPPSVRISAVRAIWGYCDQLKVSESTHVLQPFLPSILDGLIHLAAQFSSEVLNLVMETLCIVCTVDPEFTASMESKICPFTIAIFLKYSNDPVVASLAQDIFKELSQIEACQGPMQMRLIPTLVSIMQAPADKIPAGLCATAIDILTTVVRNTKPPLSQLLICQAFPAVAQCTLHTDDNATMQNGGECLRAYVSVTLEQVAQWHDEQGHNGLWYVMQVVSQLLDPRTSEFTAAFVGRLVSTLISKAGRELGENLDQILRAILSKMQQAETLSVMQSLIMVFAHLVHTQLEPLLEFLCSLPGPTGKPALEFVMAEWTSRQHLFYGQYEGKVSSVALCKLLQHGINADDKRLQDIRVKGEEIYSMDEGIRTRSKSAKNPERWTNIPLLVKILKLIINELSNVMEANAARQATPAEWSQDDSNDMWEDQEEEEEEEEDGLAGQLLSDILATSKYEEDYYEDDEEDDPDALKDPLYQIDLQAYLTDFLCQFAQQPCYIMFSGHLNDNERRVLQTIGI

SEQ ID NO: 873261 - protein, 1041 aa, Homo sapiens; identical to SEQ ID NO: 873252

SEQ ID NO: 873262 - protein, 1024 aa, Homo sapiens
MAAAAAAGAASGLPGPVAQGLKEALVDTLTGILSPVQEVRAAAEEQIKVLEVTEEFGVHLAELTVDPQGALAIRQLASVILKQYVETHWCAQSEKFRPPETTERAKIVIRELLPNGLRESISKVRSSVAYAVSAIAHWDWPEAWPQLFNLLMEMLVSGDLNAVHGAMRVLTEFTREVTDTQMPLVAPVILPEMYKIFTMAEVYGIRTRSRAVEIFTTCAHMICNMEELEKGAAKVLIFPVVQQFTEAFVQALQIPDGPTSDSGFKMEVLKAVTALVKNFPKHMVSSMQQILPIVWNTLTESAAFYVRTEVNYTEEVEDPVDSDGEVLGFENLVFSIFEFVHALLENSKFKSTVKKALPELIYYIILYMQITEEQIKVWTANPQQFVEDEDDDTFSYTVRIAAQDLLLAVATDFQNESAAALAAAATRHLQEAEQTKNSGTEHWWKIHEACMLALGSVKAIITDSVKNGRIHFDMHGFLTNVILADLNLSVSPFLLGRALWAASRFTVAMSPELIQQFLQATVSGLHETQPPSVRISAVRAIWGYCDQLKVSESTHVLQPFLPSILDGLIHLAAQFSSEVLNLVMETLCIVCTVDPEFTASMDPVVASLAQDIFKELSQIEACQGPMQMRLIPTLVSIMQAPADKIPAGLCATAIDILTTVVRNTKPPLSQLLICQAFPAVAQCTLHTDDNATMQNGGECLRAYVSVTLEQVAQWHDEQGHNGLWYVMQVVSQLLDPRTSEFTAAFVGRLVSTLISKAGRELGENLDQILRAILSKMQQAETLSVMQSLIMVFAHLVHTQLEPLLEFLCSLPGPTGKPALEFVMAEWTSRQHLFYGQYEGKVSSVALCKLLQHGINADDKRLQDIRVKGEEIYSMDEGIRTRSKSAKNPERWTNIPLLVKILKLIINELSNVMEANAARQATPAEWSQDDSNDMWEDQEEEEEEEEDGLAGQLLSDILATSKYEEDYYEDDEEDDPDALKDPLYQIDLQAYLTDFLCQFAQQPCYIMFSGHLNDNERRVLQTIGI

SEQ ID NO: 873263 - protein, 1088 aa, Homo sapiens
  misc_feature (583)..(583): Xaa can be any naturally occurring amino acid
MAAAAAAGAASGLPGPVAQGLKEALVDTLTGILSPVQEVRAAAEEQIKVLEVTEEFGVHLAELTVDPQGALAIRQLASVILKQYVETHWCAQSEKFRPPETTERAKIVIRELLPNGLRESISKVRSSVAYAVSAIAHWDWPEAWPQLFNLLMEMLVSGDLNAVHGAMRVLTEFTREVTDTQMPLVAPVILPEMYKIFTMAEVYGIRTRSRAVEIFTTCAHMICNMEELEKGAAKVLIFPVVQQFTEAFVQALQIPDGPTSDSGFKMEVLKAVTALVKNFPKHMVSSMQQILPIVWNTLTESAAFYVRTEVNYTEEVEDPVDSDGEVLGFENLVFSIFEFVHALLENSKFKSTVKKALPELIYYIILYMQITEEQIKVWTANPQQFVEDEDDDTFSYTVRIAAQDLLLAVATDFQNESAAALAAAATRHLQEAEQTKNSGTEHWWKIHEACMLALGSVKAIITDSVKNGRIHFDMHGFLTNVILADLNLSVSPFLLGRALWAASRFTVAMSPELIQQFLQATVSGLHETQPPSVRISAVRAIWGYCDQLKVSESTHVLQPFLPSILDGLIHLAAQFEASSRVLXIRWMIGRPRCAVCICSMSRRPDNSSQQSTGQSQEIYAPRSTRVAPCYPSRVTSNLTRPDTIALRTLWPHVSESVTCDAGVPHVFVKARGYQWAPKLSRQWERLDLSANCLVSGQINWQSSTADRDSCQGLCATAIDILTTVVRNTKPPLSQLLICQAFPAVAQCTLHTDDNATMQNGGECLRAYVSVTLEQVAQWHDEQGHNGLWYVMQVVSQLLDPRTSEFTAAFVGRLVSTLISKAGRELGENLDQILRAILSKMQQAETLSVMQSLIMVFAHLVHTQLEPLLEFLCSLPGPTGKPALEFVMAEWTSRQHLFYGQYEGKVSSVALCKLLQHGINADDKRLQDIRVKGEEIYSMDEGIRTRSKSAKNPERWTNIPLLVKILKLIINELSNVMEANAARQATPAEWSQDDSNDMWEDQEEEEEEEEDGLAGQLLSDILATSKYEEDYYEDDEEDDPDALKDPLYQIDLQAYLTDFLCQFAQQPCYIMFSGHLNDNERRVLQTIGI

SEQ ID NO: 873264 - protein, 1139 aa, Homo sapiens
MAAAAAAGAASGLPGPVAQGLKEALVDTLTGILSPVQEVRAAAEEQIKVLEVTEEFGVHLAELTVDPQGALAIRQLASVILKQYVETHWCAQSEKFRPPETTERAKIVIRELLPNGLRESISKVRSSVAYAVSAIAHWDWPEAWPQLFNLLMEMLVSGDLNAVHGAMRVLTEFTREVTDTQMPLVAPVILPEMYKIFTMAEVYGIRTRSRAVEIFTTCAHMICNMEELEKGAAKVLIFPVVQQFTEAFVQALQIPDGPTSDSGFKMEVLKAVTALVKNFPKHMVSSMQQILPIVWNTLTESAAFYVRTEVNYTEEVEDPVDSDGEVLGFENLVFSIFEFVHALLENSKFKSTVKKALPELIYYIILYMQITEEQIKVWTANPQQFVEDEDDDTFSYTVRIAAQDLLLAVATDFQNESAAALAAAATRHLQEAEQTKNSGTEHWWKIHEACMLALGSVKAIITDSVKNGRIHFDMHGFLTNVILADLNLSVSPFLLGRALWAASRFTVAMSPELIQQFLQATVSGLHETQPPSVRISAVRAIWGYCDQLKVSESTHVLQPFLPSILDGLIHLAAQFSSEVLNLVMETLCIVCTVDPEFTASMESKICPFTIAIFLKYSNDPVVASLAQDIFKELSQIEACQGPMQMRLIPTLVSIMQAPADKIPAGLCATAIDILTTVVRNTKPPLSQLLICQAFPAVAQCTLHTDDNATMQNGGECLRAYVSVTLEQVAQWHDEQGHNGLWYVMQVVSQLLDPRTSEFTAAFVGRLVSTLISKAGRELGENLDQILRAILSKMQQAETLSVMQVESSGEWASYSLADRNENSYFGPELFYPLTSLVGQLSKMDLSDLFGLRNMDKEISHVFLSVDNTLSVDCISYLTGQFPLISYVSEIDFPEANVLIFSYSLIMVFAHLVHTQLEPLLEFLCSLPGPTGKPALEFVMAEWTSRQHLFYGQYEGKVSSVALCKLLQHGINADDKRLQDIRVKGEEIYSMDEGIRTRSKSAKNPERWTNIPLLVKILKLIINELSNVMEANAARQATPAEWSQDDSNDMWEDQEEEEEEEEDGLAGQLLSDILATSKYEEDYYEDDEEDDPDALKDPLYQIDLQAYLTDFLCQFAQQPCYIMFSGHLNDNERRVLQTIGI

SEQ ID NO: 873265 - protein, 1041 aa, Homo sapiens; identical to SEQ ID NO: 873252

SEQ ID NO: 873266 - protein, 969 aa, Homo sapiens
MAAAAAAGAASGLPGPVAQGLKEALVDTLTGILSPVQEVRAAAEEQIKVLEVTEEFGVHLAELTVDPQGALAIRQLASVILKQYVETHWCAQSEKFRPPETTERAKIVIRELLPNGLRESISKVRSSVAYAVSAIAHWDWPEAWPQLFNLLMEMLVSGDLNAVHGAMRVLTEFTREVTDTQMPLVAPVILPEMYKIFTMAEVYGIRTRSRAVEIFTTCAHMICNMEELEKGAAKVLIFPVVQQFTEAFVQALQIPDGPTSDSGFKMEVLKAVTALVKNFPKHMVSSMQQILPIVWNTLTESAAFYVRTEVNYTEEVEDPVDSDGEVLGFENLVFSIFEFVHALLENSKFKSTVKKALPELIYYIILYMQITEEQIKVWTANPQQFVEDEDDDTFSYTVRIAAQDLLLAVATDFQNESAAALAAAATRHLQEAEQTKNSGTEHWWKIHEACMLALGSVKAIITDSVKNGRIHFDMHGFLTNVILADLNLSVSPFLLGRALWAASRFTVAMSPELIQQFLQATVSGLHETQPPSVRISAVRAIWGYCDQLKVSESTHVLQPFLPSILDGLIHLAAQFSSEVLNLVMETLCIVCTVDPEFTASMESKICPFTIAIFLKYSNDPVVASLAQDIFKELSQIEACQGPMQMRLIPTLVSIMQAPADKIPAGLCATAIDILTTVVRNTKPPLSQLLICQAFPAVAQCTLHTDDNATMQNGGECLRAYVSVTLEQVAQWHDEQGHNGLWYVMQVVSQLLDPRTSEFTAAFVGRLVSTLISKAGRELGENLDQILRAILSKMQQAETLSVMQSLIMVFAHLVHTQLEPLLEFLCSLPGPTGKPALEFVMAEWTSRQHLFYGQYEGKVSSVALCKLLQHGINADDKRLQDIRVKGEEIYSMDEGIRTRSKSAKNPERWTNIPLLVKILKLIINELSNVMEANAARQATPAEWSQGAPGPYSQETFSLADQVTNCQIINL

SEQ ID NO: 873267 - protein, 164 aa, Homo sapiens
KSLSTLISPGSFIETNQEGLAISDSLSLGTTSHIAEAFGALLFWPIWIWGGKMHECALALAAFHLQVDDSNDMWEDQEEEEEEEEDGLAGQLLSDILATSKYEEDYYEDDEEDDPDALKDPLYQIDLQAYLTDFLCQFAQQPCYIMFSGHLNDNERRVLQTIGI

SEQ ID NO: 873268 - protein, 797 aa, Homo sapiens
MYLETRRAIFVFWIFLQVQGTKDISINIYHSETKDIDNPPRNETTESTEKMYKMSTMRRIFDLAKHRTKRSAFFPTGVKVCPQESMKQILDSLQAYYRLRVCQEAVWEAYRIFLDRIPDTGEYQDWVSICQQETFCLFDIGKNFSNSQEHLDLLQQRIKQRSFPDRKDEISAEKTLGEPGETIVISTDVANVSLGPFPLTPDDTLLNEILDNTLNDTKMPTTERETEFAVLEEQRVELSVSLVNQKFKAELADSQSPYYQELAGKSQLQMQKIFKKLPGFKKIHVLGFRPKKEKDGSSSTEMQLTAIFKRHSAEAKSPASDLLSFDSNKIESEEVYHGTMEEDKQPEIYLTATDLKRLISKALEEEQSLDVGTIQFTDEIAGSLPAFGPDTQSELPTSFAVITEDATLSPELPPVEPQLETVDGAEHGLPDTSWSPPAMASTSLSEAPPFFMASSIFSLTDQGTTDTMATDQTMLVPGLTIPTSDYSAISQLALGISHPPASSDDSRSSAGGEDMVRHLDEMDLSDTPAPSEVPELSEYVSVPDHFLEDTTPVSALQYITTSSMTIAPKGRELVVFFSLRVANMAFSNDLFNKSSLEYRALEQQFTQLLVPYLRSNLTGFKQLEILNFRNGSVIVNSKMKFAKSVPYNLTKAVHGVLEDFRSAAAQQLHLEIDSYSLNIEPADQADPCKFLACGEFAQCVKNERTEEAECRCKPGYDSQGSLDGLEPGLCGPGTKECEVLQGKGAPCRLPDHSENQAYKTSVKKFQNQQNNKVISKRNSELLTVEYEEFNHQDWEGN

SEQ ID NO: 873269 - protein, 797 aa, Homo sapiens; identical to SEQ ID NO: 873268

SEQ ID NO: 873270 - protein, 158 aa, Homo sapiens
ERPNGTSAQPAQVKPEFYRQAELKPCPWTGSNQRRCITFCPTPDQADPCKFLACGEFAQCVKNERTEEAECRCKPGYDSQGSLDGLEPGLCGPGTKECEVLQGKGAPCRLPDHSENQAYKTSVKKFQNQQNNKVISKRNSELLTVEYEEFNHQDWEGN

SEQ ID NO: 873271 - protein, 131 aa, Homo sapiens
QTRLTHLPAILPMANGLFRRRPWGLEQIRPDPESEGLFDKPPPEDPPAARGPRSASAAGKKAGRRAGGRAQGGRAGQPPKAASRPPPKKEAPPLDEGCYLDHFPHLSIFIYAAIAFSITSCIFTYIHLQLA

SEQ ID NO: 873272 - protein, 131 aa, Homo sapiens; identical to SEQ ID NO: 873271

SEQ ID NO: 873273 - protein, 785 aa, Homo sapiens
MPGVIPSESNGLSRGSPSKKNRLSLKFFQKKETKRALDFTDSQENEEKASEYRASEIDQVVPAAQSSPINCEKRENLLPFVGLNNLGNTCYLNSILQVLYFCPGFKSGVKHLFNIISRKKEALKDEANQKDKGNCKEDSLASYELICSLQSLIISVEQLQASFLLNPEKYTDELATQPRRLLNTLRELNPMYEGYLQHDAQEVLQCILGNIQETCQLLKKEEVKNVAELPTKVEEIPHPKEEMNGINSIEMDSMRHSEDFKEKLPKGNGKRKSDTEFGNMKKKVKLSKEHQSLEENQRQTRSKRKATSDTLESPPKIIPKYISENESPRPSQKKSRVKINWLKSATKQPSILSKFCSLGKITTNQGVKGQSKENECDPEEDLGKCESDNTTNGCGLESPGNTVTPVNVNEVKPINKGEEQIGFELVEKLFQGQLVLRTRCLECESLTERREDFQDISVPVQEDELSKVEESSEISPEPKTEMKTLRWAISQFASVERIVGEDKYFCENCHHYTEAERSLLFDKMPEVITIHLKCFAASGLEFDCYGGGLSKINTPLLTPLKLSLEEWSTKPTNDSYGLFAVVMHSGITISSGHYTASVKVTDLNSLELDKGNFVVDQMCEIGKPEPLNEEEARGVVENYNDEEVSIRVGGNTQPSKVLNKKNVEAIGLLGGQKSKADYELYNKASNPDKVASTAFAENRNSETSDTTGTHESDRNKESSDQTGINISGFENKISYVVQSLKEYEGKWLLFDDSEVKVTEEKDFLNSLSPSTSPTSTPYLLFYKKL

SEQ ID NO: 873274 - protein, 373 aa, Homo sapiens
MPGVIPSESNGLSRGSPSKKNRLSLKFFQKKETKRALDFTDSQENEEKASEYRASEIDQVVPAAQSSPINCEKRENLLPFVGLNNLGNTCYLNSILQVLYFCPGFKSGVKHLFNIISRKKEALKDEANQKDKGNCKEDSLASYELICSLQSLIISVEQLQASFLLNPEKYTDELATQPRRLLNTLRELNPMYEGYLQHDAQEVLQCILGNIQETCQLLKKEEVKNVAELPTKVEEIPHPKEEMNGINSIEMDSMRHSEDFKEKLPKGNGKRKSDTEFGNMKKKVKLSKEHQSLEENQRQTRSKRKATSDTLESPPKIIPKYISENESPRPSQKKSRVKINWLKSATKQPSILSKFCSLGKITTNQGVKGQSKN

SEQ ID NO: 873275 - protein, 767 aa, Homo sapiens
MPGVIPSESNGLSRGSPSKKNRLSLKFFQKKETKRALDFTDSQENEEKASEYRASEIDQVVPAAQSSPINCEKRENLLPFVGLNNLGNTCYLNSILQVLYFCPGFKSGVKHLFNIISRKKEALKDEANQKDKGNCKEDSLASYELICSLQSLIISVEQLQASFLLNPEKYTDELATQPRRLLNTLRELNPMYEGYLQHDAQEVLQCILGNIQETCQLLKKEEVKNVAELPTKVEEIPHSEDFKEKLPKGNGKRKSDTEFGNMKKKVKLSKEHQSLEENQRQTRSKRKATSDTLESPPKIIPKYISENESPRPSQKKSRVKINWLKSATKQPSILSKFCSLGKITTNQGVKGQSKENECDPEEDLGKCESDNTTNGCGLESPGNTVTPVNVNEVKPINKGEEQIGFELVEKLFQGQLVLRTRCLECESLTERREDFQDISVPVQEDELSKVEESSEISPEPKTEMKTLRWAISQFASVERIVGEDKYFCENCHHYTEAERSLLFDKMPEVITIHLKCFAASGLEFDCYGGGLSKINTPLLTPLKLSLEEWSTKPTNDSYGLFAVVMHSGITISSGHYTASVKVTDLNSLELDKGNFVVDQMCEIGKPEPLNEEEARGVVENYNDEEVSIRVGGNTQPSKVLNKKNVEAIGLLGGQKSKADYELYNKASNPDKVASTAFAENRNSETSDTTGTHESDRNKESSDQTGINISGFENKISYVVQSLKEYEGKWLLFDDSEVKVTEEKDFLNSLSPSTSPTSTPYLLFYKKL

SEQ ID NO: 873276 - protein, 785 aa, Homo sapiens; identical to SEQ ID NO: 873273

SEQ ID NO: 873277 - protein, 785 aa, Homo sapiens; identical to SEQ ID NO: 873273

SEQ ID NO: 873278 - protein, 636 aa, Homo sapiens
MPGVIPSESNGLSRGSPSKKNRLSLKFFQKKETKRALDFTDSQENEEKASEYRASEIDQVVPAAQSSPINCEKRENLLPFVGLNNLGNTCYLNSILQVLYFCPGFKSGVKHLFNIISRKKEALKDEANQKDKGNCKEDSLASYELICSLQSLIISVEQLQASFLLNPEKYTDELATQPRRLLNTLRELNPMYEGYLQHDAQEVLQCILGNIQETCQLLKKEEVKNVAELPTKVEEIPHPKEEMNGINSIEMDSMRHSEDFKEKLPKGNGKRKSDTEFGNMKKKVKLSKEHQSLEENQRQTRSKRKATSDTLESPPKIIPKYISENESPRPSQKKSRVKINWLKSATKQPSILSKFCSLGKITTNQGVKGQSKENECDPEEDLGKCESDNTTNGCGLESPGNTVTPVNVNEVKPINKGEEQIGFELVEKLFQGQLVLRTRCLECESLTERREDFQDISVPVQEDELSKVEESSEISPEPKTEMKTLRWAISQFASVERIVGEDKYFCENCHHYTEAERSLLFDKMPEVITIHLKCFAASGLEFDCYGGGLSKINTPLLTPLKLSLEEWSTKPTNDSYGLFAVVMHSGITISSGHYTASVKVTDLNSLELDKGNFVVDQMCEIGKPEPLNEEEAGSAV

SEQ ID NO: 873279 - protein, 304 aa, Homo sapiens
MKTLRWAISQFASVERIVGEDKYFCENCHHYTEAERSLLFDKMPEVITIHLKCFAASGLEFDCYGGGLSKINTPLLTPLKLSLEEWSTKPTNDSYGLFAVVMHSGITISSGHYTASVKVTDLNSLELDKGNFVVDQMCEIGKPEPLNEEEARGVVENYNDEEVSIRVGGNTQPSKVLNKKNVEAIGLLGGQKSKADYELYNKASNPDKVASTAFAENRNSETSDTTGTHESDRNKESSDQTGINISGFENKISYVVQSLKEYEGKWLLFDDSEVKVTEEKDFLNSLSPSTSPTSTPYLLFYKKL

SEQ ID NO: 873280 - protein, 586 aa, Homo sapiens
MPGVIPSESNGLSRGSPSKKNRLSLKFFQKKETKRALDFTDSQENEEKASEYRASEIDQVVPAAQSSPINCEKRENLLPFVGLNNLGNTCYLNSILQVLYFCPGFKSGVKHLFNIISRKKEALKDEANQKDKGNCKEDSLASYELICSLQSLIISVEQLQASFLLNPEKYTDELATQPRRLLNTLRELNPMYEGYLQHDAQEVLQCILGNIQETCQLLKKEEVKNVAELPTKVEEIPHPKEEMNGINSIEMDSMRHSEDFKEKLPKGNGKRKSDTEFGNMKKKVKLSKEHQSLEENQRQTRSKRKATSDTLESPPKIIPKYISENESPRPSQKKSRVKINWLKSATKQPSILSKFCSLGKITTNQGVKGQSKENECDPEEDLGKCESDNTTNGCGLESPGNTVTPVNVNEVKPINKGEEQIGFELVEKLFQGQLVLRTRCLECESLTERREDFQDISVPVQEDELSKVEESSEISPEPKTEMKTLRWAISQFASVERIVGEDKYFCENCHHYTEAERSLLFDKMPEVITIHLKCFAASGLEFDCYGGGLSKINTPLLTPLKLSLEEWSTKPTNDSYGYTSRGTGSI

SEQ ID NO: 873281 - protein, 785 aa, Homo sapiens; identical to SEQ ID NO: 873273

SEQ ID NO: 873282 - protein, 785 aa, Homo sapiens; identical to SEQ ID NO: 873273

SEQ ID NO: 873283 - protein, 785 aa, Homo sapiens; identical to SEQ ID NO: 873273

SEQ ID NO: 873284 - protein, 768 aa, Homo sapiens
MPGVIPSESNGLSRGSPSKKNRLSLKFFQKKETKRALDFTDSQENEEKASEYRASEIDQVVPAAQSSPINCEKRENLLPFVGLNNLGNTCYLNSILQVLYFCPGFKSGVKHLFNIISRKKEALKDEANQKDKGNCKEDSLASYELICSLQSLIISVEQLQASFLLNPEKYTDELATQPRRLLNTLRELNPMYEGYLQHDAQEVLQCILGNIQETCQLLKKEEVKNVAELPTKVEEIPHPKEEMNGINSIEMDSMRHSEDFKEKLPKGNGKRKSDTEFGNMKKKVKLSKEHQSLEENQRQTRSKRKATSDTLESPPKIIPKYISENESPRPSQKKSRVKINWLKSATKQPSILSKFCSLGKITTNQGVKGQSKENECDPEEDLGKCESDNTTNGCGLESPGNTVTPVNVNEVKPINKGEEQIGFELVEKLFQGQLVLRTRCLECESLTERREDFQDISVPVQEDELSKVEESSEISPEPKTEMKTLRWAISQFASVERIVGEDKYFCENCHHYTEAERSLLFDKMPEVITIHLKCFAASGLEFDCYGGGLSKINTPLLTPLKLSLEEWSTKPTNDSYGLFAVVMHSGITISSGHYTASVKVTDLNSLELDKGNFVVDQMCEIGKPEPLNEEEARGVVENYNDEEVSIRVGGNTQPSKVLNKKNVEAIGLLGGQKSKADYELYNKASNPDKVASTAFAENRNSETSDTTGTHESDRNKESSDQTGINISGFENLFDDSEVKVTEEKDFLNSLSPSTSPTSTPYLLFYKKL

SEQ ID NO: 873285 - protein, 666 aa, Homo sapiens
QSSSHQEANQKDKGNCKEDSLASYELICSLQSLIISVEQLQASFLLNPEKYTDELATQPRRLLNTLRELNPMYEGYLQHDAQEVLQCILGNIQETCQLLKKEEVKNVAELPTKVEEIPHPKEEMNGINSIEMDSMRHSEDFKEKLPKGNGKRKSDTEFGNMKKKVKLSKEHQSLEENQRQTRSKRKATSDTLESPPKIIPKYISENESPRPSQKKSRVKINWLKSATKQPSILSKFCSLGKITTNQGVKGQSKENECDPEEDLGKCESDNTTNGCGLESPGNTVTPVNVNEVKPINKGEEQIGFELVEKLFQGQLVLRTRCLECESLTERREDFQDISVPVQEDELSKVEESSEISPEPKTEMKTLRWAISQFASVERIVGEDKYFCENCHHYTEAERSLLFDKMPEVITIHLKCFAASGLEFDCYGGGLSKINTPLLTPLKLSLEEWSTKPTNDSYGLFAVVMHSGITISSGHYTASVKVTDLNSLELDKGNFVVDQMCEIGKPEPLNEEEARGVVENYNDEEVSIRVGGNTQPSKVLNKKNVEAIGLLGGQKSKADYELYNKASNPDKVASTAFAENRNSETSDTTGTHESDRNKESSDQTGINISGFENKISYVVQSLKEYEGKWLLFDDSEVKVTEEKDFLNSLSPSTSPTSTPYLLFYKKL

SEQ ID NO: 873286 - protein, 376 aa, Homo sapiens
MPGVIPSESNGLSRGSPSKKNRLSLKFFQKKETKRALDFTDSQENEEKASEYRASEIDQVVPAAQSSPINCEKRENLLPFVGLNNLGNTCYLNSILQVLYFCPGFKSGVKHLFNIISRKKEALKDEANQKDKGNCKEDSLASYELICSLQSLIISVEQLQASFLLNPEKYTDELATQPRRLLNTLRELNPMYEGYLQHDAQEVLQCILGNIQETCQLLKKEEVKNVAELPTKVEEIPHPKEEMNGINSIEMDSMRHSEDFKEKLPKGNGKRKSDTEFGNMKKKVKLSKEHQSLEENQRQTRSKRKATSDTLESPPKIIPKYISENESPRPSQKKSRVKINWLKSATKQPSILSKFCSLGKITTNQGVKGQSKYKKL

SEQ ID NO: 873287 - protein, 103 aa, Homo sapiens
RKRNILHHLLFTNLFGMPLMISESPGSVCTYSAVFSAHCVQFNIIATVVMNTTFGQHGTVSYFGFPQSGAVVGEHNQFHFALSDHLWSLLVPQHILYTFFVFV

SEQ ID NO: 873288 - protein, 112 aa, Homo sapiens
KHMCTHTQMHTLTNAHTHRDPHTNAHSHTQTHTQMYTHTRTHTQMDTLTYVYCHTHIHINIHMHIYPHACVHTCSPISPPGVKLSLRELPHTPQIPLSQLLRSLCSSSFVKV

SEQ ID NO: 873289 - protein, 43 aa, Homo sapiens
RLKPNVHSKLTCTRKAGRRGCGSGTRYFLVSLPPLPRYSCNTL

SEQ ID NO: 873290 - protein, 796 aa, Homo sapiens
METPLPKAPEKRQVTAIIFLLLLWEAGSATIKYSVLEERDSGSFVANLAKDLGLGVGELAARGARILSKGNKQYLQLERKSGNLLLKEKLDREELCGDIDPCILHFQMLLKNPVQFIQGELQLQDVNDHAPEFLENEILLKISEGSHPGTSFPLKIAQDLDVGSNTVQNYSISTNSYFHLFTRNHSDGKKYPELVLDQALDREEQPQLRLTLTALDGGSPPRTGTSQVLIVIVDINDNVPEFAQRRYEVQVPENTPIGSLVITVSARDLDAGTHGELSYSFFQYSNQIIQAFEINSITGEIRFKKALDFEEIQSYHMEVEASDGGGLSGKCTVAIEVMDINDNAPELTMSLLISDILENSPETVVAVFGISDPDSGNNGKMMCSIQDHLPFLLKPTLENFYTLLTEGALDRESRAEYNITITVTDLGTPRLKTEYNITLRVSDVNDNAPAFTQTSYTLFVRENNSPALHIGSVSATDRDSGTNAQVTYSLLPPQNPHLPLASLVSINTDNGHLFALRSLDYEALQEFEFRVGASDRGSPALSSEALVRVLVLLDANDNSPFVLYPLQNGSAPCTELVPRAAEPGYLVTKVVAVDGDSGQNAWLSYQLLKATEPGLFGVWAHNGEVRTARLLSERDAAKHRLVVLVKDNGEPPRSATATLHVLLVDGFSQPYLPLPEAAPAQAQADSLTVYLVVALASVSSLFLFSVLLFVAVRLCRRSRAASVGRYSVPEGPFPGHLVDVSGTRTLSQNYQYEVYLAESSESQLKFLKPVLPNFLGEGTGGDSEANSNSRNHFGFN

SEQ ID NO: 873291 - protein, 131 aa, Homo sapiens
CWRFRCIFLQCAILLDISVFVDEQDMLNAYFGLVYPCTYLRKQVLSGILSIEQHYPPLSPDVTTEGRSECLISDFFLCIYTHTTHAHTHTKYQYKHLPSAFLHCHASWSSPPHSVSCSACTPLIRFRCISH

SEQ ID NO: 873292 - protein, 397 aa, Homo sapiens
AVPERRTLRNRRSLAALAPPTPDMLLLLLLPLLWGRERVEGQKSNRKDYSLTMQSSVTVQEGMCVHVRCSFSYPVDSQTDSDPVHGYWFRAGNDISWKAPVATNNPAWAVQEETRDRFHLLGDPQTKNCTLSIRDARMSDAGRYFFRMEKGNIKWNYKYDQLSVNVTDPPQNLTVTVFQGEGTASTALGNSSSLSVLEGQSLRLVCAVDSNPPARLSWTWRSLTLYPSQPSNPLVLELQVHLGDEGEFTCRAQNSLGSQHVSLNLSLQQEYTGKMRPVSGVLLGAVGGAGATALVFLSFCVIFIVVRSCRKKSARPAADVGDIGMKDANTIRGSASQGNLTESWADDNPRHHGLAAHSSGEEREIQYAPLSFHKGEPQDLSGQEATNNEYSEIKIPK

SEQ ID NO: 873293 - protein, 168 aa, Homo sapiens
AVPERRTLRNRRSLAALAPPTPDMLLLLLLPLLWGRERVEGQKSNRKDYSLTMQSSVTVQEGMCVHVRCSFSYPVDSQTDSDPVHGYWFRAGNDISWKAPVATNNPAWAVQEETRDRFHLLGDPQTKNCTLSIRDARMSDAGRYFFRMEKGNIKWNYKYDQLSVNVTE

SEQ ID NO: 873294 - protein, 168 aa, Homo sapiens
AVPERRTLRNRRSLAALAPPTPDMLLLLLLPLLWGRERVEGQKSNRKDYSLTMQSSVTVQEGMCVHVRCSFSYPVDSQTDSDPVHGYWFRAGNDISWKAPVATNNPAWAVQEETRDRFHLLGDPQTKNCTLSIRDARMSDAGRYFFRMEKGNIKWNYKYDQLSVNVTG

SEQ ID NO: 873295 - protein, 343 aa, Homo sapiens
AVPERRTLRNRRSLAALAPPTPDMLLLLLLPLLWGRERVEGQKSNRKDYSLTMQSSVTVQEGMCVHVRCSFSYPVDSQTDSDPVHGYWFRAGNDISWKAPVATNNPAWAVQEETRDRFHLLGDPQTKNCTLSIRDARMSDAGRYFFRMEKGNIKWNYKYDQLSVNVTAPAPRHQPHLSGDLAWGRRDHEQDHPTQCVLSPCLSVPDPPQNLTVTVFQGEGTASTALGNSSSLSVLEGQSLRLVCAVDSNPPARLSWTWRSLTLYPSQPSNPLVLELQVHLGDEGEFTCRAQNSLGSQHVSLNLSLQQEYTGKMRPVSGVLLGAVGGAGATALVFLSFCVIFIV

SEQ ID NO: 873296 - protein, 490 aa, Homo sapiens
AVPERRTLRNRRSLAALAPPTPDMLLLLLLPLLWGRERVEGQKSNRKDYSLTMQSSVTVQEGMCVHVRCSFSYPVDSQTDSDPVHGYWFRAGNDISWKAPVATNNPAWAVQEETRDRFHLLGDPQTKNCTLSIRDARMSDAGRYFFRMEKGNIKWNYKYDQLSVNVTALTHRPNILIPGTLESGCFQNLTCSVPWACEQGTPPMISWMGTSVSPLHPSTTRSSVLTLIPQPQHHGTSLTCQVTLPGAGVTTNRTIQLNVSYPPQNLTVTVFQGEGTASTALGNSSSLSVLEGQSLRLVCAVDSNPPARLSWTWRSLTLYPSQPSNPLVLELQVHLGDEGEFTCRAQNSLGSQHVSLNLSLQQEYTGKMRPVSGVLLGAVGGAGATALVFLSFCVIFIVVRSCRKKSARPAADVGDIGMKDANTIRGSASQGNLTESWADDNPRHHGLAAHSSGEEREIQYAPLSFHKGEPQDLSGQEATNNEYSEIKIPK

SEQ ID NO: 873297 - protein, 490 aa, Homo sapiens; identical to SEQ ID NO: 873296

SEQ ID NO: 873298 - protein, 398 aa, Homo sapiens
AVPERRTLRNRRSLAALAPPTPDMLLLLLLPLLWGRERVEGQKSNRKDYSLTMQSSVTVQEGMCVHVRCSFSYPVDSQTDSDPVHGYWFRAGNDISWKAPVATNNPAWAVQEETRDRFHLLGDPQTKNCTLSIRDARMSDAGRYFFRMEKGNIKWNYKYDQLSVNVTALTHRPNILIPGTLESGCFQNLTCSVPWACEQGTPPMISWMGTSVSPLHPSTTRSSVLTLIPQPQHHGTSLTCQVTLPGAGVTTNRTIQLNVSYPPQNLTVTVFQGEGTASTALGNSSSLSVLEGQSLRLVCAVDSNPPARLSWTWRSLTLYPSQPSNPLVLELQVHLGDEGEFTCRAQNSLGSQHVSLNLSLQQEYTGKMRPVSGVLLGAVGGAGATALVFLSFCVIFIV

SEQ ID NO: 873299 - protein, 245 aa, Homo sapiens
AVPERRTLRNRRSLAALAPPTPDMLLLLLLPLLWGRERVEGQKSNRKDYSLTMQSSVTVQEGMCVHVRCSFSYPVDSQTDSDPVHGYWFRAGNDISWKAPVATNNPAWAVQEETRDRFHLLGDPQTKNCTLSIRDARMSDAGRYFFRMEKGNIVRSCRKKSARPAADVGDIGMKDANTIRGSASQGNLTESWADDNPRHHGLAAHSSGEEREIQYAPLSFHKGEPQDLSGQEATNNEYSEIKIPK

SEQ ID NO: 873300 - protein, 70 aa, Homo sapiens
VHQAVPCGRWSPWRMEAPGTLTVPTHPLGRAEVFPHRTACQWASGKHLSHHEEYEALGGCPADQEHRGLP

SEQ ID NO: 873301 - protein, 742 aa, Homo sapiens
PLSPSLNPPIGGEDTQPSPLALLAATCSKIGPPSPGDDEEEAAAAAGAPAAAGATGDLASAQLGGAPNRWEVLSATPTTIKDEAGNLVQIPSAATSSGQYVLPLQNLQNQQIFSVAPGSDSSNGTVSSVQYQVIPQIQSADGQQVQIGFTGSSDNGGINQESSQIQIIPGSNQTLLASGTPSANIQNLIPQTGQVQVQGVAIGGSSFPGQTQVVANVPLGLPGNITFVPINSVDLDSLGLSGSSQTMTAGINADGHLINTGQAMDSSDNSERTGERVSPDINETNTDTDLFVPTSSSSQLPVTIDSTGILQQNTNSLTTSSGQVHSSDLQGNYIQSPVSEETQAQNIQVSTAQPVVQHLQLQESQQPTSQAQIVQGITPQTIHGVQASGQNISQQALQNLQLQLNPGTFLIQAQTVTPSGQVTWQTFQVQGVQNLQNLQIQNTAAQQITLTPVQTLTLGQVAAGGAFTSTPVSLSTGQLPNLQTVTVNSIDSAGIQLHPGENADSPADIRIKEEEPDPEEWQLSGDSTLNTNDLTHLRVQVVDEEGDQQHQEGKRLRRVACTCPNCKEGGGRGTNLGKKKQHICHIPGCGKVYGKTSHLRAHLRWHSGERPFVCNWMYCGKRFTRSDELQRHRRTHTGEKKFVCPECSKRFMRSDHLAKHIKTHQNKKGIHSSSTVLASVEAARDDTLITAGGTTLILAKIQQGSVSGIGTVNTSATSNQDILTNTEIPLQLVTVSGNETME

SEQ ID NO: 873302 - protein, 560 aa, Homo sapiens
MTAPEKPVKQEEMAALDVDSGGGGGGGGGHGEYLQQQQQHGNGAVAAAAAAQDTQPSPLALLAATCSKIGPPSPGDDEEEAAAAAGAPAAAGATGDLASAQLGGAPNRWEVLSATPTTIKDEAGNLVQIPSAATSSGQYVLPLQNLQNQQIFSVAPGSDSSNGTVSSVQYQVIPQHLQLQESQQPTSQAQIVQGITPQTIHGVQASGQNISQQALQNLQLQLNPGTFLIQAQTVTPSGQVTWQTFQVQGVQNLQNLQIQNTAAQQITLTPVQTLTLGQVAAGGAFTSTPVSLSTGQLPNLQTVTVNSIDSAGIQLHPGENADSPADIRIKEEEPDPEEWQLSGDSTLNTNDLTHLRVQVVDEEGDQQHQEGKRLRRVACTCPNCKEGGGRGTNLGKKKQHICHIPGCGKVYGKTSHLRAHLRWHSGERPFVCNWMYCGKRFTRSDELQRHRRTHTGEKKFVCPECSKRFMRSDHLAKHIKTHQNKKGIHSSSTVLASVEAARDDTLITAGGTTLILAKIQQGSVSGIGTVNTSATSNQDILTNTEIPLQLVTVSGNETME

SEQ ID NO: 873303 - protein, 633 aa, Homo sapiens
LEDPGNILRSDSSNGTVSSVQYQVIPQIQSADGQQVQIGFTGSSDNGGINQESSQIQIIPGSNQTLLASGTPSANIQNLIPQTGQVQVQGVAIGGSSFPGQTQVVANVPLGLPGNITFVPINSVDLDSLGLSGSSQTMTAGINADGHLINTGQAMDSSDNSERTGERVSPDINETNTDTDLFVPTSSSSQLPVTIDSTGILQQNTNSLTTSSGQVHSSDLQGNYIQSPVSEETQAQNIQVSTAQPVVQHLQLQESQQPTSQAQIVQGITPQTIHGVQASGQNISQQALQNLQLQLNPGTFLIQAQTVTPSGQVTWQTFQVQGVQNLQNLQIQNTAAQQITLTPVQTLTLGQVAAGGAFTSTPVSLSTGQLPNLQTVTVNSIDSAGIQLHPGENADSPADIRIKEEEPDPEEWQLSGDSTLNTNDLTHLRVQVVDEEGDQQHQEGKRLRRVACTCPNCKEGGGRGTNLGKKKQHICHIPGCGKVYGKTSHLRAHLRWHSGERPFVCNWMYCGKRFTRSDELQRHRRTHTGEKKFVCPECSKRFMRSDHLAKHIKTHQNKKGIHSSSTVLASVEAARDDTLITAGGTTLILAKIQQGSVSGIGTVNTSATSNQDILTNTEIPLQLVTVSGNETME

SEQ ID NO: 873304 - protein, 781 aa, Homo sapiens
MTAPEKPVKQEEMAALDVDSGGGGGGGGGHGEYLQQQQQHGNGAVAAAAAAQDTQPSPLALLAATCSKIGPPSPGDDEEEAAAAAGAPAAAGATGDLASAQLGGAPNRWEVLSATPTTIKDEAGNLVQIPSAATSSGQYVLPLQNLQNQQIFSVAPGSDSSNGTVSSVQYQVIPQIQSADGQQVQIGFTGSSDNGGINQESSQIQIIPGSNQTLLASGTPSANIQNLIPQTGQVQVQGVAIGGSSFPGQTQVVANVPLGLPGNITFVPINSVDLDSLGLSGSSQTMTAGINADGHLINTGQAMDSSDNSERTGERVSPDINETNTDTDLFVPTSSSSQLPVTIDSTGILQQNTNSLTTSSGQVHSSDLQGNYIQSPVSEETQAQNIQVSTAQPVVQHLQLQESQQPTSQAQIVQGITPQTIHGVQASGQNISQQALQNLQLQLNPGTFLIQAQTVTPSGQVTWQTFQVQGVQNLQNLQIQNTAAQQITLTPVQTLTLGQVAAGGAFTSTPVSLSTGQLPNLQTVTVNSIDSAGIQLHPGENADSPADIRIKEEEPDPEEWQLSGDSTLNTNDLTHLRVQVVDEEGDQQHQEGKRLRRVACTCPNCKEGGGRGTNLGKKKQHICHIPGCGKVYGKTSHLRAHLRWHSGERPFVCNWMYCGKRFTRSDELQRHRRTHTGEKKFVCPECSKRFMRSDHLAKHIKTHQNKKGIHSSSTVLASVEAARDDTLITAGGTTLILAKIQQGSVSGIGTVNTSATSNQDILTNTEIPLQLVTVSGNETME

SEQ ID NO: 873305 - protein, 496 aa, Homo sapiens [sequence omitted]

SEQ ID NO: 873306 - protein, 496 aa, Homo sapiens [sequence omitted]

SEQ ID NO: 873307 - protein, 126 aa, Homo sapiens
TWRSVPRARERKREIASGGPMCWPRGPRRADSGPCCRPFLRCKGPGSDPGAALLPPAREQRRGREGASRGSPARCGQGWQPPPRPRAGSLVFVTSRYPVTRWVLACGGSFPCEARDSARSVRGPGS

SEQ ID NO: 873308 - protein, 126 aa, Homo sapiens; identical to SEQ ID NO: 873307

SEQ ID NO: 873309 - protein, 104 aa, Homo sapiens
CPRKACGQREKHLFLYVSFYLRNQFDQHPSPRLPRRNARIPSPSPIPPWLTKPTRIHSFAWKWVQASHEEHEDALCYGLHYVPCPRDRMLSPNPSIAEREFIRR

SEQ ID NO: 873310 - protein, 121 aa, Homo sapiens
MRTLCLSVRNHFVPMTQFSSHSGSVLHCQNRPASRHTYQPVVPSTAQYAASRQRAWMSWQPTPKPKLLPACWEGEPLPGEPSRGNRRREGGLLLPRSSALRLQEDPQRPWAAELWTARLEL

SEQ ID NO: 873311 - protein, 216 aa, Homo sapiens
ESRQAAAEMEDLLDLDEELRYSLATSRAKMGRRAQQESAQAENHLNGKNSSLTLTGETSSAKLPRCRQGGWAGDSVKASKFRRKASEEIEDFRLRPQSLNGSDYGGDIPIIPDLEEVQEEDFVLQVAAPPSIQIKRVMTYRDLDNDLMKYSAIQTLDGEIDLKLLTKVLAPEHEVREDDVGWDWDHLFTEVSSEVLTEWDPLQTEKEDPAGQARHT

SEQ ID NO: 873312 - protein, 221 aa, Homo sapiens
ESRQAAAEMEDLLDLDEELRYSLATSRAKMGRRAQQESAQAENHLNGKNSSLTLTGETSSAKLPRCRQGGWAGDSVKASNGTQTGKQQLDLNACYHKTHHRNLGLASLEEADIPIIPDLEEVQEEDFVLQVAAPPSIQIKRVMTYRDLDNDLMKYSAIQTLDGEIDLKLLTKVLAPEHEVREDDVGWDWDHLFTEVSSEVLTEWDPLQTEKEDPAGQARHT

SEQ ID NO: 873313 - protein, 216 aa, Homo sapiens; identical to SEQ ID NO: 873311

SEQ ID NO: 873314 - protein, 138 aa, Homo sapiens
MDQIMRRYTIGTHSLKITDNRKTENSGSDIPIIPDLEEVQEEDFVLQVAAPPSIQIKRVMTYRDLDNDLMKYSAIQTLDGEIDLKLLTKVLAPEHEVREDDVGWDWDHLFTEVSSEVLTEWDPLQTEKEDPAGQARHT

SEQ ID NO: 873315 - protein, 121 aa, Homo sapiens
ESRQAAAEMEDLLDLDEELRYSLATSRAKMGRRAQQESAQAENHLNGKNSSLTLTGETSSAKLPRCRQGGWAGDSVKASKFRRKASEEIEEYVSSILILMVSYVDLGQQCSLGGHDLFHLC

SEQ ID NO: 873316 - protein, 91 aa, Homo sapiens
ESRQAAAEMEDLLDLDEELRYSLATSRAKMGRRAQQESAQAENHLNGKNSSLTLTGETSSAKLPRCRQGGWAGDSVKASNPVLLLDSHLPA

SEQ ID NO: 873317 - protein, 187 aa, Homo sapiens
MGRRAQQESAQAENHLNGKNSSLTLTGETSSAKLPRCRQGGWAGDSVKASKFRRKASEEIEDFRLRPQSLNGSDYGGDIPIIPDLEEVQEEDFVLQVAAPPSIQIKRVMTYRDLDNDLMKYSAIQTLDGEIDLKLLTKVLAPEHEVREDDVGWDWDHLFTEVSSEVLTEWDPLQTEKEDPAGQARHT

SEQ ID NO: 873318 - protein, 187 aa, Homo sapiens; identical to SEQ ID NO: 873317

SEQ ID NO: 873319 - protein, 153 aa, Homo sapiens
MRLVGSQKPCLFFFFFRFRRKASEEIEDFRLRPQSLNGSDYGGDIPIIPDLEEVQEEDFVLQVAAPPSIQIKRVMTYRDLDNDLMKYSAIQTLDGEIDLKLLTKVLAPEHEVREDDVGWDWDHLFTEVSSEVLTEWDPLQTEKEDPAGQARHT

SEQ ID NO: 873320 - protein, 216 aa, Homo sapiens; identical to SEQ ID NO: 873311

SEQ ID NO: 873321 - protein, 131 aa, Homo sapiens
ESRQAAAEMEDLLDLDEELRYSLATSRAKMGRRAQQESAQAENHLNGKNSSLTLTGETSSAKLPRCRQGGWAGDSVKASKFRRKASEEIEDFRLRPQSLNGSDYGGDIPIIPDLEEVQEEDFVLQVAAPPR

SEQ ID NO: 873322 - protein, 131 aa, Homo sapiens; identical to SEQ ID NO: 873321

SEQ ID NO: 873323 - protein, 216 aa, Homo sapiens; identical to SEQ ID NO: 873311

SEQ ID NO: 873324 - protein, 114 aa, Homo sapiens
ESRQAAAEMEDLLDLDEELRYSLATSRAKMGRRAQQESAQAENHLNGKNSSLTLTGETSSAKLPRCRQGGWAGDSVKASKYSYHSGSGGSTGRRLCFAGGSPSQHPDKAGDDLP

SEQ ID NO: 873325 - protein, 187 aa, Homo sapiens; identical to SEQ ID NO: 873317

SEQ ID NO: 873326 - protein, 268 aa, Homo sapiens
RHVRRPRRWRICSTWTRSFATAWLPPAPSANFPRTDRSQGDRGAPAGVALAPILEFFLWDTSSQKFLQKPHCFMHGRERAKMGRRAQQESAQAENHLNGKNSSLTLTGETSSAKLPRCRQGGWAGDSVKASKFRRKASEEIEDFRLRPQSLNGSDYGGDIPIIPDLEEVQEEDFVLQVAAPPSIQIKRVMTYRDLDNDLMKYSAIQTLDGEIDLKLLTKVLAPEHEVREDDVGWDWDHLFTEVSSEVLTEWDPLQTEKEDPAGQARHT

SEQ ID NO: 873327 - protein, 169 aa, Homo sapiens
RHVRRPRRWRICSTWTRSFATAWLPPAPSANFPRTDRSQGDRGAPAGVALAPILEFFLWDTSSQKFLQKPHCFMHGRERAKMGRRAQQESAQAENHLNGKNSSLTLTGETSSAKLPRCRQGGWAGDSVKASKFRRKASEEIEDFRLRPQSLNGSDYGGAVPKQANNSWI

SEQ ID NO: 873328 - protein, 193 aa, Homo sapiens
ESRQAAAEMEDLLDLDEELRYSLATSRAKMGRRAQQESAQAENHLNGKNSSLTLTGETSSAKLPRCRQGGWAGDSVKASKFRRKASEEIEDFRLRPQSLNGSDYGGDIPIIPDLEEVQEEDFVLQVAAPPSIQIKRVMTYRDLDNDLMKYSAIQTLDGEIDLKLLTKVLAPEHEVREVQWWQQFPGLSALAFP

SEQ ID NO: 873329 - protein, 89 aa, Homo sapiens
ESRQAAAEMEDLLDLDEELRYSLATSRAKMGRRAQQESAQAENHLNGKNSSLTLTGETSSAKLPRCRQGGWAGDSVKASNRKEPGISMA

SEQ ID NO: 873330 - protein, 222 aa, Homo sapiens
ESRQAAAEMEDLLDLDEELRYSLATSRAKMGRRAQQESAQAENHLNGKNSSLTLTGETSSAKLPRCRQGGWAGDSVKASKFRRKASEEIEDFRLRPQSLNGSDYGGDIPIIPDLEEVQEEDFVLQVAAPPSIQIKRVMTYRDLDNDLMKYSAIQTLDGEIDLKLLTKVLAPEHEVRERNPSWQDDVGWDWDHLFTEVSSEVLTEWDPLQTEKEDPAGQARHT

SEQ ID NO: 873331 - protein, 1227 aa, Homo sapiens
FCFSLERYHLSYKIVRTDSRLVRSILTAHGFHEVHPSSTDYNLMWTGSHLKPFLLRTLSEAQKVNHFPRSYELTRKDRLYKNIIRMQHTHGFKAFHILPQTFLLPAEYAEFCNSYSKDRGPWIVKPVASSRGRGVYLINNPNQISLEENILVSRYINNPLLIDDFKFDVRLYVLVTSYDPLVIYLYEEGLARFATVRYDQGAKNIRNQFMHLTNYSVNKKSGDYVSCDDPEVEDYGNKWSMSAMLRYLKQEGRDTTALMAHVEDLIIKTIISAELAIATACKTFVPHRSSCFELYGFDVLIDSTLKPWLLEVNLSPSLACDAPLDLKIKASMISDMFTVVGFVCQDPAQRASTRPIYPTFESSRRNPFQKPQRCRPLSASDAEMKNLVGSAREKGPGKLGGSVLGLSMEEIKVLRRVKEENDRRGGFIRIFPTSETWEIYGSYLEHKTSMNYMLATRLFQDRMTADGAPELKIESLNSKAKLHAALYERKLLSLEVRKRRRRSSRLRAMRPKYPVITQPAEMNVKTETESEEEEEVALDNEDEEQEASQEESAGFLRENQAKYTPSLTALVENTPKENSMKVREWNNKGGHCCKLETQELEPKFNLMQILQDNGNLSKMQARIAFSAYLQHVQIRLMKDSGGQTFSASWAAKEDEQMELVVRFLKRASNNLQHSLRMVLPSRRLALLERRRILAHQLGDFIIVYNKETEQMAEKKSKKKVEEEEEDGVNMENFQEFIRQASEAELEEVLTFYTQKNKSASVFLGTHSKISKNNNNYSDSGAKGDHPETIMEEVKIKPPKQQQTTEIHSDKLSRFTTSAEKEAKLVYSNSSSGPTATLQKIPNTHLSSVTTSDLSPGPCHHSSLSQIPSAIPSMPHQPTILLNTVSASASPCLHPGAQNIPSPTGLPRCRSGSHTIGPFSSFQSAAHIYSQKLSRPSSAKAAGSCYLNKHHSGIAKTQKEGEDASLYSKRYNQSMVTAELQRLAEKQAARQYSPSSHINLLTQQVTNLNLATGIINRSSASAPPTLRPIISPSGPTWSTQSDPQAPENHSSSPGSRSLQTGGFAWEGEVENNVYSQATGVVPQHKYHPTAGSYQLQFALQQLEQQKLQSRQLLDQSRARHQAIFGSQTLPNSNLWTMNNGAGCRISSATASGQKPTTLPQKVVPPPSSCASLVPKPPPNHEQVLRRATSQKASKGSSAEGQLNGLQSSLNPAAFVPITSSTDPAHTKI

SEQ ID NO: 873332 - protein, 949 aa, Homo sapiens
  misc_feature (60)..(60): Xaa can be any naturally occurring amino acid
SCVLCCVVFLELYGFDVLIDSTLKPWLLEVNLSPSLACDAPLGPKGLKASYDFQDYGVTXLLGFVCQDPAQRASTRPIYPTFESSRRNPFQKPQRCRPLSASDAEMKNLVGSAREKGPGKLGGSVLGLSMEEIKVLRRVKEENDRRGGFIRIFPTSETWEIYGSYLEHKTSMNYMLATRLFQDRMTADGAPELKIESLNSKAKLHAALYERKLLSLEVRKRRRRSSRLRAMRPKYPVITQPAEMNVKTETESEEEEEVALDNEDEEQEASQEESAGFLRENQAKYTPSLTALVENTPKENSMKVREWNNKGGHCCKLETQELEPKFNLMQILQDNGNLSKMQARIAFSAYLQHVQIRLMKDSGGQTFSASWAAKEDEQMELVVRFLKRASNNLQHSLRMVLPSRRLALLERRRILAHQLGDFIIVYNKETEQMAEKKSKKKVEEEEEDGVNMENFQEFIRQASEAELEEVLTFYTQKNKSASVFLGTHSKISKNNNNYSDSGAKGDHPETIMEEVKIKPPKQQQTTEIHSDKLSRFTTSAEKEAKLVYSNSSSGPTATLQKIPNTHLSSVTTSDLSPGPCHHSSLSQIPSAIPSMPHQPTILLNTVSASASPCLHPGAQNIPSPTGLPRCRSGSHTIGPFSSFQSAAHIYSQKLSRPSSAKAAGSCYLNKHHSGIAKTQKEGEDASLYSKRYNQSMVTAELQRLAEKQAARQYSPSSHINLLTQQVTNLNLATGIINRSSASAPPTLRPIISPSGPTWSTQSDPQAPENHSSSPGSRSLQTGGFAWEGEVENNVYSQATGVVPQHKYHPTAGSYQLQFALQQLEQQKLQSRQLLDQSRARHQAIFGSQTLPNSNLWTMNNGAGCRISSATASGQKPTTLPQKVVPPPSSCASLVPKPPPNHEQVLRRATSQKASKGSSAEGQLNGLQSSLNPAAFVPITSSTDPAHTKI

SEQ ID NO: 873333 - protein, 778 aa, Homo sapiens
MNYMLATRLFQDRMTADGAPELKIESLNSKAKLHAALYERKLLSLEVRKRRRRSSRLRAMRPKYPVITQPAEMNVKTETESEEEEEVALDNEDEEQEASQEESAGFLRENQAKYTPSLTALVENTPKENSMKVREWNNKGGHCCKLETQELEPKFNLMQILQDNGNLSKMQARIAFSAYLQHVQIRLMKDSGGQTFSASWAAKEDEQMELVVRFLKRASNNLQHSLRMVLPSRRLALLERRRILAHQLGDFIIVYNKETEQMAEKKSKKKVEEEEEDGVNMENFQEFIRQASEAELEEVLTFYTQKNKSASVFLGTHSKISKNNNNYSDSGAKGDHPETIMEEVKIKPPKQQQTTEIHSDKLSRFTTSAEKEAKLVYSNSSSGPTATLQKIPNTHLSSVTTSDLSPGPCHHSSLSQIPSAIPSMPHQPTILLNTVSASASPCLHPGAQNIPSPTGLPRCRSGSHTIGPFSSFQSAAHIYSQKLSRPSSAKAAGSCYLNKHHSGIAKTQKEGEDASLYSKRYNQSMVTAELQRLAEKQAARQYSPSSHINLLTQQVTNLNLATGIINRSSASAPPTLRPIISPSGPTWSTQSDPQAPENHSSSPGSRSLQTGGFAWEGEVENNVYSQATGVVPQHKYHPTAGSYQLQFALQQLEQQKLQSRQLLDQSRARHQAIFGSQTLPNSNLWTMNNGAGCRISSATASGQKPTTLPQKVVPPPSSCASLVPKPPPNHEQVLRRATSQKASKGSSAEGQLNGLQSSLNPAAFVPITSSTDPAHTKI

SEQ ID NO: 873334 - protein, 1227 aa, Homo sapiens; identical to SEQ ID NO: 873331

SEQ ID NO: 873335 - protein, 1227 aa, Homo sapiens; identical to SEQ ID NO: 873331

SEQ ID NO: 873336 - protein, 1242 aa, Homo sapiens
FCFSLERYHLSYKIVRTDSRLVRSILTAHGFHEVHPSSTDYNLMWTGSHLKPFLLRTLSEAQKVNHFPRSYELTRKDRLYKNIIRMQHTHGFKAFHILPQTFLLPAEYAEFCNSYSKDRGPWIVKPVASSRGRGVYLINNPNQISLEENILVSRYINNPLLIDDFKFDVRLYVLVTSYDPLVIYLYEEGLARFATVRYDQGAKNIRNQFMHLTNYSVNKKSGDYVSCDDPEVEDYGNKWSMSAMLRYLKQEGRDTTALMAHVEDLIIKTIISAELAIATACKTFVPHRSSCFELYGFDVLIDSTLKPWLLEVNLSPSLACDAPLDLKIKASMISDMFTVVGFVCQDPAQRASTRPIYPTFESSRRNPFQKPQRCRPLSASDAEMKNLVGSAREKGPGKLGGSVLGLSMEEIKVLRRVKEENDRRGGFIRIFPTSETWEIYGSYLEHKTSMNYMLATRLFQDRMTADGAPELKIESLNSKAKLHAALYERKLLSLEVRKRRRRSSRLRAMRPKYPVITQPAEMNVKTETESEEEEEVALDNEDEEQEASQEESAGFLRENQAKYTPSLTALVENTPKENSMKVREWNNKGGHCCKLETQELEPKFNLMQILQDNGNLSKMQARIAFSAYLQHVQIRLMKDSGGQTFSASWAAKEDEQMELVVRFLKRASNNLQHSLRMVLPSRRLALLERRRILAHQLGDFIIVYNKETEQMAEKKSKKKVEEEEEDGVNMENFQEFIRQASEAELEEVLTFYTQKNKSASVFLGTHSKISKNNNNYSDSGAKGDHPETIMEEVKIKPPKQQQTTEIHSDKLSRFTTSAEKEAKLVYSNSSSGPTATLQKIPNTHLSSVTTSDLSPGPCHHSSLSQIPSAIPSMPHQPTILLNTVSASASPCLHPGAQNIPSPTGLPRCRSGSHTIGPFSSFQSAAHIYSQKLSRPSSAKAAGSCYLNKHHSGIAKTQKEGEDASLYSKRYNQSMVTAELQRLAEKQAARQYSPSSHINLLTQQVTNLNLATGIINRSSASAPPTLRPIISPSGPTWSTQSDPQAPENHSSSPGSRSLQTGGFAWEGEVENNVYSQATGVVPQHKYHPTAGSYQLQFALQQLEQQKLQSRQLLDQSRARHQAIFGSQTLPNSNLWTMNNGAGCRISSATASGQKPTTLPQKVVPPPSSCASLVPKPPPNHEQVLRRATSQKASKGSSAEGQLNGLQSSLNPAAFVPITSSTECCQKILPGLPRSVGKALGTNL

SEQ ID NO: 873337 - protein, 1242 aa, Homo sapiens; identical to SEQ ID NO: 873336

SEQ ID NO: 873338 - protein, 1104 aa, Homo sapiens
FCFSLERYHLSYKIVRTDSRLVRSILTAHGFHEVHPSSTDYNLMWTGSHLKPFLLRTLSEAQKVNHFPRSYELTRKDRLYKNIIRMQHTHGFKAFHILPQTFLLPAEYAEFCNSYSKDRGPWIVKPVASSRGRGVYLINNPNQISLEENILVSRYINNPLLIDDFKFDVRLYVLVTSYDPLVIYLYEEGLARFATVRYDQGAKNIRNQFMHLTNYSVNKKSGDYVSCDDPEVEDYGNKWSMSAMLRYLKQEGRDTTALMAHVEDLIIKTIISAELAIATACKTFVPHRSSCFELYGFDVLIDSTLKPWLLEVNLSPSLACDAPLDLKIKASMISDMFTVVGFVCQDPAQRASTRPIYPTFESSRRNPFQKPQRCRPLSASDAEMKNLVGSAREKGPGKLGGSVLGLSMEEIKVLRRVKEENDRRGGFIRIFPTSETWEIYGSYLEHKTSMNYMLATRLFQDRMTADGAPELKIESLNSKAKLHAALYERKLLSLEVRKRRRRSSRLRAMRPKYPVITQPAEMNVKTETESEEEEEVALDNEDEEQEASQEESAGFLRENQAKYTPSLTALVENTPKENSMKVREWNNKGGHCCKLETQELEPKFNLMQILQDNGNLSKMQARIAFSAYLQHVQIRLMKDSGGQTFSASWAAKEDEQMELVVRFLKRASNNLQHSLRMVLPSRRLALLERRRILAHQLGDFIIVYNKETEQMAEKKSKKKVEEEEEDGVNMENFQEFIRQASEAELEEVLTFYTQKNKSASVFLGTHSKISKNNNNYSDSGAKGDHPETIMEEVKIKPPKQQQTTEIHSDKLSRFTTSAEKEAKLVYSNSSSGPTATLQKIPNTHLSSVTTSDLSPGPCHHSSLSQIPSAIPSMPHQPTILLNTVSASASPCLHPGAQNIPSPTGLPRCRSGSHTIGPFSSFQSAAHIYSQKLSRPSSAKAAGSCYLNKHHSGIAKTQKEGEDASLYSKRYNQSMVTAELQRLAEKQAARQYSPSSHINLLTQQVTNLNLATGIINRSSASAPPTLRPIISPSGPTWSTQSDPQAPENHSSSPGSRYVKGPATSIWVTQGWPVSQASHSHLEFCMEIALRHMPFLHLPRSSLAPD

SEQ ID NO: 873339 - protein, 1222 aa, Homo sapiens
FCFSLERYHLSYKIVRTDSRLVRSILTAHGFHEVHPSSTDYNLMWTGSHLKPFLLRTLSEAQKVNHFPRSYELTRKDRLYKNIIRMQHTHGFKAFHILPQTFLLPAEYAEFCNSYSKDRGPWIVKPVASSRGRGVYLINNPNQISLEENILVSRYINNPLLIDDFKFDVRLYVLVTSYDPLVIYLYEEGLARFATVRYDQGAKNIRNQFMHLTNYSVNKKSGDYVSCDDPEVEDYGNKWSMSAMLRYLKQEGRDTTALMAHVEDLIIKTIISAELAIATACKTFVPHRSSCFELYGFDVLIDSTLKPWLLEVNLSPSLACDAPLDLKIKASMISDMFTVVGFVCQDPAQRASTRPIYPTFESSRRNPFQKPQRCRPLSASDAEMKNLVGSAREKGPGKLGGSVLGLSMEEIKVLRRVKEENDRRGGFIRIFPTSETWEIYGSYLEHKTSMNYMLATRLFQDRMTADGAPELKIESLNSKAKLHAALYERKLLSLEVRKRRRRSSRLRAMRPKYPVITQPAEMNVKTETESEEEEEVALDNEDEEQEASQEESAGFLRENQAKYTPSLTALVENTPKENSMKVREWNNKGGHCCKLETQELEPKFNLMQILQDNGNLSKMQARIAFSAYLQHVQIRLMKDSGGQTFSASWAAKEDEQMELVVRFLKRASNNLQHSLRMVLPSRRLALLERRRILAHQLGDFIIVYNKETEQMAEKKSKKKVEEEEEDGVNMENFQEFIRQASEAELEEVLTFYTQKNKSASVFLGTHSKISKNNNNYSDSGAKGDHPETIMEEVKIKPPKQQQTTEIHSDKLSRFTTSAEKEAKLVYSNSSSGPTATLQKIPNTHLSSVTTSDLSPGPCHHSSLSQIPSAIPSMPHQPTILLNTVSASASPCLHPGAQNIPSPTGLPRCRSGSHTIGPFSSFQSAAHIYSQKLSRPSSAKAAGSCYLNKHHSGIAKTQKEGEDASLYSKRYNQSMVTAELQRLAEKQAARQYSPSSHINLLTQQVTNLNLATGIINRSSASAPPTLRPIISPSGPTWSTQSDPQAPENHSSSPGSRSLQTGGFAWEGEVENNVYSQATGVVPQHKYHPTAGSYQLQFALQQLEQQKLQSRQLLDQSRARHQAIFGSQTLPNSNLWTMNNGAGCRISSATASGQKPTTLPQKVVPPPSSCASLVPKPPPNHEQVLRRATSQKASKGSSAEGQLNGLQSSLNPAAFVPITSSTDD

SEQ ID NO: 873340 - protein, 122 aa, Homo sapiens [sequence omitted]

SEQ ID NO: 873341 - protein, 94 aa, Homo sapiens
RKQIFWVDGTWQWGHSADALYTPSEHTCCPSESLHWLIGNHLTANADFHWDNKKADLLGFDGTWQWGHSADALYTPSEHTCIFYLPFAPCPQTA

SEQ ID NO: 873342 - protein, 1225 aa, Homo sapiens
FCFSLERYHLSYKIVRTDSRLVRSILTAHGFHEVHPSSTDYNLMWTGSHLKPFLLRTLSEAQKVNHFPRSYELTRKDRLYKNIIRMQHTHGFKAFHILPQTFLLPAEYAEFCNSYSKDRGPWIVKPVASSRGRGVYLINNPNQISLEENILVSRYINNPLLIDDFKFDVRLYVLVTSYDPLVIYLYEEGLARFATVRYDQGAKNIRNQFMHLTNYSVNKKSGDYVSCDDPEVEDYGNKWSMSAMLRYLKQEGRDTTALMAHVEDLIIKTIISAELAIATACKTFVPHRSSCFELYGFDVLIDSTLKPWLLEVNLSPSLACDAPLDLKIKASMISDMFTVVGFVCQDPAQRASTRPIYPTFESSRRNPFQKPQRCRPLSASDAEMKNLVGSAREKGPGKLGGSVLGLSMEEIKVLRRVKEENDRRGGFIRIFPTSETWEIYGSYLEHKTSMNYMLATRLFQDRGNPRRSLLTGRTRMTADGAPELKIESLNSKAKLHAALYERKLLSLEVRKRRRRSSRLRAMRPKYPVITQPAEMNVKTETESEEEEEVALDNEDEEQEASQEESAGFLRENQAKYTPSLTALVENTPKENSMKVREWNNKGGHCCKLETQELEPKFNLMQILQDNGNLSKMQARIAFSAYLQHVQIRLMKDSGGQTFSASWAAKEDEQMELVVRFLKRASNNLQHSLRMVLPSRRLALLERRRILAHQLGDFIIVYNKETEQMAEKKSKKKVEEEEEDGVNMENFQEFIRQASEAELEEVLTFYTQKNKSASVFLGTHSKISKNNNNYSDSGAKGDHPETIMEEVKIKPPKQQQTTEIHSDKLSRFTTSAEKEAKLVYSNSSSGPTATLQKIPNTHLSSVTTSDLSPGPCHHSSLSQIPSAIPSMPHQPTILLNTVSASASPCLHPGAQNIPSPTGLPRCRSGSHTIGPFSSFQSAAHIYSQKLSRPSSAKAAGSCYLNKHHSGIAKTQKEGEDASLYSKRYNQSMVTAELQRLAEKQAARQYSPSSHINLLTQQVTNLNLATGIINRSSASAPPTLRPIISPSGPTWSTQSDPQAPENHSSSPGSRSLQTGGFAWEGEVENNVYSQATGVVPQHKYHPTAGSYQLQFALQQLEQQKLQSRQLLDQSRARHQAIFGSQTLPNSNLWTMNNGAGCRISSATASGQKPTTLPQKVVPPPSSCASLVPKPPPNHEQVLRRATSQKASNTRFRSSFQNYLWYFFQAVS

SEQ ID NO: 873343 - protein, 1227 aa, Homo sapiens; identical to SEQ ID NO: 873331

SEQ ID NO: 873344 - protein, 1227 aa, Homo sapiens; identical to SEQ ID NO: 873331

SEQ ID NO: 873345 - protein, 1222 aa, Homo sapiens; identical to SEQ ID NO: 873339

SEQ ID NO: 873346 - protein, 167 aa, Homo sapiens
MGRAHLNKGGEGVLIPDACGPQHKYHPTAGSYQLQFALQQLEQQKLQSRQLLDQSRARHQAIFGSQTLPNSNLWTMNNGAGCRISSATASGQKPTTLPQKVVPPPSSCASLVPKPPPNHEQVLRRATSQKASKGSSAEGQLNGLQSSLNPAAFVPITSSTDPAHTKI

SEQ ID NO: 873347 - protein, 942 aa, Homo sapiens
FCFSLERYHLSYKIVRTDSRLVRSILTAHGFHEVHPSSTDYNLMWTGSHLKPFLLRTLSEAQKVNHFPRSYELTRKDRLYKNIIRMQHTHGFKAFHILPQTFLLPAEYAEFCNSYSKDRGPWIVKPVASSRGRGVYLINNPNQISLEENILVSRYINNPLLIDDFKFDVRLYVLVTSYDPLVIYLYEEGLARFATVRYDQGAKNIRNQFMHLTNYSVNKKSGDYVSCDDPEVEDYGNKWSMSAMLRYLKQEGRDTTALMAHVEDLIIKTIISAELAIATACKTFVPHRSSCFELYGFDVLIDSTLKPWLLEVNLSPSLACDAPLDLKIKASMISDMFTVVGFVCQDPAQRASTRPIYPTFESSRRNPFQKPQRCRPLSASDAEMKNLVGSAREKGPGKLGGSVLGLSMEEIKVLRRVKEENDRRGGFIRIFPTSETWEIYGSYLEHKTSMNYMLATRLFQDRMTADGAPELKIESLNSKAKLHAALYERKLLSLEVRKRRRRSSRLRAMRPKYPVITQPAEMNVKTETESEEEEEVALDNEDEEQEASQEESAGFLRENQAKYTPSLTALVENTPKENSMKVREWNNKGGHCCKLETQELEPKFNLMQILQDNGNLSKMQARIAFSAYLQHVQIRLMKDSGGQTFSASWAAKEDEQMELVVRFLKRASNNLQHSLRMVLPSRRLALLERRRILAHQLGDFIIVYNKETEQMAEKKSKKKVEEEEEDGVNMENFQEFIRQASEAELEEVLTFYTQKNKSASVFLGTHSKISKNNNNYSDSGAKGDHPETIMEEVKIKPPKQQQTTEIHSDKLSRFTTSAEKEAKLVYSNSSSGPTATLQKIPNTHLSSVTTSDLSPGPCHHSSLSQIPSAIPSMPHQPTILLNTVSASASPCLHPGAQNIPSPTGLPRCRSGSHTIGPFSSFQSAAHIYSQKLSRPSSAKAGE

SEQ ID NO: 873348 - protein, 123 aa, Homo sapiens
  misc_feature (103)..(103): Xaa can be any naturally occurring amino acid
  misc_feature (112)..(112): Xaa can be any naturally occurring amino acid
MKEYVLLLFLALCSAKPFFSPSHIALKNMMLKDMEDTDDDDDDDDDDLSQGYDSSERDFSLIDDPMMPANSDSSEDADDWSPSMGPHCLGRLLLFSFTLGPWXYGKRGEGAXEMWGEVPGIPR

SEQ ID NO: 873349 - protein, 380 aa, Homo sapiens
MKEYVLLLFLALCSAKPFFSPSHIALKNMMLKDMEDTDDDDDDDDDDDDDDEDNSLFPTREPRSHFFPFDLFPMCPFGCQCYSRVVHCSDLGLTSVPTNIPFDTRMLDLQNNKIKEIKENDFKGLTSLYGLILNNNKLTKIHPKAFLTTKKLRRLYLSHNQLSEIPLNLPKSLAELRIHENKVKKIQKDTFKGMNALHVLEMSANPLDNNGIEPGAFEGVTVFHIRIAEAKLTSVPKGLPPTLLELHLDYNKISTVELEDFKRYKELQRLGLGNNKITDIENGSLANIPRVREIHLENNKLKKIPSGLPELKYLQIIFLHSNSIARVGVNDFCPTVPKMKKSLYSAISLFNNPVKYWEMQPATFRCVLSRMSVQLGNFGM

SEQ ID NO: 873350 - protein, 243 aa, Homo sapiens
MKEYVLLLFLALCSAKPFFSPSHIALKNMMLKDMEDTDDDDDDDDDDDDDDEDNSLFPTREPRSHFFPFDLFPMCPFGCQCYSRVVHCSDLGLTSVPTNIPFDTRMLDLQNNKIKEIKENDFKGLTSLYGLILNNNKLTKIHPKAFLTTKKLRRLYLSHNQLSEIPLNLPKSLAELRIHENKVKKIQKDTFKGMNALHVLEMSANPLDNNGIEPGAFEGVTVFHIRIAEAKLTSVPKDNLPSF

SEQ ID NO: 873351 - protein, 380 aa, Homo sapiens; identical to SEQ ID NO: 873349

SEQ ID NO: 873352 - protein, 111 aa, Homo sapiens
MVIACDGIWNVMSSQEVVDFIQSKISQRDENGELRLLSSIVEELLDQCLAPDTSGDGTGCDNMTCIIICFKPRNTAELQPESGKRKLEEVLSTEGAEENGNSDKKKKAKRD

SEQ ID NO: 873353 - protein, 107 aa, Homo sapiens
MGAYLSQPNTVKCSGDGVGAPRLPLPYGFSAMQGWRVSMEIAGATKRKTEHKHKNTNQQTTTHKNTNKKQKKTPQTTHTTTTTTPTHTQQNHQTHNTKTTTTNTNKT

SEQ ID NO: 873354 - protein, 423 aa, Homo sapiens
MKMKKEKVADEDDVDNEEAALLHEEATMTIEELLTRYGQNCHKGPPHSKSGGGTGEEPGSQGLNGEAGPEDSTRETPSQENGPTAKAYTGFSSNSERGTEAGQVGEPGIPTGEAGPSCSSASDKLPRVAKSKFFEDSEDESDEAEEEEEDSEECSEEEDGYSSEEAENEEDEDDTEEAEEDDEEEEEEMMVPGMEGKEEPGSDSGTTAVVALIRGKQLIVANAGDSRCVVSEAGKALDMSYDHKPEDEVELARIKNAGGKVTMDGRVNGGLNLSRAIGDHFYKRNKNLPPEEQMISALPDIKVLTLTDDHEFMVIACDGIWNVMSSQEVVDFIQSKISQRDENGELRLLSSIVEELLDQCLAPDTSGDGTGCDNMTCIIICFKPRNTAELQPESGKRKLEEVLSTEGAEENGNSDKKKKAKRD

SEQ ID NO: 873355 - protein, 423 aa, Homo sapiens; identical to SEQ ID NO: 873354

SEQ ID NO: 873356 - protein, 414 aa, Homo sapiens
MKMKKEKVADEDDVDNEEAALLHEEATMTIEELLTRYGQNCHKGPPHSKSGGGTGEEPGSQGLNGEAGPEDSTRETPSQENGPTAKAYTGFSSNSERGTEAGQVGEPGIPTGEAGPSCSSASDKLPRVAKSKFFEDSEDESDEAEEEEEDSEECSEEEDGYSSEEAENEEDEDDTEEAEEDDEEEEEEMMVPGMEGKEEPGSDSGTTAVVALIRGKQLIVANAGDSRCVMSYDHKPEDEVELARIKNAGGKVTMDGRVNGGLNLSRAIGDHFYKRNKNLPPEEQMISALPDIKVLTLTDDHEFMVIACDGIWNVMSSQEVVDFIQSKISQRDENGELRLLSSIVEELLDQCLAPDTSGDGTGCDNMTCIIICFKPRNTAELQPESGKRKLEEVLSTEGAEENGNSDKKKKAKRD

SEQ ID NO: 873357 - protein, 423 aa, Homo sapiens; identical to SEQ ID NO: 873354

SEQ ID NO: 873358 - protein, 423 aa, Homo sapiens; identical to SEQ ID NO: 873354

SEQ ID NO: 873359 - protein, 468 aa, Homo sapiens
AVVNRPRKEGKLQKALEDAFLAIDAKLTTEEVIKELAQIAGRPTEDEDEKEKVADEDDVDNEEAALLHEEATMTIEELLTRYGQNCHKGPPHSKSGGGTGEEPGSQGLNGEAGPEDSTRETPSQENGPTAKAYTGFSSNSERGTEAGQVGEPGIPTGEAGPSCSSASDKLPRVAKSKFFEDSEDESDEAEEEEEDSEECSEEEDGYSSEEAENEEDEDDTEEAEEDDEEEEEEMMVPGMEGKEEPGSDSGTTAVVALIRGKQLIVANAGDSRCVVSEAGKALDMSYDHKPEDEVELARIKNAGGKVTMDGRVNGGLNLSRAIGDHFYKRNKNLPPEEQMISALPDIKVLTLTDDHEFMVIACDGIWNVMSSQEVVDFIQSKISQRDENGELRLLSSIVEELLDQCLAPDTSGDGTGCDNMTCIIICFKPRNTAELQPESGKRKLEEVLSTEGAEENGNSDKKKKAKRD

SEQ ID NO: 873360 - protein, 595 aa, Homo sapiens
RILNEIILPPPRFRSLTAPVPLPPPGRPRAFHRHLASVAPRGLLLPRAPPGLRLRHGSRPAFLHLRPPASRRHGCLPLPAQHGEVLRGRGRRPAPAAALRLLRHARLARLHGGEEVALYCAKYLPDIIKDQKAYKEGKLQKALEDAFLAIDAKLTTEEVIKELAQIAGRPTEDEDEKEKVADEDDVDNEEAALLHEEATMTIEELLTRYGQNCHKGPPHSKSGGGTGEEPGSQGLNGEAGPEDSTRETPSQENGPTAKAYTGFSSNSERGTEAGQVGEPGIPTGEAGPSCSSASDKLPRVAKSKFFEDSEDESDEAEEEEEDSEECSEEEDGYSSEEAENEEDEDDTEEAEEDDEEEEEEMMVPGMEGKEEPGSDSGTTAVVALIRGKQLIVANAGDSRCVVSEAGKALDMSYDHKPEDEVELARIKNAGGKVTMDGRVNGGLNLSRAIGDHFYKRNKNLPPEEQMISALPDIKVLTLTDDHEFMVIACDGIWNVMSSQEVVDFIQSKISQRDENGELRLLSSIVEELLDQCLAPDTSGDGTGCDNMTCIIICFKPRNTAELQPESGKRKLEEVLSTEGAEENGNSDKKKKAKRD

SEQ ID NO: 873361 - protein, 458 aa, Homo sapiens
MGSMALEDAFLAIDAKLTTEEVIKELAQIAGRPTEDEDEKEKVADEDDVDNEEAALLHEEATMTIEELLTRYGQNCHKGPPHSKSGGGTGEEPGSQGLNGEAGPEDSTRETPSQENGPTAKAYTGFSSNSERGTEAGQVGEPGIPTGEAGPSCSSASDKLPRVAKSKFFEDSEDESDEAEEEEEDSEECSEEEDGYSSEEAENEEDEDDTEEAEEDDEEEEEEMMVPGMEGKEEPGSDSGTTAVVALIRGKQLIVANAGDSRCVVSEAGKALDMSYDHKPEDEVELARIKNAGGKVTMDGRVNGGLNLSRAIGDHFYKRNKNLPPEEQMISALPDIKVLTLTDDHEFMVIACDGIWNVMSSQEVVDFIQSKISQRDENGELRLLSSIVEELLDQCLAPDTSGDGTGCDNMTCIIICFKPRNTAELQPESGKRKLEEVLSTEGAEENGNSDKKKKAKRD

SEQ ID NO: 873362 - protein, 356 aa, Homo sapiens
MKMKKEKVADEDDVDNEEAALLHEEATMTIEELLTRYGQNCHKGPPHSKSGASASDKLPRVAKSKFFEDSEDESDEAEEEEEDSEECSEEEDGYSSEEAENEEDEDDTEEAEEDDEEEEEEMMVPGMEGKEEPGSDSGTTAVVALIRGKQLIVANAGDSRCVVSEAGKALDMSYDHKPEDEVELARIKNAGGKVTMDGRVNGGLNLSRAIGDHFYKRNKNLPPEEQMISALPDIKVLTLTDDHEFMVIACDGIWNVMSSQEVVDFIQSKISQRDENGELRLLSSIVEELLDQCLAPDTSGDGTGCDNMTCIIICFKPRNTAELQPESGKRKLEEVLSTEGAEENGNSDKKKKAKRD

SEQ ID NO: 873363 - protein, 423 aa, Homo sapiens; identical to SEQ ID NO: 873354

SEQ ID NO: 873364 - protein, 328 aa, Homo sapiens
MKMKKEKVADEDDVDNEEAALLHEEATMTIEELLTRYGQNCHKGPPHSKSGGGTGEEPGSQGLNGEAGPEDSTRETPSQENGPTAKAYTGFSSNSERGTEAGQVGEPGIPTGEAGPSCSSASDKLPRVAKSKFFEDSEDESDEAEEEEEDSEECSEEEDGYSSEEAENEEDEDDTEEAEEDDEEEEEEMMVPGMEGKEEPGSDSGTTAVVALIRGKQLIVANAGDSRCVVSEAGKALDMSYDHKPEDEVELARIKNAGGKVTMDGRVNGGLNLSRAIGDHFYKRNKNLPPEEQMISALPDIKVLTLTDDHEFMVIACDGIWKCEPPEL

SEQ ID NO: 873365 - protein, 365 aa, Homo sapiens
MKMKKEKVADEDDVDNEEAALLHEEATMTIEELLTRYGQNCHKGPPHSKSGGGTGEEPGSQGLNGEAGPEDSTRETPSQENGPTAKAYTGFSSNSERGTEAGQVGEPGIPTGEAGPSCSSASDKLPRVAKSKFFEDSEDESDEAEEEEEDSEECSEEEDGYSSEEAENEEDEDDTEEAEEDDEEEEEEMMVPGMEGKEEPGSDSGTTAVVALIRGKQLIVANAGDSRCVVSEAGKALDMSYDHKPEDEVELARIKNAGGKVTMDGRVNGGLNLSRAIGDHFYKRNKNLPPEEQMISALPDIKVLTLTDDHEFMVIACDGIWDVISSQEVVTLLPTKNIHRSDNGDSGQWHPGGRAWHMSVHNFAC

SEQ ID NO: 873366 - protein, 521 aa, Homo sapiens
MGAYLSQPNTVKCSGDGVGAPRLPLPYGFSAMQGWRVSMEDAHNCIPELDSETAMFSVYDGHGGEEVALYCAKYLPDIIKDQKAYKEGKLQKALEDAFLAIDAKLTTEEVIKELAQIAGRPTEATMTIEELLTRYGQNCHKGPPHSKSGGGTGEEPGSQGLNGEAGPEDSTRETPSQENGPTAKAYTGFSSNSERGTEAGQVGEPGIPTGEAGPSCSSASDKLPRVAKSKFFEDSEDESDEAEEEEEDSEECSEEEDGYSSEEAENEEDEDDTEEAEEDDEEEEEEMMVPGMEGKEEPGSDSGTTAVVALIRGKQLIVANAGDSRCVVSEAGKALDMSYDHKPEDEVELARIKNAGGKVTMDGRVNGGLNLSRAIGDHFYKRNKNLPPEEQMISALPDIKVLTLTDDHEFMVIACDGIWNVMSSQEVVDFIQSKISQRDENGELRLLSSIVEELLDQCLAPDTSGDGTGCDNMTCIIICFKPRNTAELQPESGKRKLEEVLSTEGAEENGNSDKKKKAKRD

SEQ ID NO: 873367 - protein, 316 aa, Homo sapiens
MGRQDLRTQLGTSASDKLPRVAKSKFFEDSEDESDEAEEEEEDSEECSEEEDGYSSEEAENEEDEDDTEEAEEDDEEEEEEMMVPGMEGKEEPGSDSGTTAVVALIRGKQLIVANAGDSRCVVSEAGKALDMSYDHKPEDEVELARIKNAGGKVTMDGRVNGGLNLSRAIGDHFYKRNKNLPPEEQMISALPDIKVLTLTDDHEFMVIACDGIWNVMSSQEVVDFIQSKISQRDENGELRLLSSIVEELLDQCLAPDTSGDGTGCDNMTCIIICFKPRNTAELQPESGKRKLEEVLSTEGAEENGNSDKKKKAKRD

SEQ ID NO: 873368 - protein, 287 aa, Homo sapiens
MGAYLSQPNTVKCSGDGVGAPRLPLPYGFSAMQGWRVSMEALEDAFLAIDAKLTTEEVIKELAQIAGRPTEDEDEKEKVADEDDVDNEEAALLHEEATMTIEELLTRYGQNCHKGPPHSKSGGGTGEEPGSQGLNGEAGPEDSTRETPSQENGPTAKAYTGFSLKCSGDGVGAPRLPLPYGFFRHARLCALLHGTDAHNCIPELDSETAMFSVYDGHGGEEVALYCAKYLPDIIKDQKAYKEGKLQKALEDAFLAIDAKLTTEEVIKELAQIAGRPTEDEDEKRKSS

SEQ ID NO: 873369 - protein, 283 aa, Homo sapiens
MVEAVLKEEDSEECSEEEDGYSSEEAENEEDEDDTEEAEEDDEEEEEEMMVPGMEGKEEPGSDSGTTAVVALIRGKQLIVANAGDSRCVVSEAGKALDMSYDHKPEDEVELARIKNAGGKVTMDGRVNGGLNLSRAIGDHFYKRNKNLPPEEQMISALPDIKVLTLTDDHEFMVIACDGIWNVMSSQEVVDFIQSKISQRDENGELRLLSSIVEELLDQCLAPDTSGDGTGCDNMTCIIICFKPRNTAELQPESGKRKLEEVLSTEGAEENGNSDKKKKAKRD

SEQ ID NO: 873370 - protein, 319 aa, Homo sapiens
CHPQTPSLVSFSVLRTCVQSGPLDSEYELWGEEGIIPVSAVWDPPPGRECSEEEDGYSSEEAENEEDEDDTEEAEEDDEEEEEEMMVPGMEGKEEPGSDSGTTAVVALIRGKQLIVANAGDSRCVVSEAGKALDMSYDHKPEDEVELARIKNAGGKVTMDGRVNGGLNLSRAIGDHFYKRNKNLPPEEQMISALPDIKVLTLTDDHEFMVIACDGIWNVMSSQEVVDFIQSKISQRDENGELRLLSSIVEELLDQCLAPDTSGDGTGCDNMTCIIICFKPRNTAELQPESGKRKLEEVLSTEGAEENGNSDKKKKAKRD

SEQ ID NO: 873371 - protein, 333 aa, Homo sapiens
EEKKKQLVRQVREMEAELEDERKQRSMAVTARKKLEMDLKDLEAHIDSANKNRDEAIKQLRKLQAQMKDCMRELDDTRASREEILAQAEEDDEEEEEEMMVPGMEGKEEPGSDSGTTAVVALIRGKQLIVANAGDSRCVVSEAGKALDMSYDHKPEDEVELARIKNAGGKVTMDGRVNGGLNLSRAIGDHFYKRNKNLPPEEQMISALPDIKVLTLTDDHEFMVIACDGIWNVMSSQEVVDFIQSKISQRDENGELRLLSSIVEELLDQCLAPDTSGDGTGCDNMTCIIICFKPRNTAELQPESGKRKLEEVLSTEGAEENGNSDKKKKAKRD

SEQ ID NO: 873372 - protein, 169 aa, Homo sapiens
SSTETLPSMDGRVNGGLNLSRAIGDHFYKRNKNLPPEEQMISALPDIKVLTLTDDHEFMVIACDGIWNVMSSQEVVDFIQSKISQRDENGELRLLSSIVEELLDQCLAPDTSGDGTGCDNMTCIIICFKPRNTAELQPESGKRKLEEVLSTEGAEENGNSDKKKKAKRD

SEQ ID NO: 873373 - protein, 149 aa, Homo sapiens
RSHGSCRFHSIKDLPPEEQMISALPDIKVLTLTDDHEFMVIACDGIWNVMSSQEVVDFIQSKISQRDENGELRLLSSIVEELLDQCLAPDTSGDGTGCDNMTCIIICFKPRNTAELQPESGKRKLEEVLSTEGAEENGNSDKKKKAKRD

SEQ ID NO: 873374 - protein, 410 aa, Homo sapiens
AVVNRPRKEGKLQKALEDAFLAIDAKLTTEEVIKELAQIAGRPTEDEDEKEKVADEDDVDNEEAALLHEEATMTIEELLTRYGQNCHKGPPHSKSGGGTGEEPGSQGLNGEAGPEDSTRETPSQENGPTAKAYTGFSSNSERGTEAGQVGEPGIPTGEAGPSCSSASDKLPRVAKSKFFEDSEDESDEAEEEEEDSEECSEEEDGYSSEEAENEEDEDDTEEAEEDDEEEEEEMMVPGMEGKEEPGSDSGTTAVVALIRGKQLIVANAGDSRCVVSEAGKALDMSYDHKPEDEVELARIKNAGGKVTMDGRVNGGLNLSRAIGDHFYKRNKNLPPEEQMISALPDIKVLTLTDDHEFMVIACDGIWDVISSQEVVTLLPTKNIHRSDNGDSGQWHPGGRAWHMSVHNFAC

SEQ ID NO: 873375 - protein, 222 aa, Homo sapiens
RILNEIILPPPRFRSLTAPVPLPPPGRPRAFHRHLASVAPRGLLLPRAPPGLRLRHGSRPAFLHLRPPASRRHGCLPLPAQHGEVLRGRGRRPAPAAALRLLRHARLARLHGGEEVALYCAKYLPDIIKDQKAYKEGKLQKALEDAFLAIDAKLTTEEVIKELAQIAGRPTEDEDEKEKVADEDDERQEEEGQARLAVIQTPAHLDCFLSPPDLRLSFVFFL

SEQ ID NO: 873376 - protein, 370 aa, Homo sapiens
MGAYLSQPNTVKCSGDGVGAPRLPLPYGFSAMQGWRVSMEALEDAFLAIDAKLTTEEVIKELAQIAGRPTEDEDEKEKVADEDDVDNEEAALLHEEATMTIEELLTRYGQNCHKGPPHSKSGGGTGEEPGSQGLNGEAGPEDSTRETPSQENGPTAKAYTGFSLKCSGDGVGAPRLPLPYGFFRHARLCALLHGTDAHNCIPELDSETAMFSVYDGHGGEEVALYCAKYLPDIIKDQKAYKEGKLQKALEDAFLAIDAKLTTEEVIKELCCPSQPPLLLGLITGSVPVLCCVGGKDWRFWFLLCELYLRTFFFIGGSMALGRLHPLSVVHFQSTLFQTKGQNLIVRIVSFFFCCRGPRLGPICSMWRAPM

SEQ ID NO: 873377 - protein, 298 aa, Homo sapiens
RILNEIILPPPRFRSLTAPVPLPPPGRPRAFHRHLASVAPRGLLLPRAPPGLRLRHGSRPAFLHLRPPASRRHGCLPLPAQHGEVLRGRGRRPAPAAALRLLRHARLARLHGGEEVALYCAKYLPDIIKDQKAYKEGKLQKALEDAFLAIDAKLTTEEVIKELAQIAGRPTEDEDEKEKVADEDDVDNEEAALLHEEATMTIEELLTRYGQNCHKGPPHSKSGGGTGEEPGSQGLNGEAGPEDSTRETPSQENGPTAKAYTGFSSNSERGTEAGQVGEPGIPTGEAGPSCSSASDKLP

SEQ ID NO: 873378 - protein, 343 aa, Homo sapiens
MGAYLSQPNTVKCSGDGVGAPRLPLPYGFSAMQGWRVSMEALEDAFLAIDAKLTTEEVIKELAQIAGRPTEDEDEKEKVADEDDVDNEEAALLHEEATMTIEELLTRYGQNCHKGPPHSKSGGGTGEEPGSQGLNGEAGPEDSTRETPSQENGPTAKAYTGFSLKCSGDGVGAPRLPLPYGFFRHARLCALLHGTDAHNCIPELDSETAMFSVYDGHGGEEVALYCAKYLPDIIKDQKAYKEGKLQKALEDAFLAIDAKLTTEEVIKELCCPSQPPLLLGLITGSVPVLCCVGGKDWRFWFLLCELYLRTFFFIGGSMALGRLHPLSVVHFQSTLFQTKGQNL

SEQ ID NO: 873379 - protein, 120 aa, Homo sapiens
MPYGLAGGPLCDTSCPFLSYHPDSASQPSCGTVDSWQGVQTLWLSYPHPFLELLDQCLAPDTSGDGTGCDNMTCIIICFKPRNTAELQPESGKRKLEEVLSTEGAEENGNSDKKKKAKRD

SEQ ID NO: 873380 - protein, 123 aa, Homo sapiens
MGAYLSQPNTVKCSGDGVGAPRLPLPYGFSAMQGWRVSMEDAHNCIPELDSETAMFSVYDGHGGTLTDHIGNILGPQFQTFQGKNRSLCSFTFQGLALIIISCVVLFFCILSFFFPSRYCIGL

SEQ ID NO: 873381 - protein, 423 aa, Homo sapiens; identical to SEQ ID NO: 873354

SEQ ID NO: 873382 - protein, 423 aa, Homo sapiens; identical to SEQ ID NO: 873354

SEQ ID NO: 873383 - protein, 423 aa, Homo sapiens; identical to SEQ ID NO: 873354

SEQ ID NO: 873384 - protein, 423 aa, Homo sapiens; identical to SEQ ID NO: 873354

SEQ ID NO: 873385 - protein, 423 aa, Homo sapiens; identical to SEQ ID NO: 873354

SEQ ID NO: 873386 - protein, 494 aa, Homo sapiens
MGAYLSQPNTVKCSGDGVGAPRLPLPYGFSAMQGWRVSMEALEDAFLAIDAKLTTEEVIKELAQIAGRPTEDEDEKEKVADEDDVDNEEAALLHEEATMTIEELLTRYGQNCHKGPPHSKSGGGTGEEPGSQGLNGEAGPEDSTRETPSQENGPTAKAYTGFSSNSERGTEAGQVGEPGIPTGEAGPSCSSASDKLPRVAKSKFFEDSEDESDEAEEEEEDSEECSEEEDGYSSEEAENEEDEDDTEEAEEDDEEEEEEMMVPGMEGKEEPGSDSGTTAVVALIRGKQLIVANAGDSRCVVSEAGKALDMSYDHKPEDEVELARIKNAGGKVTMDGRVNGGLNLSRAIGDHFYKRNKNLPPEEQMISALPDIKVLTLTDDHEFMVIACDGIWNVMSSQEVVDFIQSKISQRDENGELRLLSSIVEELLDQCLAPDTSGDGTGCDNMTCIIICFKPRNTAELQPESGKRKLEEVLSTEGAEENGNSDKKKKAKRD

SEQ ID NO: 873387 - protein, 132 aa, Homo sapiens
MGAYLSQPNTVKCSGDGVGAPRLPLPYGFSAMQGWRVSMEDAHNCIPELDSETAMFSVYDGHGGEEVALYCAKYLPDIIKDQKAYKEGKLQKALEDAFLAIDAKLTTEEVIKELAQIAGRPTEDEDEKRKSS

SEQ ID NO: 873388 - protein, 342 aa, Homo sapiens
QASQAGVNRPRPNSERGTEAGQVGEPGIPTGEAGPSCSSASDKLPRVAKSKFFEDSEDESDEAEEEEEDSEECSEEEDGYSSEEAENEEDEDDTEEAEEDDEEEEEEMMVPGMEGKEEPGSDSGTTAVVALIRGKQLIVANAGDSRCVVSEAGKALDMSYDHKPEDEVELARIKNAGGKVTMDGRVNGGLNLSRAIGDHFYKRNKNLPPEEQMISALPDIKVLTLTDDHEFMVIACDGIWNVMSSQEVVDFIQSKISQRDENGELRLLSSIVEELLDQCLAPDTSGDGTGCDNMTCIIICFKPRNTAELQPESGKRKLEEVLSTEGAEENGNSDKKKKAKRD

SEQ ID NO: 873389 - protein, 132 aa, Homo sapiens; identical to SEQ ID NO: 873387

SEQ ID NO: 873390 - protein, 330 aa, Homo sapiens
MLGRAWLIGQVGEPGIPTGEAGPSCSSASDKLPRVAKSKFFEDSEDESDEAEEEEEDSEECSEEEDGYSSEEAENEEDEDDTEEAEEDDEEEEEEMMVPGMEGKEEPGSDSGTTAVVALIRGKQLIVANAGDSRCVVSEAGKALDMSYDHKPEDEVELARIKNAGGKVTMDGRVNGGLNLSRAIGDHFYKRNKNLPPEEQMISALPDIKVLTLTDDHEFMVIACDGIWNVMSSQEVVDFIQSKISQRDENGELRLLSSIVEELLDQCLAPDTSGDGTGCDNMTCIIICFKPRNTAELQPESGKRKLEEVLSTEGAEENGNSDKKKKAKRD

SEQ ID NO: 873391 - protein, 288 aa, Homo sapiens
NLRLGARLGGEEEEDSEECSEEEDGYSSEEAENEEDEDDTEEAEEDDEEEEEEMMVPGMEGKEEPGSDSGTTAVVALIRGKQLIVANAGDSRCVVSEAGKALDMSYDHKPEDEVELARIKNAGGKVTMDGRVNGGLNLSRAIGDHFYKRNKNLPPEEQMISALPDIKVLTLTDDHEFMVIACDGIWNVMSSQEVVDFIQSKISQRDENGELRLLSSIVEELLDQCLAPDTSGDGTGCDNMTCIIICFKPRNTAELQPESGKRKLEEVLSTEGAEENGNSDKKKKAKRD

SEQ ID NO: 873392 - protein, 165 aa, Homo sapiens
MKMKKEKVADEDDVDNEEAALLHEEATMTIEELLTRYGQNCHKGPPHSKSGGGTGEEPGSQGLNGEAGPEDSTRETPSQENGPTAKAYTGFSSNSERGTEAGQVGEPGIPTGEAGPSCSSASDKLPRVAKSKFFEDSEDESDEAEEEEEDSENAARKGQHARKAR

SEQ ID NO: 873393 - protein, 132 aa, Homo sapiens; identical to SEQ ID NO: 873387

SEQ ID NO: 873394 - protein, 147 aa, Homo sapiens
MGDHFYKRNKNLPPEEQMISALPDIKVLTLTDDHEFMVIACDGIWNVMSSQEVVDFIQSKISQRDENGELRLLSSIVEELLDQCLAPDTSGDGTGCDNMTCIIICFKPRNTAELQPESGKRKLEEVLSTEGAEENGNSDKKKKAKRD

SEQ ID NO: 873395 - protein, 132 aa, Homo sapiens; identical to SEQ ID NO: 873387

SEQ ID NO: 873396 - protein, 334 aa, Homo sapiens
MLCRLGGRWLRPLPALQLWARDLPLAPVPTSGAKRPTLPVWAVAPVSAVHANGWYEALAASSPVRVAEEVLLGVHAATGLPWWGSILLSTVALRGAVTLPLAAYQHYILAKQVENLQPEIKTIARHLNQEVAVRANQLGWSKRDARLTYLKNMRRLISELYVRDNCHPFKATVLVWIQLPMWIFMSFALRNLSTGAAHSEGFSVQEQLATGGILWFPDLTAPDSTWILPISVGVINLLIVEICALQKIGMSRFQTYITYFVRAMSVLMIPIAATVPSSIVLYWLCSSFVGLSQNLLLRSPGFRQLCRIPSTKSDSETPYKDIFAAFNTKFISRK

SEQ ID NO: 873397 - protein, 334 aa, Homo sapiens; identical to SEQ ID NO: 873396

SEQ ID NO: 873398 - protein, 334 aa, Homo sapiens; identical to SEQ ID NO: 873396

SEQ ID NO: 873399 - protein, 334 aa, Homo sapiens; identical to SEQ ID NO: 873396

SEQ ID NO: 873400 - protein, 334 aa, Homo sapiens; identical to SEQ ID NO: 873396

SEQ ID NO: 873401 - protein, 334 aa, Homo sapiens; identical to SEQ ID NO: 873396

SEQ ID NO: 873402 - protein, 334 aa, Homo sapiens; identical to SEQ ID NO: 873396

SEQ ID NO: 873403 - protein, 303 aa, Homo sapiens
MLCRLGGRWLRPLPALQLWARDLPLAPVPTSGAKRPTLPVWAVAPVSAVHANGWYEALAASSPVRVAEEVLLGVHAATGLPWWGSILLSTVALRGAVTLPLAAYQHYILAKQVENLQPEIKTIARHLNQEVAVRANQLGWSKRDARLTYLKNMRRLISELYVRDNCHPFKATVLVWIQLPMWIFMSFALRNLSTGAAHSEGFSVQEQLATGGILWFPDLTAPDSTWILPISVGVINLLIVEICALQKIGMSRFQTYITYFVRAMSVLMIPIAATVPSSIVLYWLCSSFVGLSQNLPKVLGLQA

SEQ ID NO: 873404 - protein, 106 aa, Homo sapiens
LAGTTLLIFPPLQICALQKIGMSRFQTYITYFVRAMSVLMIPIAATVPSSIVLYWLCSSFVGLSQNLLLRSPGFRQLCRIPSTKSDSETPYKDIFAAFNTKFISRK

SEQ ID NO: 873405 - protein, 100 aa, Homo sapiens
LAKVADGDAQSATLNFLQAAAAHCTNWDLQQGLLRVCRALLRAGVRGGLVDLLQVLARQLEDPDGRDHARLYYILLAHLAAPKLGVALGPSLAAPALASS

SEQ ID NO: 873406 - protein, 244 aa, Homo sapiens
LGESVVNGRGVAENQGFVAALMVQEAPALVRLSLGSHRVKGPLPVLKLQPEALEPIYSLELRFRVEGQLYAPLEAVHVPCLCPGRPARPLLLPLQPRCPAPARLDVHALYTTSTGLTCHAHLPPLFVNFADLFLPFPQPPEGAGLGFFEELWDSCLPEGAESRVWCPLGPQGLEGLVSRHLEPFVVVAQPPTSYCVAIHLPPDSKLLLRLEAALADGVPVALRTDDWAVLPLAGDYLRGLAAAV

SEQ ID NO: 873407 - protein, 464 aa, Homo sapiens
ATSLLDTLVLLPPRVAIWGEALSPPREQRPLQATACECLRELESCKPGLLGGSLGLLRGLLGQEGPVQPLSLLLALALRNTLVLQSRVGAGLGGLLTDKVSPTGGGPWDWTLVEEGDGRLQPQAPSWPAAEEGEGERSLTAREHSPEEARELRAAVIQLLDTSYLLTPVAQAQLLWLLGWALRGLQGQPPALFKPQLVRLLGTAQLTLLHAMLALKAAFGEALFTAQDEALLLRRLTLAAQHPALPPPTHLFYLHCVLSFPENWPLGPEGEEAAPLLLGPQLCRGLLPSLLHDPMALLARLHLLCLLCAEEEEEEKGQLPSPRHYLEELLAGLRQRAALDGGPRALATLCFQASYLVACCLAGQPTVLTPLIHGLAQLYQARPMLAPHFVDLLDQVDSELREPLKVVAQPPTSYCVAIHLPPDSKLLLRLEAALADGVPVALRTDDWAVLPLAGDYLRGLAAAV

SEQ ID NO: 873408 - protein, 1064 aa, Homo sapiens
MKIATVSVLLPLALCLIQDAASKNEDQEMCHEFQAFMKNGKLFCPQDKKFFQSLDGIMFINKCATCKMILEKEAKSQKRARHLARAPKATAPTELNCDDFKKGERDGDFICPDYYEAVCGTDGKTYDNRCALCAENAKTGSQIGVKSEGECKSSNPEQDVCSAFRPFVRDGRLGCTRENDPVLGPDGKTHGNKCAMCAELFLKEAENAKREGETRIRRNAEKDFCKEYEKQVRNGRLFCTRESDPVRGPDGRMHGNKCALCAEIFKRRFSEENSKTDQNLGKAEEKTKVKREIVKLCSQYQNQAKNGILFCTRENDPIRGPDGKMHGNLCSMCQAYFQAENEEKKKAEARARNKRESGKATSYAELCSEYRKLVRNGKLACTRENDPIQGPDGKVHGNTCSMCEVFFQAEEEEKKKKEGESRNKRQSKSTASFEELCSEYRKSRKNGRLFCTRENDPIQGPDGKMHGNTCSMCEAFFQQEERARAKAKREAAKEICSEFRDQVRNGTLICTREHNPVRGPDGKMHGNKCAMCASVFKLEEEEKKNDKEEKGKVEAEKVKREAVQELCSEYRHYVRNGRLPCTRENDPIEGLDGKIHGNTCSMCEAFFQQEAKEKERAEPRAKVKREAEKETCDEFRRLLQNGKLFCTRENDPVRGPDGKTHGNKCAMCKAVFQKENEERKRKEEEDQRNAAGHGSSGGGGGNTQDECAEYREQMKNGRLSCTRESDPVRDADGKSYNNQCTMCKAKLEREAERKNEYSRSRSNGTGSESGKDTCDEFRSQMKNGKLICTRESDPVRGPDGKTHGNKCTMCKEKLEREAAEKKKKEDEDRSNTGERSNTGERSNDKEDLCREFRSMQRNGKLICTRENNPVRGPYGKMHINKCAMCQSIFDREANERKKKDEEKSSSKPSNNAKDECSEFRNYIRNNELICPRENDPVHGADGKFYTNKCYMCRAVFLTEALERAKLQEKPSHVRASQEEDSPDSFSSLDSEMCKDYRVLPRIGYLCPKDLKPVCGDDGQTYNNPCMLCHENLIRQTNTHIRSTGKCEESSTPGTTAASMPPSDE

SEQ ID NO: 873409 - protein, 158 aa, Homo sapiens
PLPFTPWDECSEFRNYIRNNELICPRENDPVHGADGKFYTNKCYMCRAVFLTEALERAKLQEKPSHVRASQEEDSPDSFSSLDSEMCKDYRVLPRIGYLCPKDLKPVCGDDGQTYNNPCMLCHENLIRQTNTHIRSTGKCEESSTPGTTAASMPPSDE

SEQ ID NO: 873410 - protein, 899 aa, Homo sapiens
MCAELFLKEAENAKREGETRIRRNAEKDFCKEYEKQVRNGRLFCTRESDPVRGPDGRMHGNKCALCAEIFKRRFSEENSKTDQNLGKAEEKTKVKREIVKLCSQYQNQAKNGILFCTRENDPIRGPDGKMHGNLCSMCQAYFQAENEEKKKAEARARNKRESGKATSYAELCSEYRKLVRNGKLACTRENDPIQGPDGKVHGNTCSMCEVFFQAEEEEKKKKEGESRNKRQSKSTASFEELCSEYRKSRKNGRLFCTRENDPIQGPDGKMHGNTCSMCEAFFQQEERARAKAKREAAKEICSEFRDQVRNGTLICTREHNPVRGPDGKMHGNKCAMCASVFKLEEEEKKNDKEEKGKVEAEKVKREAVQELCSEYRHYVRNGRLPCTRENDPIEGLDGKIHGNTCSMCEAFFQQEAKEKERAEPRAKVKREAEKETCDEFRRLLQNGKLFCTRENDPVRGPDGKTHGNKCAMCKAVFQKENEERKRKEEEDQRNAAGHGSSGGGGGNTQDECAEYREQMKNGRLSCTRESDPVRDADGKSYNNQCTMCKAKLEREAERKNEYSRSRSNGTGSESGKDTCDEFRSQMKNGKLICTRESDPVRGPDGKTHGNKCTMCKEKLEREAAEKKKKEDEDRSNTGERSNTGERSNDKEDLCREFRSMQRNGKLICTRENNPVRGPYGKMHINKCAMCQSIFDREANERKKKDEEKSSSKPSNNAKDQCRQVQNEAEDAKFRQPGRSLASVARMSTDECSEFRNYIRNNELICPRENDPVHGADGKFYTNKCYMCRAVFLTEALERAKLQEKPSHVRASQEEDSPDSFSSLDSEMCKDYRVLPRIGYLCPKDLKPVCGDDGQTYNNPCMLCHENLIRQTNTHIRSTGKCEESSTPGTTAASMPPSDE

SEQ ID NO: 873411 - protein, 314 aa, Homo sapiens
MKNGKLICTRESDPVRGPDGKTHGNKCTMCKEKLEREAAEKKKKEDEDRSNTGERSNTGERSNDKEDLCREFRSMQRNGKLICTRENNPVRGPYGKMHINKCAMCQSIFDREANERKKKDEEKSSSKPSNNAKDQCRQVQNEAEDAKFRQPGRSLASVARMSTDECSEFRNYIRNNELICPRENDPVHGADGKFYTNKCYMCRAVFLTEALERAKLQEKPSHVRASQEEDSPDSFSSLDSEMCKDYRVLPRIGYLCPKDLKPVCGDDGQTYNNPCMLCHENLIRQTNTHIRSTGKCEESSTPGTTAASMPPSDE

SEQ ID NO: 873412 - protein, 978 aa, Homo sapiens
MKIATVSVLLPLALCLIQDAASKNEDQEMCHEFQAFMKNGKLFCPQDKKFFQSLDGIMFINKCATCKMILEKEAKSQKRARHLARAPKATAPTELNCDDFKKGERDGDFICPDYYEAVCGTDGKTYDNRCALCAENAKTGSQIGVKSEGECKSSNPEQDVCSAFRPFVRDGRLGCTRENDPVLGPDGKTHGNKCAMCAELFLKEAENAKREGETRIRRNAEKDFCKEYEKQVRNGRLFCTRESDPVRGPDGRMHGNKCALCAEIFKRRFSEENSKTDQNLGKAEEKTKVKREIVKLCSQYQNQAKNGILFCTRENDPIRGPDGKMHGNLCSMCQAYFQAENEEKKKAEARARNKRESGKATSYAELCSEYRKLVRNGKLACTRENDPIQGPDGKVHGNTCSMCEVFFQAEEEEKKKKEGESRNKRQSKSTASFEELCSEYRKSRKNGRLFCTRENDPIQGPDGKMHGNTCSMCEAFFQQEERARAKAKREAAKEICSEFRDQVRNGTLICTREHNPVRGPDGKMHGNKCAMCASVFKLEEEEKKNDKEEKGKVEAEKVKREAVQELCSEYRHYVRNGRLPCTRENDPIEGLDGKIHGNTCSMCEAFFQQEAKEKERAEPRAKVKREAEKETCDEFRRLLQNGKLFCTRENDPVRGPDGKTHGNKCAMCKAVFQKENEERKRKEEEDQRNAAGHGSSGGGGGNTQDECAEYREQMKNGRLSCTRESDPVRDADGKSYNNQCTMCKAKLEREAERKNEYSRSRSNGTGSESGKDTCDEFRSQMKNGKLICTRESDPVRGPDGKTHGNKCTMCKEKLEREAAEKKKKEDEDRSNTGERSNTGERSNDKEDLCREFRSMQRNGKLICTRENNPVRGPYGKMHINKCAMCQSIFDREANERKKKDEEKSSSKPSNNAKTTVQTGSEEEEEEEGEPEDTELGDEMTECLTMPAQKRACPRPCQKRGLFPQRSGVEGTSHSHPFR

SEQ ID NO: 873413 - protein, 435 aa, Homo sapiens
ERRPHTWSRCCHAFFHLGPGWGHSLWCKKAVRFSWICGIHYTTPQRKLVLLDCLLFLDLPSFFFFSSSSAWKKTSHMEQVFAMCKAKLEREAERKNEYSRSRSNGTGSESGKDTCDEFRSQMKNGKLICTRESDPVRGPDGKTHGNKCTMCKEKLEREAAEKKKKEDEDRSNTGERSNTGERSNDKEDLCREFRSMQRNGKLICTRENNPVRGPYGKMHINKCAMCQSIFDREANERKKKDEEKSSSKPSNNAKDQCRQVQNEAEDAKFRQPGRSLASVARMSTDECSEFRNYIRNNELICPRENDPVHGADGKFYTNKCYMCRAVFLTEALERAKLQEKPSHVRASQEEDSPDSFSSLDSEMCKDYRVLPRIGYLCPKDLKPVCGDDGQTYNNPCMLCHENLIRQTNTHIRSTGKCEESSTPGTTAASMPPSDE

SEQ ID NO: 873414 - protein, 1094 aa, Homo sapiens
MKIATVSVLLPLALCLIQDAASKNEDQEMCHEFQAFMKNGKLFCPQDKKFFQSLDGIMFINKCATCKMILEKEAKSQKRARHLARAPKATAPTELNCDDFKKGERDGDFICPDYYEAVCGTDGKTYDNRCALCAENAKTGSQIGVKSEGECKSSNPEQDVCSAFRPFVRDGRLGCTRENDPVLGPDGKTHGNKCAMCAELFLKEAENAKREGETRIRRNAEKDFCKEYEKQVRNGRLFCTRESDPVRGPDGRMHGNKCALCAEIFKRRFSEENSKTDQNLGKAEEKTKVKREIVKLCSQYQNQAKNGILFCTRENDPIRGPDGKMHGNLCSMCQAYFQAENEEKKKAEARARNKRESGKATSYAELCSEYRKLVRNGKLACTRENDPIQGPDGKVHGNTCSMCEVFFQAEEEEKKKKEGESRNKRQSKSTASFEELCSEYRKSRKNGRLFCTRENDPIQGPDGKMHGNTCSMCEAFFQQEERARAKAKREAAKEICSEFRDQVRNGTLICTREHNPVRGPDGKMHGNKCAMCASVFKLEEEEKKNDKEEKGKVEAEKVKREAVQELCSEYRHYVRNGRLPCTRENDPIEGLDGKIHGNTCSMCEAFFQQEAKEKERAEPRAKVKREAEKETCDEFRRLLQNGKLFCTRENDPVRGPDGKTHGNKCAMCKAVFQKENEERKRKEEEDQRNAAGHGSSGGGGGNTQDECAEYREQMKNGRLSCTRESDPVRDADGKSYNNQCTMCKAKLEREAERKNEYSRSRSNGTGSESGKDTCDEFRSQMKNGKLICTRESDPVRGPDGKTHGNKCTMCKEKLEREAAEKKKKEDEDRSNTGERSNTGERSNDKEDLCREFRSMQRNGKLICTRENNPVRGPYGKMHINKCAMCQSIFDREANERKKKDEEKSSSKPSNNAKDQCRQVQNEAEDAKFRQPGRSLASVARMSTDECSEFRNYIRNNELICPRENDPVHGADGKFYTNKCYMCRAVFLTEALERAKLQEKPSHVRASQEEDSPDSFSSLDSEMCKDYRVLPRIGYLCPKDLKPVCGDDGQTYNNPCMLCHENLIRQTNTHIRSTGKCEESSTPGTTAASMPPSDE

SEQ ID NO: 873415 - protein, 1094 aa, Homo sapiens; identical to SEQ ID NO: 873414

SEQ ID NO: 873416 - protein, 1094 aa, Homo sapiens; identical to SEQ ID NO: 873414

SEQ ID NO: 873417 - protein, 916 aa, Homo sapiens
MKIATVSVLLPLALCLIQDAASKNEDQEMCHEFQAFMKNGKLFCPQDKKFFQSLDGIMFINKCATCKMILEKEAKSQKRARHLARAPKATAPTELNCDDFKKGERDGDFICPDYYEAVCGTDGKTYDNRCALCAENAKTGSQIGVKSEGECKSSNPEQDVCSAFRPFVRDGRLGCTRENDPVLGPDGKTHGNKCAMCAELFLKEAENAKREGETRIRRNAEKDFCKEYEKQVRNGRLFCTRESDPVRGPDGRMHGNKCALCAEIFKRRFSEENSKTDQNLGKAEEKTKVKREIVKLCSQYQNQAKNGILFCTRENDPIRGPDGKMHGNLCSMCQAYFQAENEEKKKAEARARNKRESGKATSYAELCSEYRKLVRNGKLACTRENDPIQGPDGKVHGNTCSMCEVFFQAEEEEKKKKEGESRNKRQSKSTASFEELCSEYRKSRKNGRLFCTRENDPIQGPDGKMHGNTCSMCEAFFQQEERARAKAKREAAKEICSEFRDQVRNGTLICTREHNPVRGPDGKMHGNKCAMCASVFKLEEEEKKNDKEEKGKVEAEKVKREAVQELCSEYRHYVRNGRLPCTRENDPIEGLDGKIHGNTCSMCEAFFQQEAKEKERAEPRAKVKREAEKETCDEFRRLLQNGKLFCTRENDPVRGPDGKTHGNKCAMCKAVFQKENEERKRKEEEDQRNAAGHGSSGGGGGNTQDECAEYREQMKNGRLSCTRESDPVRDADGKSYNNQCTMCKAKLEREAERKNEYSRSRSNGTGSESGKDTCDEFRSQMKNGKLICTRESDPVRGPDGKTHGNKCTMCKEKLEREAAEKKKKEDEDRSNTGERSNTGERSNDKEDLCREFRSMQRNGKLICTRENNPVRGPYGKMHINKCAMCQSIFDREANERKKKDEEKSSSKPSNNAKVIY

SEQ ID NO: 873418 - protein, 158 aa, Homo sapiens; identical to SEQ ID NO: 873409

SEQ ID NO: 873419 - protein, 404 aa, Homo sapiens
MKIATVSVLLPLALCLIQDAASKNEDQEMCHEFQAFMKNGKLFCPQDKKFFQSLDGIMFINKCATCKMILEKEAKSQKRARHLARAPKATAPTELNCDDFKKGERDGDFICPDYYEAVCGTDGKTYDNRCALCAENAKTGSQIGVKSEGECKSSNPEQDVCSAFRPFVRDGRLGCTRENDPVLGPDGKTHGNKCAMCAELFLKEAENAKREGETRIRRNAEKDFCKEYEKQVRNGRLFCTRESDPVRGPDGRMHGNKCALCAEIFKRRFSEENSKTDQNLGKAEEKTKVKREIVKLCSQYQNQAKNGILFCTRENDPIRGPDGKMHGNLCSMCQAYFQAENEEKKKAEARARNKRESGKATSYAELCSEYRKLVRNGKLACTRENDPIQGPDGKVITHRLSGIL

SEQ ID NO: 873420 - protein, 570 aa, Homo sapiens
MSYQGKKNIPRITSDRLLIKGGRIVNDDQSFYADIYMEDGLIKQIGDNLIVPGGVKTIEANGKMVIPGGIDVHTHFQMPYKGMTTVDDFFQGTKAALAGGTTMIIDHVVPEPESSLTEAYEKWREWADGKSCCDYALHVDITHWNDSVKQEVQNLIKDKGVNSFMVYMAYKDLYQVSNTELYEIFTCLGELGAIAQVHAENGDIIAQEQTRMLEMGITGPEGHVLSRPEELEAEAVFRAITIASQTNCPLYVTKVMSKSAADLISQARKKGNVVFGEPITASLGIDGTHYWSKNWAKAAAFVTSPPLSPDPTTPDYINSLLASGDLQLSGSAHCTFSTAQKAIGKDNFTAIPEGTNGVEERMSVIWDKAVATGKMDENQFVAVTSTNAAKIFNLYPRKGRISVGSDSDLVIWDPDAVKIVSAKNHQSAAEYNIFEGMELRGAPLVVICQGKIMLEDGNLHVTQGAGRFIPCSPFSDYVYKRIKARRKMADLHAVPRGMYDGPVFDLTTTPKGGTPAGSARGSPTRPNPPVRNLHQSGFSLSGTQVDEGVRSASKRIVAPPGGRSNITSLS

SEQ ID NO: 873421 - protein, 534 aa, Homo sapiens
MEDGLIKQIGDNLIVPGGVKTIEANGKMVIPGGIDVHTHFQMPYKGMTTVDDFFQGTKAALAGGTTMIIDHVVPEPESSLTEAYEKWREWADGKSCCDYALHVDITHWNDSVKQEVQNLIKDKGVNSFMVYMAYKDLYQVSNTELYEIFTCLGELGAIAQVHAENGDIIAQEQTRMLEMGITGPEGHVLSRPEELEAEAVFRAITIASQTNCPLYVTKVMSKSAADLISQARKKGNVVFGEPITASLGIDGTHYWSKNWAKAAAFVTSPPLSPDPTTPDYINSLLASGDLQLSGSAHCTFSTAQKAIGKDNFTAIPEGTNGVEERMSVIWDKAVATGKMDENQFVAVTSTNAAKIFNLYPRKGRISVGSDSDLVIWDPDAVKIVSAKNHQSAAEYNIFEGMELRGAPLVVICQGKIMLEDGNLHVTQGAGRFIPCSPFSDYVYKRIKARRKMADLHAVPRGMYDGPVFDLTTTPKGGTPAGSARGSPTRPNPPVRNLHQSGFSLSGTQVDEGVRSASKRIVAPPGGRSNITSLS

SEQ ID NO: 873422 - protein, 352 aa, Homo sapiens
MFLLTPGDFFLQLEAEAVFRAITIASQTNCPLYVTKVMSKSAADLISQARKKGNVVFGEPITASLGIDGTHYWSKNWAKAAAFVTSPPLSPDPTTPDYINSLLASGDLQLSGSAHCTFSTAQKAIGKDNFTAIPEGTNGVEERMSVIWDKAVATGKMDENQFVAVTSTNAAKIFNLYPRKGRISVGSDSDLVIWDPDAVKIVSAKNHQSAAEYNIFEGMELRGAPLVVICQGKIMLEDGNLHVTQGAGRFIPCSPFSDYVYKRIKARRKMADLHAVPRGMYDGPVFDLTTTPKGGTPAGSARGSPTRPNPPVRNLHQSGFSLSGTQVDEGVRSASKRIVAPPGGRSNITSLS

SEQ ID NO: 873423 - protein, 510 aa, Homo sapiens
MSYQGKKNIPRITSDRLLIKGGRIVNDDQSFYADIYMEDGLIKQIGDNLIVPGGVKTIEANGKMVIPGGIDVHTHFQMPYKGMTTVDDFFQGTKAALAGGTTMIIDHVVPEPESSLTEAYEKWREWADGKSCCDYALHVDITHWNDSVKQEVQNLIKDKGVNSFMVYMAYKDLYQVSNTELYEIFTCLGELGAIAQVHAENGDIIAQEQTRMLEMGITGPEGHVLSRPEELEAEAVFRAITIASQTNCPLYVTKVMSKSAADLISQARKKGNVVFGEPITASLGIDGTHYWSKNWAKAAAFVTSPPLSPDPTTPDYINSLLASGDLQLSGSAHCTFSTAQKAIGKDNFTAIPEGTNGVEERMSVIWDKAVATGKMDENQFVAVTSTNAAKIFNLYPRKGRISVGSDSDLVIWDPDAVKIVSAKNHQSMADLHAVPRGMYDGPVFDLTTTPKGGTPAGSARGSPTRPNPPVRNLHQSGFSLSGTQVDEGVRSASKRIVAPPGGRSNITSLS

SEQ ID NO: 873424 - protein, 134 aa, Homo sapiens
MELRGAPLVVICQGKIMLEDGNLHVTQGAGRFIPCSPFSDYVYKRIKARRKMADLHAVPRGMYDGPVFDLTTTPKGGTPAGSARGSPTRPNPPVRNLHQSGFSLSGTQVDEGVRSASKRIVAPPGGRSNITSLS

SEQ ID NO: 873425 - protein, 570 aa, Homo sapiens; identical to SEQ ID NO: 873420

SEQ ID NO: 873426 - protein, 570 aa, Homo sapiens; identical to SEQ ID NO: 873420

SEQ ID NO: 873427 - protein, 570 aa, Homo sapiens; identical to SEQ ID NO: 873420

SEQ ID NO: 873428 - protein, 123 aa, Homo sapiens
MSYQGKKNIPRITSDRLLIKGGRIVNDDQSFYADIYMEDGLIKQIGDNLIVPGGVKTIEANGKMVIPGGIDVHTHFQMPYKGMTTVDDFFQGTKAALAGGTTMIIDHVVPEPESSLTEASYCL

SEQ ID NO: 873429 - protein, 570 aa, Homo sapiens; identical to SEQ ID NO: 873420

SEQ ID NO: 873430 - protein, 570 aa, Homo sapiens; identical to SEQ ID NO: 873420

SEQ ID NO: 873431 - protein, 570 aa, Homo sapiens; identical to SEQ ID NO: 873420

SEQ ID NO: 873432 - protein, 570 aa, Homo sapiens; identical to SEQ ID NO: 873420

SEQ ID NO: 873433 - protein, 570 aa, Homo sapiens; identical to SEQ ID NO: 873420

SEQ ID NO: 873434 - protein, 570 aa, Homo sapiens; identical to SEQ ID NO: 873420

SEQ ID NO: 873435 - protein, 321 aa, Homo sapiens
MSYQGKKNIPRITSDRLLIKGGRIVNDDQSFYADIYMEDGLIKQIGDNLIVPGGVKTIEANGKMVIPGGIDVHTHFQMPYKGMTTVDDFFQGTKAALAGGTTMIIDHVVPEPESSLTEAYEKWREWADGKSCCDYALHVDITHWNDSVKQEVQNLIKDKGVNSFMVYMAYKDLYQVSNTELYEIFTCLGELGAIAQVHAENGDIIAQEQTRMLEMGITGPEGHVLSRPEELEAEAVFRAITIASQTNCPLYVTKVMSKSAADLISQARKKGMYLRVSHQCQPRVDGTIMGRPGRGIGNSTRSANIRNTLWPGEGDGSRPKR

SEQ ID NO: 873436 - protein, 570 aa, Homo sapiens; identical to SEQ ID NO: 873420

SEQ ID NO: 873437 - protein, 684 aa, Homo sapiens
MASGRRGWDSSHEDDLPVYLARPGTTDQVPRQKYGGMFCNVEGAFESKTLDFDALSVGQRGAKTPRSGQGSDRGSGSRPGIEGDTPRRGQGREESREPAPASPAPAGVEIRSATGKEVLQNLGPKDKSDRLLIKGGRIVNDDQSFYADIYMEDGLIKQIGDNLIVPGGVKTIEANGKMVIPGGIDVHTHFQMPYKGMTTVDDFFQGTKAALAGGTTMIIDHVVPEPESSLTEAYEKWREWADGKSCCDYALHVDITHWNDSVKQEVQNLIKDKGVNSFMVYMAYKDLYQVSNTELYEIFTCLGELGAIAQVHAENGDIIAQEQTRMLEMGITGPEGHVLSRPEELEAEAVFRAITIASQTNCPLYVTKVMSKSAADLISQARKKGNVVFGEPITASLGIDGTHYWSKNWAKAAAFVTSPPLSPDPTTPDYINSLLASGDLQLSGSAHCTFSTAQKAIGKDNFTAIPEGTNGVEERMSVIWDKAVATGKMDENQFVAVTSTNAAKIFNLYPRKGRISVGSDSDLVIWDPDAVKIVSAKNHQSAAEYNIFEGMELRGAPLVVICQGKIMLEDGNLHVTQGAGRFIPCSPFSDYVYKRIKARRKMADLHAVPRGMYDGPVFDLTTTPKGGTPAGSARGSPTRPNPPVRNLHQSGFSLSGTQVDEGVRSASKRIVAPPGGRSNITSLS

SEQ ID NO: 873438 - protein, 511 aa, Homo sapiens
MYEAVPGCYFMQGRGLDVIIHGPERRQYDFFQGTKAALAGGTTMIIDHVVPEPESSLTEAYEKWREWADGKSCCDYALHVDITHWNDSVKQEVQNLIKDKGVNSFMVYMAYKDLYQVSNTELYEIFTCLGELGAIAQVHAENGDIIAQEQTRMLEMGITGPEGHVLSRPEELEAEAVFRAITIASQTNCPLYVTKVMSKSAADLISQARKKGNVVFGEPITASLGIDGTHYWSKNWAKAAAFVTSPPLSPDPTTPDYINSLLASGDLQLSGSAHCTFSTAQKAIGKDNFTAIPEGTNGVEERMSVIWDKAVATGKMDENQFVAVTSTNAAKIFNLYPRKGRISVGSDSDLVIWDPDAVKIVSAKNHQSAAEYNIFEGMELRGAPLVVICQGKIMLEDGNLHVTQGAGRFIPCSPFSDYVYKRIKARRKMADLHAVPRGMYDGPVFDLTTTPKGGTPAGSARGSPTRPNPPVRNLHQSGFSLSGTQVDEGVRSASKRIVAPPGGRSNITSLS

SEQ ID NO: 873439 - protein, 275 aa, Homo sapiens
LTVNTRLQAPSVPPAISPVHVELFSFASGDLQLSGSAHCTFSTAQKAIGKDNFTAIPEGTNGVEERMSVIWDKAVATGKMDENQFVAVTSTNAAKIFNLYPRKGRISVGSDSDLVIWDPDAVKIVSAKNHQSAAEYNIFEGMELRGAPLVVICQGKIMLEDGNLHVTQGAGRFIPCSPFSDYVYKRIKARRKMADLHAVPRGMYDGPVFDLTTTPKGGTPAGSARGSPTRPNPPVRNLHQSGFSLSGTQVDEGVRSASKRIVAPPGGRSNITSLS

SEQ ID NO: 873440 - protein, 570 aa, Homo sapiens; identical to SEQ ID NO: 873420

SEQ ID NO: 873441 - protein, 570 aa, Homo sapiens; identical to SEQ ID NO: 873420

SEQ ID NO: 873442 - protein, 570 aa, Homo sapiens; identical to SEQ ID NO: 873420

SEQ ID NO: 873443 - protein, 570 aa, Homo sapiens; identical to SEQ ID NO: 873420

SEQ ID NO: 873444 - protein, 570 aa, Homo sapiens; identical to SEQ ID NO: 873420

SEQ ID NO: 873445 - protein, 570 aa, Homo sapiens; identical to SEQ ID NO: 873420

SEQ ID NO: 873446 - protein, 570 aa, Homo sapiens; identical to SEQ ID NO: 873420

SEQ ID NO: 873447 - protein, 206 aa, Homo sapiens
MSYQGKKNIPRITSDRLLIKGGRIVNDDQSFYADIYMEDGLIKIETSIFWGVFFPPGEELKTIEANGKMVIPGGIDVHTHFQMPYKGMTTVDDFFQGTKAALAGGTTMIIDHVVPEPESSLTEAYEKWREWADGKSCCDYALHVDITHWNDSVKQEVQNLIKDKGVNSFMVYMAYKDLYQVSNTELAVSRDRATALQPGRQSETPS

SEQ ID NO: 873448 - protein, 80 aa, Homo sapiens
MLFPKSTLLAFPSAAVGPGSPCVPSTHDGQMLVQDEQLRKRLPGQVQWLTPVIPALWEAEVGGSRGQEFKTSLRKMEKPC

SEQ ID NO: 873449 - protein, 136 aa, Homo sapiens
CQTPRHFFSAPNPPCRAQLLILALGLEDHMAPAQGLNVQQWAQALPPRWSGVDWHVRVPHRFSWGLGTATNPHLELLHSLTAAMDSQSCQIRPLLWVSKPPTPTFLDSAPFHTDDLSLSFLFQQLTFFSFVNDSVY

SEQ ID NO: 873450 - protein, 281 aa, Homo sapiens
MAGTWLLLLLALGCPALPTGVGGTPFPSLAPPIMLLVDGKQQMVVVCLVLDVAPPGLDSPIWFSAGNGSALDAFTYGPSPATDGTWTNLAHLSLPSEELASWEPLVCHTGPGAEGHSRSTQPMHLSGEASTARTCPQEPLRGTPGGALWLGVLRLLLFKLLLFDLLLTCSCLCDPAGPLPSPATTTRLRALGSHRLHPATETGGREATSSPRPQPRDRRWGDTPPGRKPGSPVWGEGSYLSSYPTCPAQAWCSRSALRAPSSSLGAFFAGDLPPPLQAGAA

SEQ ID NO: 873451 - protein, 174 aa, Homo sapiens
MAGTWLLLLLALGCPALPTGEASTARTCPQEPLRGTPGGALWLGVLRLLLFKLLLFDLLLTCSCLCDPAGPLPSPATTTRLRALGSHRLHPATETGGREATSSPRPQPRDRRWGDTPPGRKPGSPVWGEGSYLSSYPTCPAQAWCSRSALRAPSSSLGAFFAGDLPPPLQAGAA

SEQ ID NO: 873452 - protein, 256 aa, Homo sapiens
MAGTWLLLLLALGCPALPTGPVSFPSSPEAATTGPIWFSAGNGSALDAFTYGPSPATDGTWTNLAHLSLPSEELASWEPLVCHTGPGAEGHSRSTQPMHLSGEASTARTCPQEPLRGTPGGALWLGVLRLLLFKLLLFDLLLTCSCLCDPAGPLPSPATTTRLRALGSHRLHPATETGGREATSSPRPQPRDRRWGDTPPGRKPGSPVWGEGSYLSSYPTCPAQAWCSRSALRAPSSSLGAFFAGDLPPPLQAGAA

SEQ ID NO: 873453 - protein, 118 aa, Homo sapiens
MAGTWLLLLLALGCPALPTGVGGTPFPSLAPPIMLLVDGKQQMVVVCLVLDVAPPGLDSPIWFSAGNGSALDAFTYGPSPATDGTWTNLAHLSLPSEELASWEPLVCHTGPGAEGHTV

SEQ ID NO: 873454 - protein, 103 aa, Homo sapiens
FYFLRWSLALSPSLECSGLISAHCNLCLLDSSDSPASASQVAGTTGMCHHAWQIFVLLVETGFHRVGQAGLELLNSGDPPASASHSAGITGVSHHTPCLAFQG

SEQ ID NO: 873455 - protein, 106 aa, Homo sapiens
MPVPQPLFLVQLSCSPGPAPALGSFSYGQPRSRLLPYLSVYLQWPAQLLAQRACSVNVGELNKVQLTNAVASSPLATFLLELSCTFSASSFPPGLPTSLLTRPHFL

SEQ ID NO: 873456 - protein, 248 aa, Homo sapiens
IRSCEEAESPEASGVTESVVGIPTCESVVQLQPGRSYIIYVRALNMGGPSVRSEPATVHTIGSYFRLNKDTCHPWLTISEDGLTAVRSERRTPARELSPSDTHFTRCVAVMGNLIPVRGHHYWEVEVDEHLDYRVGVAFADVRKQEDLGANCLSWCMRHTFASSRHKYEFLHNRTTPDIRITVPPKKIGILLDYEHSKLSFFNVDLSQHLYTFSCQLHEFVHPCFSLEKPGCLKVHNGISMPKHVTFY

SEQ ID NO: 873457 - protein, 306 aa, Homo sapiens
AGAAQLTESLVLARSPRQPRAQPISAPDCTRAMVGRRALIVLAHSERTSFNYAMKEAAAAALKKKGWEVVESDLYAMNFNPIISRKDITGKLKDPANFQYPAESVLAYKEGHLSPDIVAEQKKLEAADLVIFQFPLQWFGVPAILKGWFERVFIGEFAYTYAAMYDKGPFRSKKAVLSITTGGSGSMYSLQGIHGDMNVILWPIQSGILHFCGFQVLEPQLTYSIGHTPADARIQILEGWKKRLENIWDETPLYFAPSSLFDLNFQAGFLMKKEVQDEEKNKKFGLSVGHHLGKSIPTDNQIKARK

SEQ ID NO: 873458 - protein, 306 aa, Homo sapiens; identical to SEQ ID NO: 873457

SEQ ID NO: 873459 - protein, 306 aa, Homo sapiens; identical to SEQ ID NO: 873457

SEQ ID NO: 873460 - protein, 241 aa, Homo sapiens
TLRAQLLRVQVSDSSPLLPGAVTRALCAPHSCLGQGRGPASRAQLPGAPSAHPPVHFACGISPLLLPLDCVAGHPTNTRTLDISGVKTTLRRFSVILQDLCSILVILSSISLHRYHSKPVLCAPSSRASPSSATTLSTRTLWGPGAGSHPFGVHNTRLSPDLCPGKIVLRALKESGAGMPEQHKDPRVQENPDDQRTVPEVTGDARSAFWPLRDNGGPSPFVPRPGPLQTDLHAQSSEIRY

SEQ ID NO: 873461 - protein, 135 aa, Homo sapiens
MSWERLGSGASCMESTRRVPLLSQEVFMERAALPGTAAFSGDQRQARQMCPVSRELPSLVGETSRRSRHRWSGQAQVCAGAPAGMARKASWKNSLSGILWGRVGVSQAEEGKEEGEAEARQQESEIGLRVAAVSS

SEQ ID NO: 873462 - protein, 79 aa, Homo sapiens
SPVLSVSNRQPTRPACTQVARLAGQLSQSHLRRCARKSRSSAVGNDGSHCASTSTGCSLRIGGGGHMLWSPSTACGWRE

SEQ ID NO: 873463 - protein, 319 aa, Homo sapiens
MRSCFCVRRSRDPPPPQPPPPPPQRGTDQSTMPEVKDLSEALPETSMDPITGVGVVASRNRAPTGYDVVAQTADGVDADLWKDGLFKSKVTRYLCFTRSFSKENSHLGNVLVDMKLIDIKDTLPVGFIPIQETVDTQEVAFRKKRLCIKFIPRDSTEAAICDIRIMGRTKQAPPQYTFIGELNSMGIWYRMGRVPRNHDSSQPTTPSQSSAASTPAPNLPRHISLTLPATFRGRNSTRTDYEYQHSNLYAISAMDGVPFMISEKFSCVPESMQPFDLLGITIKSLAEIEKEYEYSFRTEQSAAARLPPSPTRCQQIPQS

SEQ ID NO: 873464 - protein, 319 aa, Homo sapiens; identical to SEQ ID NO: 873463

SEQ ID NO: 873465 - protein, 269 aa, Homo sapiens
HASGPTRPRNRAPTGYDVVAQTADGVDADLWKDGLFKSKVTRYLCFTRSFSKENSHLGNVLVDMKLIDIKDTLPVGFIPIQETVDTQEVAFRKKRLCIKFIPRDSTEAAICDIRIMGRTKQAPPQYTFIGELNSMGIWYRMGRVPRNHDSSQPTTPSQSSAASTPAPNLPRHISLTLPATFRGRNSTRTDYEYQHSNLYAISAMDGVPFMISEKFSCVPESMQPFDLLGITIKSLAEIEKEYEYSFRTEQSAAARLPPSPTRCQQIPQS

SEQ ID NO: 873466 - protein, 304 aa, Homo sapiens
MDTGLSSQPSEEDQSTMPEVKDLSEALPETSMDPITGVGVVASRNRAPTGYDVVAQTADGVDADLWKDGLFKSKVTRYLCFTRSFSKENSHLGNVLVDMKLIDIKDTLPVGFIPIQETVDTQEVAFRKKRLCIKFIPRDSTEAAICDIRIMGRTKQAPPQYTFIGELNSMGIWYRMGRVPRNHDSSQPTTPSQSSAASTPAPNLPRHISLTLPATFRGRNSTRTDYEYQHSNLYAISAMDGVPFMISEKFSCVPESMQPFDLLGITIKSLAEIEKEYEYSFRTEQSAAARLPPSPTRCQQIPQS

SEQ ID NO: 873467 - protein, 304 aa, Homo sapiens; identical to SEQ ID NO: 873466

SEQ ID NO: 873468 - protein, 304 aa, Homo sapiens; identical to SEQ ID NO: 873466

SEQ ID NO: 873469 - protein, 322 aa, Homo sapiens
MDTGLSSQPSEEDQSTMPEVKDLSEALPETSMDPITGVGVVASRNRAPTGYDVVAQTADGVDADLWKDGLFKSKVTRYLCFTRSFSKENSHLGNVLVDMKLIDIKDTLPVGFIPIQETVDTQEVAFRKKRLCIKFIPRDSTEAAICDIRIMGRTKQAPPQYTFIGELNSMGIWYRMGRVPRNHDSSQPTTPSQSSAASTPAPNLPRHISLTLPATFRGRNSTRTDYEYQHSNLYAISALPRSPPWQLLSSSAGSCEHHSLLYTLSYASQGPPPAHPLLWAQALLSEFPCPGNECPLRDHTYAASPALLRAVLCQIITLLLKS

SEQ ID NO: 873470 - protein, 107 aa, Homo sapiens
MDLSPSRLEVGEQHPCPRWRGCCFLGRRTVDGPAWIHHQDAVLGHGAPPPRAHLCNNHMPTIAPGASAPCPDPGTTGTPSETCWPQEDTGTRAPSPSQSQACLDGIC

SEQ ID NO: 873471 - protein, 304 aa, Homo sapiens; identical to SEQ ID NO: 873466

SEQ ID NO: 873472 - protein, 249 aa, Homo sapiens
RGYTLGEVPRNHDSSQPTTPSQSSAASTPAPDVSRHISLTLPATFRGRNSTRTDYEYQHSNLYAISEEVAFRKKRLCIKFIPRDSTEAAICDIRIMGRTKQAPPQYTFIGELNSMGIWYRMGRVPRNHDSSQPTTPSQSSAASTPAPNLPRHISLTLPATFRGRNSTRTDYEYQHSNLYAISAMDGVPFMISEKFSCVPESMQPFDLLGITIKSLAEIEKEYEYSFRTEQSAAARLPPSPTRCQQIPQS

SEQ ID NO: 873473 - protein, 304 aa, Homo sapiens; identical to SEQ ID NO: 873466

SEQ ID NO: 873474 - protein, 304 aa, Homo sapiens; identical to SEQ ID NO: 873466

SEQ ID NO: 873475 - protein, 219 aa, Homo sapiens
TAFTAEHATHGHVKMHHAYTNVVGLGDSSTWRLPCLNRYVYMFLAPFLLPIATPLVAVERLRKVELGTALRTLALISLGLYSHYWLLLNVSGFKNPSSALGCMFLTRSLLAHPYLHVNIFQHIGLPMFSRDNKPRRIHMMSLGVLNLARLPVLDWAFGHSIISCHVEHHLFPRLSDNMCLKVVEGWAGGAGIKGLLEDGKEDSSAWGRCSHYNPGTCGG

SEQ ID NO: 873476 - protein, 229 aa, Homo sapiens
  misc_feature (124)..(125): Xaa can be any naturally occurring amino acid
  misc_feature (129)..(129): Xaa can be any naturally occurring amino acid
  misc_feature (133)..(133): Xaa can be any naturally occurring amino acid
  misc_feature (136)..(138): Xaa can be any naturally occurring amino acid
  misc_feature (141)..(141): Xaa can be any naturally occurring amino acid
  misc_feature (143)..(143): Xaa can be any naturally occurring amino acid
  misc_feature (147)..(147): Xaa can be any naturally occurring amino acid
  misc_feature (152)..(153): Xaa can be any naturally occurring amino acid
  misc_feature (157)..(158): Xaa can be any naturally occurring amino acid
  misc_feature (161)..(161): Xaa can be any naturally occurring amino acid
  misc_feature (170)..(170): Xaa can be any naturally occurring amino acid
  misc_feature (174)..(174): Xaa can be any naturally occurring amino acid
  misc_feature (183)..(183): Xaa can be any naturally occurring amino acid
  misc_feature (186)..(186): Xaa can be any naturally occurring amino acid
  misc_feature (191)..(191): Xaa can be any naturally occurring amino acid
  misc_feature (200)..(201): Xaa can be any naturally occurring amino acid
  misc_feature (209)..(209): Xaa can be any naturally occurring amino acid
  misc_feature (215)..(215): Xaa can be any naturally occurring amino acid
MAKRRAAEPVTFHVPWKRLLLCDFAEQPPPPPLWIRPPGVAHAGQLLGVPEQHRKRKIDAGTMAEPSASPSKRRDSGDNSAPSGQEREDHGLETGDPPLPPPPVLPGPGEELPGARLPARPALXXPARXGPPXPPXXXSAXPXPAAXCPLRXXNTFXXWLXPFPPIPLPXLPDXPHHTLPPPXLPXTPPGXPVHIASSSXXPNPSASLXSPPPLXLNSRILKGKVIFHT

SEQ ID NO: 873477 - protein, 183 aa, Homo sapiens
  misc_feature (154)..(154): Xaa can be any naturally occurring amino acid
  misc_feature (177)..(177): Xaa can be any naturally occurring amino acid
MAKRRAAEPVTFHVPWKRLLLCDFAEQPPPPPLWIRPPGVAHAGQLLGVPEQHRKRKIDAGTMAEPSASPSKRRDSGDNSAPSGQEREDHGLETGDPPLPPPPVLPGPGEELPGARLPGGGGDDGAGRAGPPRGDWGVASRQHNEEFWAVLIPXNTWKEILLAFLIGSWARHLEEFXGGKTTP

SEQ ID NO: 873478 - protein, 194 aa, Homo sapiens
MAKRRAAEPVTFHVPWKRLLLCDFAEQPPPPPLWIRPPGVAHAGQLLGVPEQHRKRKIDAGTMAEPSASPSKRRDSGDNSAPSGQEREDHGLETGDPPLPPPPVLPGPGEELPGARLPGGGGDDGAGRAGPPRGDWGVASRQHNEEFWQYNTFQYWRNPLPPIDLADIEDLSEDTLTEATLQGRNEGAEVDMES

SEQ ID NO: 873479 - protein, 82 aa, Homo sapiens
WNRNGREIVALAEEPYSEQHRKRKIDAGTMAEPSASPSKRRDSGDNSAPSGQEREDHGLETRRVHAHAESHTLLQGGSSKSR

SEQ ID NO: 873480 - protein, 72 aa, Homo sapiens
WISAPLGLRGFPSTACQVWIQHMQVTAVKAGHVPATGAGRWGLRCERDSLGSCSAHRPWEEHSAGQWEELQL

SEQ ID NO: 873481 - protein, 139 aa, Homo sapiens
MVISAQCSECQSKNIPEIVAVYSRIEQLLTSDWAVHIPEEDQRDGCECEMGTYLSESQVNEIEMQLLKEKLQEIYLQAEEQEVLPEELSNRLEVVKEFLRNNEDLRNGLTEDMQKLDSLCLHQKLDSQEPGRQTPDRKA

SEQ ID NO: 873482 - protein, 319 aa, Homo sapiens
MVLSELAARLNCAEYKNWVKAGHCLLLLRSCLQGFVGREVLSFHRGLLAAAPGLGPRAVCRGGSRCSPRARQFQPQCQVCAEWKREILRHHVNRNGDVHWGNCRPGRWPVDAWEVAKAFMPRGLADKQGPEECDAVALLSLINSCDHFVVDRKKVTEVIKCRNEIMHSSEMKVSSTWLRDFQMKIQNFLNEFKNIPEIVAVYSRIEQLLTSDWAVHIPEEDQRDGCECEMGTYLSESQVNEIEMQLLKEKLQEIYLQAEEQEVLPEELSNRLEVVKEFLRNNEDLRNGLTEDMQKLDSLCLHQKLDSQEPGRQTPDRKA

SEQ ID NO: 873483 - protein, 319 aa, Homo sapiens; identical to SEQ ID NO: 873482

SEQ ID NO: 873484 - protein, 221 aa, Homo sapiens
MAHCSNSAGSIHPPPQPLAAFMPRGLADKQGPEECDAVALLSLINSCDHFVVDRKKVTEVIKCRNEIMHSSEMKVSSTWLRDFQMKIQNFLNEFKNIPEIVAVYSRIEQLLTSDWAVHIPEEDQRDGCECEMGTYLSESQVNEIEMQLLKEKLQEIYLQAEEQEVLPEELSNRLEVVKEFLRNNEDLRNGLTEDMQKLDSLCLHQKLDSQEPGRQTPDRKA

SEQ ID NO: 873485 - protein, 572 aa, Homo sapiens
RRPSFPFPLSPPPEARGAGSPFRAAGVRQRRAWGCGGRGSQVRGARAAPGSLLAGRPPRSFPFASVSPLRSPGGGEYSGYIFAIMDQFGDILEGEVDHSFFDSDFEEGKKCETNSVFDKQNDDPKERIDKDTKNVNSNTGMQTTENYLTEKGNERNVKFPPEHPVENDVTQTVSSFSLPASSRSKKLCDVTTGLKIHVSIPNRIPKIVKEGEDDYYTDGEESSDDGKKYHVKSKSAKPSTNVKKSIRKKYCKVSSSSSSSLSSSSSGSGTDCLDAGSDSHLSDSSPSSKSSKKHVSGITLLSPKHKYKSGIKSTETQPSSTTPKCGHYPEESEDTVTDVSPLSTPDISPLQSFELGIANDQKVKIKKQENVSQEIYEDVEDLKNNSKYLKAAKKGKEKHEPDVSSKSSSVLDSSLDHRHKQKVLHDTMDLNHLLKAFLQLDKKGPQKHHFDQPSVAPGKNYSFTREEVRQIDRENQRLLKELSRQAEKPGSKSTIPRSVIIPQSYITVLSTGQKEPTKGLREENLALLKRFEAVKPTVGMESSEQMMDYYLNMGYLNSSPLSRRQIILGISH

SEQ ID NO: 873486 - protein, 443 aa, Homo sapiens
SLESKQSQKIENDILEGEVDHSFFDSDFEEGKKCETNSVFDKQNDDPKERIDKDTKNVNSNTGMQTTENYLTEKGNERNVKFPPEHPVENDVTQTVSSFSLPASSRSKKLCDVTTGLKIHVSIPNRIPKIVKEGEDDYYTDGEESSDDGKKYHVKSKSAKPSTNVKKSIRKKYCKVSSSSSSSLSSSSSGSGTDCLDAGSDSHLSDSSPSSKSSKKHVSGITLLSPKHKYKSGIKSTETQPSSTTPKCGHYPEESEDTVTDVSPLSTPDISPLQSFELGIANDQKVKIKKQENVSQEIYEDVEDLKNNSKYLKAAKKGKEKHEPDVSSKSSSVLDSSLDHRHKQKVLHDTMDLNHLLKAFLQLDKKGPQKHHFDQPSVAPGKNYSFTREEVRQIDRENQRLLKELSRQAEKPGSKSTIPRSADHPPKLYHSALNRTEGTNQRI

SEQ ID NO: 873487 - protein, 483 aa, Homo sapiens
HAAPPFPFRSLRLRKRGAPGARSGPRECASAARGAVVAAALRYIFAIMDQFGDILEGEVDHSFFDSDFEEGKKCETNSVFDKQNDDPKERIDKDTKNVNSNTGMQTTENYLTEKGNERNVKFPPEHPVENDVTQTVSSFSLPASSRSKKLCDVTTGLKIHVSIPNRIPKIVKEGEDDYYTDGEESSDDGKKYHVKSKSAKPSTNVKKSIRKKYCKVSSSSSSSLSSSSSGSGTDCLDAGSDSHLSDSSPSSKSSKKHVSGITLLSPKHKYKSGIKSTETQPSSTTPKCGHYPEESEDTVTDVSPLSTPDISPLQSFELGIANDQKVKIKKQENVSQEIYEDVEDLKNNSKYLKAAKKGKEKHEPDVSSKSSSVLDSSLDHRHKQKVLHDTMDLNHLLKAFLQLDKKGPQKHHFDQPSVAPGKNYSFTREEVRQIDRENQRLLKELSRQAEKPGSKSTIPRSADHPPKLYHSALNRTEGTNQRI

SEQ ID NO: 873488 - protein, 529 aa, Homo sapiens
WKILLQVSAALVIPELSNPDGYHYLHLHSGELKHRRYIFAIMDQFGDILEGEVDHSFFDSDFEEGKKCETNSVFDKQNDDPKERIDKDTKNVNSNTGMQTTENYLTEKGNERNVKFPPEHPVENDVTQTVSSFSLPASSRSKKLCDVTTGLKIHVSIPNRIPKIVKEGEDDYYTDGEESSDDGKKYHVKSKSAKPSTNVKKSIRKKYCKVSSSSSSSLSSSSSGSGTDCLDAGSDSHLSDSSPSSKSSKKHVSGITLLSPKHKYKSGIKSTETQPSSTTPKCGHYPEESEDTVTDVSPLSTPDISPLQSFELGIANDQKVKIKKQENVSQEIYEDVEDLKNNSKYLKAAKKGKEKHEPDVSSKSSSVLDSSLDHRHKQKVLHDTMDLNHLLKAFLQLDKKGPQKHHFDQPSVAPGKNYSFTREEVRQIDRENQRLLKELSRQAEKPGSKSTIPRSVIIPQSYITVLSTGQKEPTKGLREENLALLKRFEAVKPTVGMESSEQMMDYYLNMGYLNSSPLSRRQIILGISH

SEQ ID NO: 873489 - protein, 445 aa, Homo sapiens
MMDVNSSGRPDLYGHLRSFLLPEVGRGLPDLSPDGGADPVAGSWAPHLLSEVTASPAPTWDAPPDNASGCGEQINYGRVEKVVIGSILTLITLLTIAGNCLVVISVCFVKKLRQPSNYLIVSLALADLSVAVAVMPFVSVTDLIGGKWIFGHFFCNVFIAMDVMCCTASIMTLCVISIDRYLGITRPLTYPVRQNGKCMAKMILSVWLLSASITLPPLFGWAQNVNDDKVCLISQDFGYTIYSTAVAFYIPMSVMLFMYYQIYKAARKSAAKHKFPGFPRVEPDSVIALNGIVKLQKEVEECANLSRLLKHERKNISIFKREQKAATTLGIIVGAFTVCWLPFFLLSTARPFICGTSCSCIPLWVERTFLWLGYANSLINPFIYAFFNRDLRTTYRSLLQCQYRNINRKLSAAGMHEALKLAERPERPEFVLQNADYCRKKGHDS

SEQ ID NO: 873490 - protein, 479 aa, Homo sapiens
MMDVNSSGRPDLYGHLRSFLLPEVGRGLPDLSPDGGADPVAGSWAPHLLSEVTASPAPTWDAPPDNASGCGEQINYGRVEKVVIGSILTLITLLTIAGNCLVVISVCFVKKLRQPSNYLIVSLALADLSVAVAVMPFVSVTDLIGGKWIFGHFFCNVFIAMDVMCCTASIMTLCVISIDRYLGITRPLTYPVRQNGKCMAKMILSVWLLSASITLPPLFGWAQNVNDDKVCLISQDFGYTIYSTAVAFYIPMSVMLFMYYQIYKAARKSAAKHKFPGFPRVEPDSVIALNGIVKLQKEVEECANLSRLLKHERKNISIFKREQKAATTLGIIVGAFTVCWLPFFLLSTARPFICGTSCSCIPLWVERTFLWLGYANSLINPFIYAFFNRDLRTTYRSLLQCQYRNINRKLSAAGMHEALKLAERPERPEFVLRACTRRVLLRPEKRPPVSVWVLQSPDHHNWLADKMLTTVEKKVMIHD

SEQ ID NO: 873491 - protein, 109 aa, Homo sapiens
MKGCGGGKENVQLEMSGQWQDQPQGWKRGCKEGRGDGETKLQVGSEVGVRPDLKGHCRLRLSSPFASTESLLLASCLSLAHRPLFLQSVGDLPSQTPCFLLQTLLISLC

SEQ ID NO: 873492 - protein, 672 aa, Homo sapiens
MDLILNRMDYLQVGVTSQKTMKLIPASRHRATQKVVIGDHDGVVMCFGMKKGEAAAVFKTLPGPKIARLELGGVINTPQEKIFIAAASEIRGFTKRGKQFLSFETNLTESIKAMHISGSDLFLSASYIYNHYCDCKDQHYYLSGDKINDVICLPVERLSRITPVLACQDRVLRVLQGSDVMYAVEVPGPPTVLALHNGNGGDSGEDLLFGTSDGKLALIQITTSKPVRKWEIQNEKKRGGILCIDSFDIVGDGVKDLLVGRDDGMVEVYSFDNANEPVLRFDQMLSESVTSIQGGCVGKDSYDEIVVSTYSGWVTGLTTEPIHKESGPGEELKINQEMQNKISSLRNELEHLQYKVLQERENYQQSSQSSKAKSAVPSFGINDKFTLNKDDASYSLILEVQTAIDNVLIQSDVPIDLLDVDKNSAVVSFSSCDSESNDNFLLATYRCQADTTRLELKIRSIEGQYGTLQAYVTPRIQPKTCQVRQYHIKPLSLHQRTHFIDHDRPMNTLTLTGQFSFAEVHSWVVFCLPEVPEKPPAGECVTFYFQNTFLDTQLESTYRKGEGVFKSDNISTISILKDVLSKEATKRKINLNISYEINEVSVKHTLKLIHPKLEYQLLLAKKVQLIDALKELQIHEGNTNFLIPEYHCILEEADHLQEEYKKQPAHLERLYG

SEQ ID NO: 873493 - protein, 189 aa, Homo sapiens
MDLILNRMDYLQVGVTSQKTMKLIPASRHRATQKVVIGDHDGVVMCFGMKKGEAAAVFKTLPGPKIARLELGGVINTPQEKIFIAAASEIRGFTKRGKQFLSFETNLTESIKAMHISGSDLFLSASYIYNHYCDCKDQHYYLSGDKINDVICLPVERLSRITPVLACQDRVLRVLQVAVICIFLIFYIM

SEQ ID NO: 873494 - protein, 730 aa, Homo sapiens
MDLILNRMDYLQVGVTSQKTMKLIPASRHRATQKVVIGDHDGVVMCFGMKKGEAAAVFKTLPGPKIARLELGGVINTPQEKIFIAAASEIRGFTKRGKQFLSFETNLTESIKAMHISGSDLFLSASYIYNHYCDCKDQHYYLSGDKINDVICLPVERLSRITPVLACQDRVLRVLQGSDVMYAVEVPGPPTVLALHNGNGGNQDFIFHKSTMCFNSDSGEDLLFGTSDGKLALIQITTSKPVRKWEIQNEKKRGGILCIDSFDIVGDGVKDLLVGRDDGMVEVYSFDNANEPVLRFDQMLSESVTSIQGGCVGKDSYDEIVVSTYSGWVTGLTTEPIHKESGPGEELKINQEMQNKISSLRNELEHLQYKVLQERENYQQSSQSSKAKSAVPSFGINDKFTLNKDDASYSLILEVQTAIDNVLIQSDVPIDLLDVDKNSAVVSFSSCDSESNDNFLLATYRCQADTTRLELKIRSIEGQYGTLQAYVTPRIQPKTCQVRQYHIKPLSLHQRTHFIDHDRPMNTLTLTGQFSFAEVHSWVVFCLPEVPEKPPAGECVTFYFQNTFLDTQLESTYRKGEGVFKSDNISTISILKDVLSKEATKRKINLNISYEINEVSVKHTLKLIHPKLEYQLLLAKKVQLIDALKELQIHEGNTNFLIPEYHCILEEADHLQEEYKKQPAHLERLYGMITDLFIDKFKFKGTNVKTKVPLLLEILDSYDQNALISFFDAA

SEQ ID NO: 873495 - protein, 715 aa, Homo sapiens
MDLILNRMDYLQVGVTSQKTMKLIPASRHRATQKVVIGDHDGVVMCFGMKKGEAAAVFKTLPGPKIARLELGGVINTPQEKIFIAAASEIRGFTKRGKQFLSFETNLTESIKAMHISGSDLFLSASYIYNHYCDCKDQHYYLSGDKINDVICLPVERLSRITPVLACQDRVLRVLQGSDVMYAVEVPGPPTVLALHNGNGGDSGEDLLFGTSDGKLALIQITTSKPVRKWEIQNEKKRGGILCIDSFDIVGDGVKDLLVGRDDGMVEVYSFDNANEPVLRFDQMLSESVTSIQGGCVGKDSYDEIVVSTYSGWVTGLTTEPIHKESGPGEELKINQEMQNKISSLRNELEHLQYKVLQERENYQQSSQSSKAKSAVPSFGINDKFTLNKDDASYSLILEVQTAIDNVLIQSDVPIDLLDVDKNSAVVSFSSCDSESNDNFLLATYRCQADTTRLELKIRSIEGQYGTLQAYVTPRIQPKTCQVRQYHIKPLSLHQRTHFIDHDRPMNTLTLTGQFSFAEVHSWVVFCLPEVPEKPPAGECVTFYFQNTFLDTQLESTYRKGEGVFKSDNISTISILKDVLSKEATKRKINLNISYEINEVSVKHTLKLIHPKLEYQLLLAKKVQLIDALKELQIHEGNTNFLIPEYHCILEEADHLQEEYKKQPAHLERLYGMITDLFIDKFKFKGTNVKTKVPLLLEILDSYDQNALISFFDAA

SEQ ID NO: 873496 - protein, 715 aa, Homo sapiens; identical to SEQ ID NO: 873495

SEQ ID NO: 873497 - protein, 108 aa, Homo sapiens
RSSHVNSFNHRVVRRAHRQFSQGDAAYGIQVNLLDETCEYVRLGSGCRHTWLIFALLVETGFCHVTQAGLELLTSSDPPASASQSVGITATVPGIHFSFKRDFCSYDY

SEQ ID NO: 873498 - protein, 187 aa, Homo sapiens
MKLLNSLSVDPDAECKYGLYFRDGRRKVDYILVYHHKRPSGNRTLVRRVQHSDTPSGARSVKQDHPLPGKGASLDAGSGEPPMDYHEDDKRFRREEYEATSWRRAGAGADEDTSTPPSRVCDNPWPLGTCCAEEAEFLELRDADERMMSHSQLQTRGRLKQNQPVLQKLKIQSSHNVLSPGPTHERS

SEQ ID NO: 873499 - protein, 76 aa, Homo sapiens
LWTRGIISAGAPDTRSGPSPTLQQPPLLTLSPSAQSLRCSSSIFSVGIAGTNGTGWGGEFGTKNTHEPLEATIEVR

SEQ ID NO: 873500 - protein, 591 aa, Homo sapiens
MESRDHNNPQEGPTSSSGRRAAVEDNHLLIKAVQNEDVDLVQQLLEGGANVNFQEEEGGWTPLHNAVQMSREDIVELLLRHGADPVLRKKNGATPFILAAIAGSVKLLKLFLSKGADVNECDFYGFTAFMEAAVYGKVKALKFLYKRGANVNLRRKTKEDQERLRKGGATALMDAAEKGHVEVLKILLDEMGADVNACDNMGRNALIHALLSSDDSDVEAITHLLLDHGADVNVRGERGKTPLILAVEKKHLGLVQRLLEQEHIEINDTDSDGKTALLLAVELKLKKIAELLCKRGASTDCGDLVMTARRNYDHSLVKVLLSHGAKEDFHPPAEDWKPQSSHWGAALKDLHRIYRPMIGKLKFFIDEKYKIADTSEGGIYLGFYEKQEVAVKTFCEGSPRAQREVSCLQSSRENSHLVTFYGSESHRGHLFVCVTLCEQTLEACLDVHRGEDVENEEDEFARNVLSSIFKAVQELHLSCGYTHQDLQPQNILIDSKKAAHLADFDKSIKWAGDPQEVKRDLEDLGRLVLYVVKKGSISFEDLKAQSNEEVVQLSPDEETKDLIHRLFHPGEHVRDCLSDLLGHPFFWTWER

SEQ ID NO: 873501 - protein, 741 aa, Homo sapiens
MESRDHNNPQEGPTSSSGRRAAVEDNHLLIKAVQNEDVDLVQQLLEGGANVNFQEEEGGWTPLHNAVQMSREDIVELLLRHGADPVLRKKNGATPFILAAIAGSVKLLKLFLSKGADVNECDFYGFTAFMEAAVYGKVKALKFLYKRGANVNLRRKTKEDQERLRKGGATALMDAAEKGHVEVLKILLDEMGADVNACDNMGRNALIHALLSSDDSDVEAITHLLLDHGADVNVRGERGKTPLILAVEKKHLGLVQRLLEQEHIEINDTDSDGKTALLLAVELKLKKIAELLCKRGASTDCGDLVMTARRNYDHSLVKVLLSHGAKEDFHPPAEDWKPQSSHWGAALKDLHRIYRPMIGKLKFFIDEKYKIADTSEGGIYLGFYEKQEVAVKTFCEGSPRAQREVSCLQSSRENSHLVTFYGSESHRGHLFVCVTLCEQTLEACLDVHRGEDVENEEDEFARNVLSSIFKAVQELHLSCGYTHQDLQPQNILIDSKKAAHLADFDKSIKWAGDPQEVKRDLEDLGRLVLYVVKKGSISFEDLKAQSNEEVVQLSPDEETKDLIHRLFHPGEHVRDCLSDLLGHPFFWTWESRYRTLRNVGNESDIKTRKSESEILRLLQPGPSEHSKSFDKWTTKINECVMKKMNKFYEKRGNFYQNTVGDLLKFIRNLGEHIDEEKHKKMKLKIGDPSLYFQKTFPDLVIYVYTKLQNTEYRKHFPQTHSPNKPQCDGAGGASGLASPGC

SEQ ID NO: 873502 - protein, 42 aa, Homo sapiens
RRKGEYISIFIYEKEKQAEKMKEKESPNSAPSWSSSRSCFLD

SEQ ID NO: 873503 - protein, 100 aa, Homo sapiens
MPALGVLPQSAPAGCVDPGLKGGASAAGCVDPGLKGGASAARCLDPGLKGGRFGCWMCGPWIERRRFGCWMPGPWSERRRFGCWMCGPWIERRRFGCWMC

SEQ ID NO: 873504 - protein, 102 aa, Homo sapiens
MLTSCEMTKDLAAEGKRKNNGKRIYLTQLEMAPFPYLLLHPEASPMLGSDVNKQRGRMQPLQRHMFEIPGHWRSSRLLYSPQIKNEKRIHNLVIASSESSEL

SEQ ID NO: 873505 - protein, 96 aa, Homo sapiens
MAFSQHTISALVPRITHFSLGPFTFLFSSPGHRLLLKAILSGPGANPLAASSEFLGFPPTLCLPSMGSPGDFLPGFHFLSIPVLFTCSSAGRASSP

SEQ ID NO: 873506 - protein, 219 aa, Homo sapiens
MASMGTLAFDEYGRPFLIIKDQDRKSRLMGLEALKSHIMAAKAVANTMRTSLGPNGLDYSMMVDKDGDVTVTNDGATILSMMDVDHQIAKLMVELSKSQDDEHWRWNHRSGCPGWCLVRNEAEQWLDRGSAPNQNERLAMRQAARVTTEHLDKISDETSLVDIKDTKPLQFRHSKNQSWAPKVDTQRITDQHGMKNGREVPSSTWRHETGGAETKTEET

SEQ ID NO: 873507 - protein, 260 aa, Homo sapiens
MSATGPISNYYVDSLISHDNEDLLASRFPATGAHPAAARPSGLVPDCSDFPSCSFAPKPAVFSTSWAPVPSQSSVVYHPYGPQPHLGADTRYMRTWLEPLSGAVSFPSFPAGGRHYALKPDAYPGRRADCGPGEGRSYPDYMYGSPGELRDRAPQTLPSPEADALAGSKHKEEKADLDPSNPVANWIHARSTRKKRCPYTKYQTLELEKEFLFNMYLTRDRRYEVARVLNLTERQVKIWFQNRRMKMKKMNKEKTDKEQS

SEQ ID NO: 873508 - protein, 260 aa, Homo sapiens; identical to SEQ ID NO: 873507

SEQ ID NO: 873509 - protein, 102 aa, Homo sapiens
MNYLMAYISSQFYYNDKCYRTLTINMLFLRPKGKLNHNTLTVQIASGKTETETQACLITTAAVFTAAGAGKVTKSAQKAQKLDEFIPNTCHPTLNQWWKNGL

SEQ ID NO: 873510 - protein, 137 aa, Homo sapiens
LGPAHVMAPEENAGTELLLQSLERRFLAARALRSFPWQSLEAKLRDSSDSELLRDILQKTCCIAQKPSCRWSGSCGGWLPAGSTSGLLKSMWPLPSATQRRASCSPLSYAGLGSDGKWNLVMTRNCFPTKSTWRWQC

SEQ ID NO: 873511 - protein, 128 aa, Homo sapiens
  misc_feature (5)..(6): Xaa can be any naturally occurring amino acid
CRLYXXGVWDIGLERRFLAARALRSFPWQSLEAKLRDSSDSELLRDILQKTCCIAQKPSCRWSGSCGGWLPAGSTSGLLKSMWPLPSATQRRASCSPLSYAGLGSDGKWNLVMTRNCFPTKSTWRWQC

SEQ ID NO: 873512 - protein, 87 aa, Homo sapiens
LGPAHVMAPEENAGTELLLQSLERRFLAARALRSFPWQSLEAKLRDSSDSELLRDILQKAGLGSDGKWNLVMTRNCFPTKSTWRWQC

SEQ ID NO: 873513 - protein, 119 aa, Homo sapiens
MALVPWQGWGPIKCTSILMPVTRGWFSHLMPGAPLQQKAREGAELLVLQSWPQHAQAGLSGHLLYHPHQWHTGPRVLLCPGVADPFPSLPGEPTHHRQAPDLGGDHPQRPRRSPVELRV

SEQ ID NO: 873514 - protein, 621 aa, Homo sapiens
MEHIRTTKVEQVKLLDRFSTSNKSLTGTLYLTATHLLFIDSHQKETWILHHHIASVEKLALTTSGCPLVIQCKNFRTVHFIVPRERDCHDIYNSLLQLSKQAKYEDLYAFSYNPKQNDSERLQGWQLIDLAEEYKRMGVPNSHWQLSDANRDYKICETYPRELYVPRIASKPIIVGSSKFRSKGRFPVLSYYHQDKEAAICRCSQPLSGFSARCLEDEHLLQAISKANPVNRYMYVMDTRPKLNAMANRAAGKGYENEDNYSNIRFQFVGIENIHVMRSSLQKLLEVNGTKGLSVNDFYSGLESSGWLRHIKAVMDAAVFLAKAITVENASVLVHCSDGWDRTSQVCSLGSLLLDSYYRTIKGFMVLIEKDWISFGHKFSERCGQLDGDPKEVSPVFTQFLECVWHLTEQFPQAFEFSEAFLLQIHEHIHSCQFGNFLGNCQKEREELKLKEKTYSLWPFLLEDQKKYLNPLYSSESHRFTVLEPNTVSFNFKFWRNMYHQFDRTLHPRQSVFNIIMNMNEQNKQLEKDIKDLESKIKQRKNKQTDGILTKELLHSVHPESPNLKTSLCFKEQTLLPVNDALRTIEGSSPADNRYSEYAEEFSKSEPAVVSLEYGVARMTC

SEQ ID NO: 873515 - protein, 621 aa, Homo sapiens; identical to SEQ ID NO: 873514

SEQ ID NO: 873516 - protein, 229 aa, Homo sapiens
MEHIRTTKVEQVKLLDRFSTSNKSLTGTLYLTATHLLFIDSHQKETWILHHHIASVEKLALTTSGCPLVIQCKNFRTVHFIVPRERDCHDIYNSLLQLSKQAKYEDLYAFSYNPKQNDSERLQGWQLIDLAEEYKRMGVPNSHWQLSDANRDYKICETYPRELYVPRIASKPIIVGSSKFRSKGRFPVLSYYHQDKEGGNCRWSLATSLGIRAQVPWKGENIWLLGPYR

SEQ ID NO: 873517 - protein, 621 aa, Homo sapiens; identical to SEQ ID NO: 873514

SEQ ID NO: 873518 - protein, 621 aa, Homo sapiens; identical to SEQ ID NO: 873514

SEQ ID NO: 873519 - protein, 166 aa, Homo sapiens
MEHIRTTKVEQVKLLDRFSTSNKSLTGTLYLTATHLLFIDSHQKETWILHHHIASVEKLALTTSGCPLVIQCKNFRTVHFIVPRERDCHDIYNSLLQLSKQAKYEDLYAFSYNPKQNDSERLQGWQLIDLAEEYKRMGVPNSHWQLSDANRDYKAPATMPSQFLYF

SEQ ID NO: 873520 - protein, 730 aa, Homo sapiens
LRLDLRRPQPRCSGRPASAGKSAPPLPPPSAARAPRSRRRRRAETPRLRLGAPSRTWRTRPQARSVLDPAGLRSPVLGPVPRAAMSFLSRQQPPPPRRAGAACTLRQKLIFSPCSDCEEEEEEEEEEGSGHSTGEDSAFQEPDSPLPPARSPTEPGPERRRSPGPAPGSPGELEEDLLLPGACPGADEAGGGAEGDSWEEEGFGSSSPVKSPAAPYFLGSSFSPVRCGGPGDASPRGCGARRAGEGRRSPRPDHPGTPPHKTFRKLRLFDTPHTPKSLLSKARGIDSSSVKLRGSSLFMDTEKSGKREFDVRQTPQVNINPFTPDSLLLHSSGQCRRRKRTYWNDSCGEDMEASDYELEDETRPAKRITITESNMKSRYTTEFHELEKIGSGEFGSVFKCVKRLDGCIYAIKRSKKPLAGSVDEQNALREVYAHAVLGQHSHVVRYFSAWAEDDHMLIQNEYCNGGSLADAISENYRIMSYFKEAELKDLLLQVGRGLRYIHSMSLVHMDIKPSNIFISRTSIPNAASEEGDEDDWASNKVMFKIGDLGHVTRISSPQVEEGDSRFLANEVLQENYTHLPKADIFALALTVVCAAGAEPLPRNGDQWHEIRQGRLPRIPQVLSQEFTELLKVMIHPDPERRPSAMALVKHSVLLSASRKSAEQLRIELNAEKFKNSLLQKELKKAQMAKAAAEERALFTDRMATRSTTQSNRTSRLIGKKMNRSVSLTIY

SEQ ID NO: 873521 - protein, 730 aa, Homo sapiens; identical to SEQ ID NO: 873520

SEQ ID NO: 873522 - protein, 730 aa, Homo sapiens; identical to SEQ ID NO: 873520

SEQ ID NO: 873523 - protein, 432 aa, Homo sapiens
MDTEKSGKREFDVRQTPQVNINPFTPDSLLLHSSGQCRRRKRTYWNDSCGEDMEASDYELEDETRPAKRITITESNMKSRYTTEFHELEKIGSGEFGSVFKCVKRLDGCIYAIKRSKKPLAGSVDEQNALREVYAHAVLGQHSHVVRYFSAWAEDDHMLIQNEYCNGGSLADAISENYRIMSYFKEAELKDLLLQVGRGLRYIHSMSLVHMDIKPSNIFISRTSIPNAASEEGDEDDWASNKVMFKIGDLGHVTRISSPQVEEGDSRFLANEVLQENYTHLPKADIFALALTVVCAAGAEPLPRNGDQWHEIRQGRLPRIPQVLSQEFTELLKVMIHPDPERRPSAMALVKHSVLLSASRKSAEQLRIELNAEKFKNSLLQKELKKAQMAKAAAEERALFTDRMATRSTTQSNRTSRLIGKKMNRSVSLTIY

SEQ ID NO: 873524 - protein, 417 aa, Homo sapiens
RSPTPAPPLARRAPAEGEGGTGRRRKRTYWNDSCGEDMEASDYELEDETRPAKRITITESNMKSRYTTEFHELEKIGSGEFGSVFKCVKRLDGCIYAIKRSKKPLAGSVDEQNALREVYAHAVLGQHSHVVRYFSAWAEDDHMLIQNEYCNGGSLADAISENYRIMSYFKEAELKDLLLQVGRGLRYIHSMSLVHMDIKPSNIFISRTSIPNAASEEGDEDDWASNKVMFKIGDLGHVTRISSPQVEEGDSRFLANEVLQENYTHLPKADIFALALTVVCAAGAEPLPRNGDQWHEIRQGRLPRIPQVLSQEFTELLKVMIHPDPERRPSAMALVKHSVLLSASRKSAEQLRIELNAEKFKNSLLQKELKKAQMAKAAAEERALFTDRMATRSTTQSNRTSRLIGKKMNRSVSLTIY

SEQ ID NO: 873525 - protein, 76 aa, Homo sapiens
IMYSDDEEKKHEEMKKALNAEEARLLHVKGDHADLMRGKRPYNSMYETREPTEEELEAYRMKRQRPDDPMASFLGQ

SEQ ID NO: 873526 - protein, 549 aa, Homo sapiens
MSFLSRQQPPPPRRAGAACTLRQKLIFSPCSDCEEEEEEEEEEGSGHSTGEDSAFQEPDSPLPPARSPTEPGPERRRSPGPAPGSPGELEEDLLLPGACPGADEAGGGAEGDSWEEEGFGSSSPVKSPAAPYFLGSSFSPVRCGGPGDASPRGCGARRAGEGRRSPRPDHPGTPPHKTFRKLRLFDTPHTPKSLLSKARGIDSSSVKLRGSSLFMDTEKSGKREFDVRQTPQVNINPFTPDSLLLHSSGQCRRRKRTYWNDSCGEDMEASDYELEDETRPAKRITITESNMKSRYTTEFHELEKIGSGEFGSVFKCVKRLDGCIYAIKRSKKPLAGSVDEQNALREVYAHAVLGQHSHVVRYFSAWAEDDHMLIQNEYCNGGSLADAISENYRIMSYFKEAELKDLLLQVGRGLRYIHSMSLVHMDIKPSNIFISRTSIPNAASEEGDEDDWASNKVMFKIGDLGHVTRISSPQVEEGDSRFLANEVLQENYTHLPKADIFALALTVVCAAGAEPLPRNGDQWHESTGHEFMSSAFIPISYTGDEGPDM

SEQ ID NO: 873527 - protein, 76 aa, Homo sapiens; identical to SEQ ID NO: 873525

SEQ ID NO: 873528 - protein, 730 aa, Homo sapiens; identical to SEQ ID NO: 873520

SEQ ID NO: 873529 - protein, 252 aa, Homo sapiens
MSYFKEAELKDLLLQVGRGLRYIHSMSLVHMDIKPSNIFISRTSIPNAASEEGDEDDWASNKVMFKIGDLGHVTRISSPQVEEGDSRFLANEVLQENYTHLPKADIFALALTVVCAAGAEPLPRNGDQWHEIRQGRLPRIPQVLSQEFTELLKVMIHPDPERRPSAMALVKHSVLLSASRKSAEQLRIELNAEKFKNSLLQKELKKAQMAKAAAEERALFTDRMATRSTTQSNRTSRLIGKKMNRSVSLTIY

SEQ ID NO: 873530 - protein, 529 aa, Homo sapiens
MSFLSRQQPPPPRRAGAACTLRQKLIFSPCSDCEEEEEEEEEEGSGHSTGEDSAFQEPDSPLPPARSPTEPGPERRRSPGPAPGSPGELEEDLLLPGACPGADEAGGGAEGDSWEEEGFGSSSPVKSPAAPYFLGSSFSPVRCGGPGDASPRGCGARRAGEGRRSPRPDHPGTPPHKTFRKLRLFDTPHTPKSLLSKARGIDSSSVKLRGSSLFMDTEKSGKREFDVRQTPQVNINPFTPDSLLLHSSGQCRRRKRTYWNDSCGEDMEASDYELEDETRPAKRITITESNMKSRYTTEFHELEKIGSGEFGSVFKCVKRLDGCIYAIKRSKKPLAGSVDEQNALREVYAHAVLGQHSHVVRYFSAWAEDDHMLIQNEYCNGGSLADAISENYRIMSYFKEAELKDLLLQVGRGLRYIHSMSLVHMDIKPSNIFISRTSIPNAASEEGDEDDWASNKVMFKIGDLGHVTRISSPQVEEGDSRFLANEVLQEWYVLLVLNLFREMEINGMKSDRVDYLGYHKCFPKNLQSC

SEQ ID NO: 873531 - protein, 688 aa, Homo sapiens
  misc_feature (681)..(681): Xaa can be any naturally occurring amino acid
  misc_feature (686)..(686): Xaa can be any naturally occurring amino acid
LRLDLRRPQPRCSGRPASAGKSAPPLPPPSAARAPRSRRRRRAETPRLRLGAPSRTWRTRPQARSVLDPAGLRSPVLGPVPRAAMSFLSRQQPPPPRRAGAACTLRQKLIFSPCSDCEEEEEEEEEEGSGHSTGEDSAFQEPDSPLPPARSPTEPGPERRRSPGPAPGSPGELEEDLLLPGACPGADEAGGGAEGDSWEEEGFGSSSPVKSPAAPYFLGSSFSPVRCGGPGDASPRGCGARRAGEGRRSPRPDHPGTPPHKTFRKLRLFDTPHTPKSLLSKARGIDSSSVKLRGSSLFMDTEKSGKREFDVRQTPQVNINPFTPDSLLLHSSGQCRRRKRTYWNDSCGEDMEASDYELEDETRPAKRITITESNMKSRYTTEFHELEKIGSGEFGSVFKCVKRLDGCIYAIKRSKKPLAGSVDEQNALREVYAHAVLGQHSHVVRYFSAWAEDDHMLIQNEYCNGGSLADAISENYRIMSYFKEAELKDLLLQVGRGLRYIHSMSLVHMDIKPSNIFISRTSIPNAASEEGDEDDWASNKVMFKIGDLGHVTRISSPQVEEGDSRFLANEVLQENYTHLPKADIFALALTVVCAAGAEPLPRNGDQWHEIRQGRLPRIPQVLSQEFTELLKVMIHPDPERRPSAMALVKHSVLLSASRKSAEQLRIELNAEKFKNSLLQKXNSKEXAQ

SEQ ID NO: 873532 - protein, 79 aa, Homo sapiens
TRSPTGWPWSDFFRTLIAAILYLITSIVVLVERGNHSKIVAGVLGLIATCLFGYDAYVTFPVRQPRHTAAPTDPADGPV

SEQ ID NO: 873533 - protein, 152 aa, Homo sapiens
MADSERLSAPGCWAACTNFSRTRKGILLFAEIILCLVILICFSASTPGYSSLSVIEMILAAIFFVVYMCDLHTKIPFINWPWSDFFRTLIAAILYLITSIVVLVERGNHSKIVAGVLGLIATCLFGYDAYVTFPVRQPRHTAAPTDPADGPV

SEQ ID NO: 873534 - protein, 125 aa, Homo sapiens [sequence omitted]

SEQ ID NO: 873535 - protein, 79 aa, Homo sapiens; identical to SEQ ID NO: 873532

SEQ ID NO: 873536 - protein, 152 aa, Homo sapiens; identical to SEQ ID NO: 873533

SEQ ID NO: 873537 - protein, 152 aa, Homo sapiens; identical to SEQ ID NO: 873533

SEQ ID NO: 873538 - protein, 244 aa, Homo sapiens
  misc_feature (139)..(139): Xaa can be any naturally occurring amino acid
AGGPFPDKMAGKIGEGVAAFRRIARASEQMLSEAARWESKVAMPMVGFVMLPSSWFTLALRGCTVVLATFVVGIVEESGEIRPGFGVEDLIVNGAWVDSVKSWHCRFDAHIDLVDIASFTLLRLNLEALDSRLSEAEYXIVMWLWLLTEWVGASLGQRTQRMTQVASPSWGAWEWNFFRTLIAAILYLITSIVVLVERGNHSKIVAGVLGLIATCLFGYDAYVTFPVRQPRHTAAPTDPADGPV

SEQ ID NO: 873539 - protein, 92 aa, Homo sapiens
MADSERLSAPGCWAACTNFSRTRKGILLFAEIILCLVILICFSASTPGYSSLSVIEMILAAIFFVVYMCDLHTKIPFINWPWSVRRRPPEQT

SEQ ID NO: 873540 - protein, 112 aa, Homo sapiens
WLGVRGLLRGQREKGKGSLKGTNANSGLVLVLRAFVPIGTISFGILVCKMFMDFGSCFKKWAYRFSQCFLSFPHLQTPQMARCRRTSLISLCNLQITPPLEITSHIPTPTTT

SEQ ID NO: 873541 - protein, 152 aa, Homo sapiens; identical to SEQ ID NO: 873533

SEQ ID NO: 873542 - protein, 152 aa, Homo sapiens; identical to SEQ ID NO: 873533

SEQ ID NO: 873543 - protein, 152 aa, Homo sapiens; identical to SEQ ID NO: 873533

SEQ ID NO: 873544 - protein, 152 aa, Homo sapiens; identical to SEQ ID NO: 873533

SEQ ID NO: 873545 - protein, 152 aa, Homo sapiens; identical to SEQ ID NO: 873533

SEQ ID NO: 873546 - protein, 141 aa, Homo sapiens
MADSERLSAPGCWAACTNFSRTRKGILLFAEIILCLVILICFSASTPGYSSLSVIEMILAAIFFVVYMCDLHTKIPFINWPWSDFFRTLIAAILYLITSIVVLVERGNHSKIVAGYWANRSALVELCTSVGAEESHAEMAV

SEQ ID NO: 873547 - protein, 145 aa, Homo sapiens
MADSERLSAPGCWAACTNFSRTRKGILLFAEIILCLVILICFSASTPGYSSLSVIEMILAAIFFVVYMCDLHTKIPFINWPWSDFFRTLIAAILYLITSIVVLVERGNHSKIVAGVKAMGAALKHRAKGLRSQGPFLPLLLAEIV

SEQ ID NO: 873548 - protein, 92 aa, Homo sapiens
VAGADLEDPKLNKPYKIPNTELIHQSSPLLKSELVKEVTKSVEEAQLAQEVKVNIIQEEYQEYRQTKGRSLYTLLEEIRDLALLDVSNNYGI

SEQ ID NO: 873549 - protein, 123 aa, Homo sapiens
KQSLLILDSCAQPFFTCRPDGKLLSSDVTHYVIPDWKVVQDYLEILEFPELKGIIFMQTACQAVQHQRGRRQYNKLRNLLKDARHDCILFANEFQQCCYLPRERGESMEKWQTRKTPGHFTNG

SEQ ID NO: 873550 - protein, 1047 aa, Homo sapiens
VLLLRTFQGRTLRIVREHYLRPCVPCHSPLCPQPAACSHDGKLLSSDVTHYVIPDWKVVQDYLEILEFPELKGIIFMQTACQAVQHQRGRRQYNKLRNLLKDARHDCILFANEFQQCCYLPRERGESMEKWQTRSIYNAAVWYYHHCQDRMPIVMVTEDEEAIQQYGSETEGVFVITFKNYLDNFWPDLKAAHELCDSILQSRRERENESQESHGKEYPEHLPLEVLEAGIKSGRYIQGILNVNKHRAQIEAFVRLQGASSKDSDLVSDILIHGMKARNRSIHGDVVVVELLPKNEWKGRTVALCENDCDDKASGESPSEPMPTGRVVGILQKNWRDYVVTFPSKEEVQSQGKNAQKILVTPWDYRIPKIRISTQQAETLQDFRVVVRIDSWESTSVYPNGHFVRVLGRIGDLEGEIATILVENSISVIPFSEAQMCEMPVNTPESPWKVSPEEEQKRKDLRKSHLVFSIDPKGCEDVDDTLSVRTLNNGNLELGVHIADVTHFVAPNSYIDIEARTRATTYYLADRRYDMLPSVLSADLCSLLGGVDRYAVSIMWELDKASYEIKKVWYGRTIIRSAYKLFYEAAQELLDGNLSVVDDIPEFKDLGEKSRQAKLEELVWAIGKLTDIARHVRAKRDGCGALELEGVEVCVQLDDKKNIHDLIPKQPLEVHETVAECMILANHWVAKKIWESFPHQALLRQHPPPHQEFFSELRECAKAKGFFIDTRSNKTLADSLDNANDPHDPIVNRLLRSMATQAMSNALYFSTGSCAEEEFHHYGLALDKYTHFTSPIRRYSDIVVHRLLMAAISKDKKMEIKGNLFSNKDLEELCRHINNRNQAAQHSQKQSTELFQCMYFKDKDPATEERCISDGVIYSIRTNGVLLFIPRFGIKGAAYLKNKDGLVISCGPDSCSEWKPGSLQRFQNKITSTTTDGESVTFHLFDHVTVRISIQASRCHSDTIRLEIISNKPYKIPNTELIHQSSPLLKSELVKEVTKSVEEAQLAQEVKVNIIQEEYQEYRQTKGRSLYTLLEEIRDLALLDVSNNYGI

SEQ ID NO: 873551 - protein, 1088 aa, Homo sapiens
VLLLRTFQGRTLRIVREHYLRPCVPCHSPLCPQPAACSHDGKLLSSDVTHYVIPDWKVVQDYLEILEFPELKGIIFMQTACQAVQHQRGRRDRVSFCSSGWSSVDNHSSLQPQTPGLKGPSCLSLPRSWNYRQYNKLRNLLKDARHDCILFANEFQQCCYLPRERGESMEKWQTRSIYNAAVWYYHHCQDRMPIVMVTEDEEAIQQYGSETEGVFVITFKNYLDNFWPDLKAAHELCDSILQSRRERENESQESHGKEYPEHLPLEVLEAGIKSGRYIQGILNVNKHRAQIEAFVRLQGASSKDSDLVSDILIHGMKARNRSIHGDVVVVELLPKNEWKGRTVALCENDCDDKASGESPSEPMPTGRVVGILQKNWRDYVVTFPSKEEVQSQGKNAQKILVTPWDYRIPKIRISTQQAETLQDFRVVVRIDSWESTSVYPNGHFVRVLGRIGDLEGEIATILVENSISVIPFSEAQMCEMPVNTPESPWKVSPEEEQKRKDLRKSHLVFSIDPKGCEDVDDTLSVRTLNNGNLELGVHIADVTHFVAPNSYIDIEARTRATTYYLADRRYDMLPSVLSADLCSLLGGVDRYAVSIMWELDKASYEIKKVWYGRTIIRSAYKLFYEAAQELLDGNLSVVDDIPEFKDLGEKSRQAKLEELVWAIGKLTDIARHVRAKRDGCGALELEGVEVCVQLDDKKNIHDLIPKQPLEVHETVAECMILANHWVAKKIWESFPHQALLRQHPPPHQEFFSELRECAKAKGFFIDTRSNKTLADSLDNANDPHDPIVNRLLRSMATQAMSNALYFSTGSCAEEEFHHYGLALDKYTHFTSPIRRYSDIVVHRLLMAAISKDKKMEIKGNLFSNKDLEELCRHINNRNQAAQHSQKQSTELFQCMYFKDKDPATEERCISDGVIYSIRTNGVLLFIPRFGIKGAAYLKNKDGLVISCGPDSCSEWKPGSLQRFQNKITSTTTDGESVTFHLFDHVTVRISIQASRCHSDTIRLEIISNKPYKIPNTELIHQSSPLLKSELVKEVTKSVEEAQLAQEVKVNIIQEEYQEYRQTKGRSLYTLLEEIRDLALLDVSNNYGI

SEQ ID NO: 873552 - protein, 953 aa, Homo sapiens
MQTACQAVQHQRGRRQYNKLRNLLKDARHDCILFANEFQQCCYLPRERGESMEKWQTRSIYNAAVWYYHHCQDRMPIVMVTEDEEAIQQYGSETEGVFVITFKNYLDNFWPDLKAAHELCDSILQSRRERENESQESHGKEYPEHLPLEVLEAGIKSGRYIQGILNVNKHRAQIEAFVRLQGASSKDSDLVSDILIHGMKARNRSIHGDVVVVELLPRLRASPQVSPCLQVEWWAYFKKNWRDYVVTFPSKEEVQSQGKNAQKILVTPWDYRIPKIRISTQQAETLQDFRVVVRIDSWESTSVYPNGHFVRVLGRIGDLEGEIATILVENSISVIPFSEAQMCEMPVNTPESPWKVSPEEEQKRKDLRKSHLVFSIDPKGCEDVDDTLSVRTLNNGNLELGVHIADVTHFVAPNSYIDIEARTRATTYYLADRRYDMLPSVLSADLCSLLGGVDRYAVSIMWELDKASYEIKKVWYGRTIIRSAYKLFYEAAQELLDGNLSVVDDIPEFKDLGEKSRQAKLEELVWAIGKLTDIARHVRAKRDGCGALELEGVEVCVQLDDKKNIHDLIPKQPLEVHETVAECMILANHWVAKKIWESFPHQALLRQHPPPHQEFFSELRECAKAKGFFIDTRSNKTLADSLDNANDPHDPIVNRLLRSMATQAMSNALYFSTGSCAEEEFHHYGLALDKYTHFTSPIRRYSDIVVHRLLMAAISKDKKMEIKGNLFSNKDLEELCRHINNRNQAAQHSQKQSTELFQCMYFKDKDPATEERCISDGVIYSIRTNGVLLFIPRFGIKGAAYLKNKDGLVISCGPDSCSEWKPGSLQRFQNKITSTTTDGESVTFHLFDHVTVRISIQASRCHSDTIRLEIISNKPYKIPNTELIHQSSPLLKSELVKEVTKSVEEAQLAQEVKVNIIQEEYQEYRQTKGRSLYTLLEEIRDLALLDVSNNYGI

SEQ ID NO: 873553 - protein, 912 aa, Homo sapiens
MQTACQAVQHQRGRRQYNKLRNLLKDARHDCILFANEFQQCCYLPRERGESMEKWQTRSIYNAAVWYYHHCQDRMPIVMVTEDEEAIQQYGSETEGVFVITFKGILNVNKHRAQIEAFVRLQGASSKDSDLVSDILIHGMKARNRSIHGDVVVVELLPKNEWKGRTVALCENDCDDKASGESPSEPMPTGRVVGILQKNWRDYVVTFPSKEEVQSQGKNAQKILVTPWDYRIPKIRISTQQAETLQDFRVVVRIDSWESTSVYPNGHFVRVLGRIGDLEGEIATILVENSISVIPFSEAQMCEMPVNTPESPWKVSPEEEQKRKDLRKSHLVFSIDPKGCEDVDDTLSVRTLNNGNLELGVHIADVTHFVAPNSYIDIEARTRATTYYLADRRYDMLPSVLSADLCSLLGGVDRYAVSIMWELDKASYEIKKVWYGRTIIRSAYKLFYEAAQELLDGNLSVVDDIPEFKDLGEKSRQAKLEELVWAIGKLTDIARHVRAKRDGCGALELEGVEVCVQLDDKKNIHDLIPKQPLEVHETVAECMILANHWVAKKIWESFPHQALLRQHPPPHQEFFSELRECAKAKGFFIDTRSNKTLADSLDNANDPHDPIVNRLLRSMATQAMSNALYFSTGSCAEEEFHHYGLALDKYTHFTSPIRRYSDIVVHRLLMAAISKDKKMEIKGNLFSNKDLEELCRHINNRNQAAQHSQKQSTELFQCMYFKDKDPATEERCISDGVIYSIRTNGVLLFIPRFGIKGAAYLKNKDGLVISCGPDSCSEWKPGSLQRFQNKITSTTTDGESVTFHLFDHVTVRISIQASRCHSDTIRLEIISNKPYKIPNTELIHQSSPLLKSELVKEVTKSVEEAQLAQEVKVNIIQEEYQEYRQTKGRSLYTLLEEIRDLALLDVSNNYGI

SEQ ID NO: 873554 - protein, 234 aa, Homo sapiens
MEIKGNLFSNKDLEELCRHINNRNQAAQHSQKQSTELFQCMYFKDKDPATEERCISDGVIYSIRTNGVLLFIPRFGIKGAAYLKNKDGLVISCGPDSCSEWKPGSLQRFQNKITSTTTDGESVTFHLFDHVTVRISIQASRCHSDTIRLEIISNKPYKIPNTELIHQSSPLLKSELVKEVTKSVEEAQLAQEVKVNIIQEEYQEYRQTKGRSLYTLLEEIRDLALLDVSNNYGI

SEQ ID NO: 873555 - protein, 776 aa, Homo sapiens
MQTACQAVQHQRGRRQYNKLRNLLKDARHDCILFANEFQQCCYLPRERGESMEKWQTRSIYNAAVWYYHHCQDRMPIVMVTEDEEAIQQYGSETEGVFVITFKNYLDNFWPDLKAAHELCDSILQSRRERENESQESHGKEYPEHLPLEVLEAGIKSGRYIQGILNVNKHRAQIEAFVRLQGASSKDSDLVSDILIHGMKARNRSIHGDVVVVELLPKNEWKGRTVALCENDCDDKASGESPSEPMPTGRVVGILQKNWRDYVVTFPSKEEVQSQGKNAQKILVTPWDYRIPKIRISTQQAETLQDFRVVVRIDSWESTSVYPNGHFVRVLGRIGDLEGEIATILVENSISVIPFSEAQMCEMPVNTPESPWKVSPEEEQKRKDLRKSHLVFSIDPKGCEDVDDTLSVRTLNNGNLELGVHIADVTHFVAPNSYIDIEARTRATTYYLADRRYDMLPSVLSADLCSLLGGVDRYAVSIMWELDKASYEIKKVWYGRTIIRSAYKLFYEAAQELLDGNLSVVDDIPEFKDLGEKSRQAKLEELVWAIGKLTDIARHVRAKRDGCGALELEGVEVCVQLDDKKNIHDLIPKQPLEVHETVAECMILANHWVAKKIWESFPHQALLRQHPPPHQEFFSELRECAKAKGFFIDTRSNKTLADSLDNANDPHDPIVNRLLRSMATQAMSNALYFSTGSCAEEEFHHYGLALDKYTHFTSPIRRYSDIVVHRLLMAAISKDKKMEIKGNLFSNKDLEELCRHINNRNQVRGNFKILLPVISC

SEQ ID NO: 873556 - protein, 160 aa, Homo sapiens
MEIKGNLFSNKDLEELCRHINNRNQAAQHSQKQSTELFQCMYFKDKDPATEERCISDGVIYSIRTNGVLLFIPRFGIKGAAYLKNKDGLVISCGPDSCSEWKPGSLQRFQNKITSTTTDGESVTFHLFDHVTVRISIQASRCHSDTIRLEIISGRQSGVP

SEQ ID NO: 873557 - protein, 71 aa, Homo sapiens
KEKALLAGVLIRLRVYHARNASLVCHSLGFMGFFCAAPNTDLVSDILIHGMKARNRSIHGDVVVVELLPRA

SEQ ID NO: 873558 - protein, 971 aa, Homo sapiens
MQTACQAVQHQRGRRQYNKLRNLLKDARHDCILFANEFQQCCYLPRERGESMEKWQTRSIYNAAVWYYHHCQDRMPIVMVTEDEEAIQQYGSETEGVFVITFKNYLDNFWPDLKAAHELCDSILQSRRERENESQESHGKEYPEHLPLEVLEAGIKSGRYIQGILNVNKHRAQIEAFVRLQGASSKDSDLVSDILIHGMKARNRSIHGDVVVVELLPKNEWKGRTVALCENDCDDKASGESPSEPMPTGRVVGILQKNWRDYVVTFPSKEEVQSQGKNAQKILVTPWDYRIPKIRISTQQAETLQDFRVVVRIDSWESTSVYPNGHFVRVLGRIGDLEGEIATILVENSISVIPFSEAQMCEMPVNTPESPWKVSPEEEQKRKDLRKSHLVFSIDPKGCEDVDDTLSVRTLNNGNLELGVHIADVTHFVAPNSYIDIEARTRATTYYLADRRYDMLPSVLSADLCSLLGGVDRYAVSIMWELDKASYEIKKVWYGRTIIRSAYKLFYEAAQELLDGNLSVVDDIPEFKDLGEKSRQAKLEELVWAIGKLTDIARHVRAKRDGCGALELEGVEVCVQLDDKKNIHDLIPKQPLEVHETVAECMILANHWVAKKIWESFPHQALLRQHPPPHQEFFSELRECAKAKGFFIDTRSNKTLADSLDNANDPHDPIVNRLLRSMATQAMSNALYFSTGSCAEEEFHHYGLALDKYTHFTSPIRRYSDIVVHRLLMAAISKDKKMEIKGNLFSNKDLEELCRHINNRNQAAQHSQKQSTELFQCMYFKDKDPATEERCISDGVIYSIRTNGVLLFIPRFGIKGAAYLKNKDGLVISCGPDSCSEWKPGSLQRFQNKITSTTTDGESVTFHLFDHVTVRISIQASRCHSDTIRLEIISNKPYKIPNTELIHQSSPLLKSELVKEVTKSVEEAQLAQEVKVNIIQEEYQEYRQTKGRSLYTLLEEIRDLALLDVSNNYGI

SEQ ID NO: 873559 - protein, 1004 aa, Homo sapiens
VLLLRTFQGRTLRIVREHYLRPCVPCHSPLCPQPAACSHDGKLLSSDVTHYVIPDWKVVQDYLEILEFPELKGIIFMQTACQAVQHQRGRRSIYNAAVWYYHHCQDRMPIVMVTEDEEAIQQYGSETEGVFVITFKNYLDNFWPDLKAAHELCDSILQSRRERENESQESHGKEYPEHLPLEVLEAGIKSGRYIQGILNVNKHRAQIEAFVRLQGASSKDSDLVSDILIHGMKARNRSIHGDVVVVELLPKNEWKGRTVALCENDCDDKASGESPSEPMPTGRVVGILQKNWRDYVVTFPSKEEVQSQGKNAQKILVTPWDYRIPKIRISTQQAETLQDFRVVVRIDSWESTSVYPNGHFVRVLGRIGDLEGEIATILVENSISVIPFSEAQMCEMPVNTPESPWKVSPEEEQKRKDLRKSHLVFSIDPKGCEDVDDTLSVRTLNNGNLELGVHIADVTHFVAPNSYIDIEARTRATTYYLADRRYDMLPSVLSADLCSLLGGVDRYAVSIMWELDKASYEIKKVWYGRTIIRSAYKLFYEAAQELLDGNLSVVDDIPEFKDLGEKSRQAKLEELVWAIGKLTDIARHVRAKRDGCGALELEGVEVCVQLDDKKNIHDLIPKQPLEVHETVAECMILANHWVAKKIWESFPHQALLRQHPPPHQEFFSELRECAKAKGFFIDTRSNKTLADSLDNANDPHDPIVNRLLRSMATQAMSNALYFSTGSCAEEEFHHYGLALDKYTHFTSPIRRYSDIVVHRLLMAAISKDKKMEIKGNLFSNKDLEELCRHINNRNQAAQHSQKQSTELFQCMYFKDKDPATEERCISDGVIYSIRTNGVLLFIPRFGIKGAAYLKNKDGLVISCGPDSCSEWKPGSLQRFQNKITSTTTDGESVTFHLFDHVTVRISIQASRCHSDTIRLEIISNKPYKIPNTELIHQSSPLLKSELVKEVTKSVEEAQLAQEVKVNIIQEEYQEYRQTKGRSLYTLLEEIRDLALLDVSNNYGI

SEQ ID NO: 873560 - protein, 910 aa, Homo sapiens
MQTACQAVQHQRGRRSIYNAAVWYYHHCQDRMPIVMVTEDEEAIQQYGSETEGVFVITFKNYLDNFWPDLKAAHELCDSILQSRRERENESQESHGKEYPEHLPLEVLEAGIKSGRYIQGILNVNKHRAQIEAFVRLQGASSKDSDLVSDILIHGMKARNRSIHGDVVVVELLPRLRASPQVSPCLQVEWWAYFKKNWRDYVVTFPSKEEVQSQGKNAQKILVTPWDYRIPKIRISTQQAETLQDFRVVVRIDSWESTSVYPNGHFVRVLGRIGDLEGEIATILVENSISVIPFSEAQMCEMPVNTPESPWKVSPEEEQKRKDLRKSHLVFSIDPKGCEDVDDTLSVRTLNNGNLELGVHIADVTHFVAPNSYIDIEARTRATTYYLADRRYDMLPSVLSADLCSLLGGVDRYAVSIMWELDKASYEIKKVWYGRTIIRSAYKLFYEAAQELLDGNLSVVDDIPEFKDLGEKSRQAKLEELVWAIGKLTDIARHVRAKRDGCGALELEGVEVCVQLDDKKNIHDLIPKQPLEVHETVAECMILANHWVAKKIWESFPHQALLRQHPPPHQEFFSELRECAKAKGFFIDTRSNKTLADSLDNANDPHDPIVNRLLRSMATQAMSNALYFSTGSCAEEEFHHYGLALDKYTHFTSPIRRYSDIVVHRLLMAAISKDKKMEIKGNLFSNKDLEELCRHINNRNQAAQHSQKQSTELFQCMYFKDKDPATEERCISDGVIYSIRTNGVLLFIPRFGIKGAAYLKNKDGLVISCGPDSCSEWKPGSLQRFQNKITSTTTDGESVTFHLFDHVTVRISIQASRCHSDTIRLEIISNKPYKIPNTELIHQSSPLLKSELVKEVTKSVEEAQLAQEVKVNIIQEEYQEYRQTKGRSLYTLLEEIRDLALLDVSNNYGI

SEQ ID NO: 873561 - protein, 765 aa, Homo sapiens
MQTACQAVQHQRGRRQYNKLRNLLKDARHDCILFANEFQQCCYLPRERGESMEKWQTRSIYNAAVWYYHHCQDRMPIVMVTEDEEAIQQYGSETEGVFVITFKNYLDNFWPDLKAAHELCDSILQSRRERENESQESHGKEYPEHLPLEVLEAGIKSGRYIQGILNVNKHRAQIEAFVRLQGASSKDSDLVSDILIHGMKARNRSIHGDVVVVELLPKNEWKGRTVALCENDCDDKASGESPSEPMPTGRVVGILQKNWRDYVVTFPSKEEVQSQGKNAQKILVTPWDYRIPKIRISTQQAETLQDFRVVVRIDSWESTSVYPNGHFVRVLGRIGDLEGEIATILVENSISVIPFSEAQMCEMPVNTPESPWKVSPEEEQKRKDLRKSHLVFSIDPKGCEDVDDTLSVRTLNNGNLELGVHIADVTHFVAPNSYIDIEARTRATTYYLADRRYDMLPSVLSADLCSLLGGVDRYAVSIMWELDKASYEIKKVWYGRTIIRSAYKLFYEAAQELLDGNLSVVDDIPEFKDLGEKSRQAKLEELVWAIGKLTDIARHVRAKRDGCGALELEGVEVCVQLDDKKNIHDLIPKQPLEVHETVAECMILANHWVAKKIWESFPHQALLRQHPPPHQEFFSELRECAKAKGFFIDTRSNKTLADSLDNANDPHDPIVNRLLRSMATQAMSNALYFSTGSCAEEEFHHYGLALDKYTHFTSPIRRYSDIVVHRLLMAAISKDKKMEIKGNLFSNKDLEELCRHINNRNQVEM

SEQ ID NO: 873562 - protein, 119 aa, Homo sapiens
GAFIQRIIQKTPNCKKQCFWQQIKEASFFPSLTCLLRYNIQESTQIFFSLINFCVTTIQIKVQNLFSSPEISMCLFLVISSPPQRKLTSVMKVYPGPSFHPQNFLQRNDPRKPISYNNK

SEQ ID NO: 873563 - protein, 358 aa, Homo sapiens
GAEGSLGAERALHGPCTLELMFRVGHFTHVFVDEAGQASEPECLIPLGLMSDISGQIVLAGDPMQLGPVIKSRLAMAYGLNVSFLERLMSRPAYQRDENAFGACGAHNPLLVTKLVKNYRSHEALLMLPSRLFYHRELEVCADPTVVTSLLGWEKLPKKGFPLIFHGVRGSEAREGKSPSWFNPAEAVQVLRYCCLLAHSISSQVSASDIGVITPYRKQVEKIRILLRNVDLMDIKVGSVEEFQGQEYLVIIISTVRSNEDRFEDDRYFLGFLSNSKRFNVAITRPKALLIVLGNPHVLVRDPCFGALLEYSITNGVYMGCDLPPALQSLQNCGEGVADPSYPVVPESTGPEKHQEPS

SEQ ID NO: 873564 - protein, 292 aa, Homo sapiens
GPQSHSVYALLAQGPRSSSFPVAKRRQGCVGQQDAVSRVKLSAHEVTKLVKNYRSHEALLMLPSRLFYHRELEVCADPTVVTSLLGWEKLPKKGFPLIFHGVRGSEAREGKSPSWFNPAEAVQVLRYCCLLAHSISSQVSASDIGVITPYRKQVEKIRILLRNVDLMDIKVGSVEEFQGQEYLVIIISTVRSNEDRFEDDRYFLGFLSNSKRFNVAITRPKALLIVLGNPHVLVRDPCFGALLEYSITNGVYMGCDLPPALQSLQNCGEGVADPSYPVVPESTGPEKHQEPS

SEQ ID NO: 873565 - protein, 86 aa, Homo sapiens
SRVRLGSQAGLTFAVQSRFSFDRNCAGYHLPLVTHHHLLAGHKAGEELPVPRGPADAALTAVLPQGTRGLCGPHSGDLLAGLGEVA

SEQ ID NO: 873566 - protein, 1225 aa, Homo sapiens
SGGGGDGSLGRARAMLSLAAKLVAFFWRTADTPREEAGQLEPELAEGDTKLKTVRGVVTRYCSDYGMIDDMIYFSSDAVTSRVLLNVGQEVIAVVEENKVSNGLKAIRVEAVSDKWEDDSRNHGSPSDCGPRVLIGCVTSLVEGAGCISQTTYFSLESVCEGFEPCKGDWVEAEYRIRPGTWSSEATSVKPLRYKRVDKVCISSLCGRNGVLEESIFFTLDSLKLPDGYTPRRGDVVNAVVVESSQSCYVWRALCMTLVKRRDAAPVHEATHFYGTILLKNKGDIEVTQVTHFGTLKEGRSKTMVIWIENKGDIPQNLVSCKLAGWDKSKQFRFQMLDKDQMCPVVSFVSVPEKENSSDENINSLNSHTKNKTSQMSESSLVNNRGISPGDCTCKGENGEKDNILSRKQMTEPEPGGLVPPGGKTFIVVICDGKNPGRCKELLLLCFSDFLIGRYLEVNVISGEESLIAAREPFSWKKLKSSQALTSAKTTVVVTAQKRNSRRQLPSFLPQYPIPDRLRKCVEQKIDILTFQPLLAELLNMSNYKEKFSTLLWLEEIYAEMELKEYNMSGIILRRNGDLLVLEVPGLAEGRPSLYAGDKLILKTQEYNGHAIEYISYVTEIHEEDVTLKINPEFEQAYNFEPMDVEFTYNRTTSRRCHFALEHVIHLGVKVLFPEEIILQSPQVTGNWNHAQDTKSSGQSTSKKNRKTMTDQAEHGTEERRVGDKDLPVLAPFTAEMSDWVDEIQTPKARKMEFFNPVLNENQKLAVKRILSGDCRPLPYILFGPPGTGKTVTIIEAVLQVHFALPDSRILVCAPSNSAADLVCLRLHESKVLQPATMVRVNATCRFEEIVIDAVKPYCRDGEDIWKASRFRIIITTCSSSGLFYQIGVRVGHFTHVFVDEAGQASEPECLIPLGLMSDISGQIVLAGDPMQLGPVIKSRLAMAYGLNVSFLERLMSRPAYQRDENAFGACGAHNPLLVTKLVKNYRSHEALLMLPSRLFYHRELEVCADPTVVTSLLGWEKLPKKGFPLIFHGVRGSEAREGKSPSWFNPAEAVQVLRYCCLLAHSISSQVSASDIGVITPYRKQVEKIRILLRNVDLMDIKVGSVEEFQGQEYLVIIISTVRSNEDRFEDDRYFLGFLSNSKRFNVAITRPKALLIVLGNPHVLVRDPCFGALLEYSITNGVYMGCDLPPALQSLQNCGEGVADPSYPVVPESTGPEKHQEPS

SEQ ID NO: 873567 - protein, 1191 aa, Homo sapiens
MSFLPVRSVIGGGDTKLKTVRGVVTRYCSDYGMIDDMIYFSSDAVTSRVLLNVGQEVIAVVEENKVSNGLKAIRVEAVSDKWEDDSRNHGSPSDCGPRVLIGCVTSLVEGAGCISQTTYFSLESVCEGFEPCKGDWVEAEYRIRPGTWSSEATSVKPLRYKRVDKVCISSLCGRNGVLEESIFFTLDSLKLPDGYTPRRGDVVNAVVVESSQSCYVWRALCMTLVKRRDAAPVHEATHFYGTILLKNKGDIEVTQVTHFGTLKEGRSKTMVIWIENKGDIPQNLVSCKLAGWDKSKQFRFQMLDKDQMCPVVSFVSVPEKENSSDENINSLNSHTKNKTSQMSESSLVNNRGISPGDCTCKGENGEKDNILSRKQMTEPEPGGLVPPGGKTFIVVICDGKNPGRCKELLLLCFSDFLIGRYLEVNVISGEESLIAAREPFSWKKLKSSQALTSAKTTVVVTAQKRNSRRQLPSFLPQYPIPDRLRKCVEQKIDILTFQPLLAELLNMSNYKEKFSTLLWLEEIYAEMELKEYNMSGIILRRNGDLLVLEVPGLAEGRPSLYAGDKLILKTQEYNGHAIEYISYVTEIHEEDVTLKINPEFEQAYNFEPMDVEFTYNRTTSRRCHFALEHVIHLGVKVLFPEEIILQSPQVTGNWNHAQDTKSSGQSTSKKNRKTMTDQAEHGTEERRVGDKDLPVLAPFTAEMSDWVDEIQTPKARKMEFFNPVLNENQKLAVKRILSGDCRPLPYILFGPPGTGKTVTIIEAVLQVHFALPDSRILVCAPSNSAADLVCLRLHESKVLQPATMVRVNATCRFEEIVIDAVKPYCRDGEDIWKASRFRIIITTCSSSGLFYQIGVRVGHFTHVFVDEAGQASEPECLIPLGLMSDISGQIVLAGDPMQLGPVIKSRLAMAYGLNVSFLERLMSRPAYQRDENAFGACGAHNPLLVTKLVKNYRSHEALLMLPSRLFYHRELEVCADPTVVTSLLGWEKLPKKGFPLIFHGVRGSEAREGKSPSWFNPAEAVQVLRYCCLLAHSISSQVSASDIGVITPYRKQVEKIRILLRNVDLMDIKVGSVEEFQGQEYLVIIISTVRSNEDRFEDDRYFLGFLSNSKRFNVAITRPKALLIVLGNPHVLVRDPCFGALLEYSITNGVYMGCDLPPALQSLQNCGEGVADPSYPVVPESTGPEKHQEPS

SEQ ID NO: 873568 - protein, 1145 aa, Homo sapiens
MSFLPVRSVIGGGDTKLKTVRGVVTRYCSDYGMIDDMIYFSSDAVTSRVLLNVGQEVIAVVEENKVSNGLKAIRVEAVSDKWEDDSRNHGSPSDCGPRVLIGCVTSLVEGAGCISQTTYFSLESVCEGFEPCKGDWVEAEYRIRPGTWSSEATSVKPLRYKRVDKVCISSLCGRNGVLEESIFFTLDSLKLPDGYTPRRGDVVNAVVVESSQSCYVWRALCMTLVKRRDAAPVHEATHFYGTILLKNKGDIEVTQVTHFGTLKEGRSKTMVIWIENKGDIPQNLVSCKLAGWDKSKQFRFQMLDKDQMCPVVSFVSVPEKENSSDENINSLNSHTKNKTSQMSESSLVNNRGISPGDCTCKGENGEKDNILSRKQMTEPEPGGLVPPGGKTFIVVICDGKNPGRCKELLLLCFSDFLIGRYLEVNVISGEESLIAAREPFSWKKLKSSQALTSAKTTVVVTAQKRNSRRQLPSFLPQYPIPDRLRKCVEQKIDILTFQPLLAELLNMSNYKEKFSTLLWLEEIYAEMELKEYNMSGIILRRNGDLLVLEVPGLAEGRPSLYAGDKLILKTQEYNGHAIEYISYVTEIHEEDVTLKINPEFEQAYNFEPMDVEFTYNRTTSRRCHFALEHVIHLGVKVLFPEEIILQSPQVTGNWNHAQDTKSSGQSTSKKNRKTMTDQAEHGTEERRVGDKDLPVLAPFTAEMSDWVDEIQTPKARKMEFFNPVLNENQKLAVKRILSGDCRPLPYILFGPPGTGKTVTIIEAVLQVHFALPDSRILVCAPSNSAADLVCLRLHESKVLQPATMVRVNATCRFEEIVIDAVKPYCRDGEDIWKASRFRIIITTCSSSGLFYQIGVRVGHFTHVFVDEAGQASEPECLIPLGLMSDISGQIVLAGDPMQLGPVIKSRLAMAYGLNVSFLERLMSRPAYQRDENAFGACGAHNPLLVTKLVKNYRSHEALLMLPSRLFYHRELEVCADPTVVTSLLGWEKLPKKGFPLIFHGVRGSEAREGKSPSWFNPAEAVQVLRYCCLLAHSISSQVSASDIGVITPYRKQVEKIRILLRNVDLMDIKVGSVEEFQGQEYLVIIISTDPCFGALLEYSITNGVYMGCDLPPALQSLQNCGEGVADPSYPVVPESTGPEKHQEPS

SEQ ID NO: 873569 - protein, 96 aa, Homo sapiens
MEQRGAAHIKGARDYIKPRENGEAAATNQKKRRRRRRAGKNTAERRRGGDITLAAEETSTPPPPGRGEGSTPWCGTTHQAPNEGLEEGPAGGPTTG

SEQ ID NO: 873570 - protein, 132 aa, Homo sapiens
MQECLIQLSSIIFKKRHHLYSGLAEVIRVTSTEETELRDELEHPSSPAFGHQNFRFSGLQTSRLALVAPWVLKVLAASVESYTIGFFGSEAVGVGLSHATSFPGSPACRLPTVRFSLHNHVTEYWHVALLKT

SEQ ID NO: 873571 - protein, 141 aa, Homo sapiens
NLNRFYILRLVFINKKRFTGISLPTMLNSRISLAHLPAMTNKEAAFDNAVEEHVIKEEYKIWKNNTSFPYDLVMTQALEWPSLTAQWLPDVTRPEGKDFSSHRLVPGTHTSVEQNHLVQLPSDDAQLDASHYNSKKGECGG

SEQ ID NO: 873572 - protein, 69 aa, Homo sapiens
PGMHLSGKAQRVKDLSVGPYSTVPMGGMICIEIRLPVGRTEVVAGEVGAPLPGEPVESYAQWGGESPRE

SEQ ID NO: 873573 - protein, 56 aa, Homo sapiens
LATFGLELKCWLFLGLKPDQPLNGNSTLSSPGSPACRLTLQILGLARLHNYTSQFL

SEQ ID NO: 873574 - protein, 31 aa, Homo sapiens
MVVAAIQGFARRGLMGRLSASCSQEEVTSQA

SEQ ID NO: 873575 - protein, 252 aa, Homo sapiens
MPTVSVKRDLLFQALGRTYTDEEFDELCFEFGLELDEITSEKEIISKEQGNVKAAGASDVVLYKIDVPANRYDLLCLEGLVRGLQVFKERIKAPVYKRVMPDGKIQKLIITEETAKIRPFAVAAVLRNIKFTKDRYDSFIELQEKLHQNICRKRALVAIGTHDLDTLSGPFTYTAKRPSDIKFKPLNKTKEYTACELMNIYKTDNHLKHYLHIIENKPLYPVIYDSNGVVLSMPPIINGGHPNKGYRTFLMR

SEQ ID NO: 873576 - protein, 589 aa, Homo sapiens
MPTVSVKRDLLFQALGRTYTDEEFDELCFEFGLELDEITSEKEIISKEQGNVKAAGASDVVLYKIDVPANRYDLLCLEGLVRGLQVFKERIKAPVYKRVMPDGKIQKLIITEETAKIRPFAVAAVLRNIKFTKDRYDSFIELQEKLHQNICRKRALVAIGTHDLDTLSGPFTYTAKRPSDIKFKPLNKTKEYTACELMNIYKTDNHLKHYLHIIENKPLYPVIYDSNGVVLSMPPIINGDHSRITVNTRNIFIECTGTDFTKAKIVLDIIVTMFSEYCENQFTVEAAEVVFPNGKSHTFPELAYRKEMVRADLINKKVGIRETPENLAKLLTRMYLKSEVIGDGNQIEIEIPPTRADIIHACDIVEDAAIAYGYNNIQMTLPKTYTIANQFPLNKLTELLRHDMAAAGFTEALTFALCSQEDIADKLGVDISATKAVHISNPKTAEFQVARTTLLPGLLKTIAANRKMPLPLKLFEISDIVIKDSNTDVGAKNYRHLCAVYYNKNPGFEIIHGLLDRIMQLLDVPPGEDKGGYVIKASEGPAFFPGRCAEIFARGQSVGKLGVLHPDVITKFELTMPCSSLEINIGPFL

SEQ ID NO: 873577 - protein, 589 aa, Homo sapiens; identical to SEQ ID NO: 873576

SEQ ID NO: 873578 - protein, 490 aa, Homo sapiens
MPDGKIQKLIITEETAKIRPFAVAAVLRNIKFTKDRYDSFIELQEKLHQNICRKRALVAIGTHDLDTLSGPFTYTAKRPSDIKFKPLNKTKEYTACELMNIYKTDNHLKHYLHIIENKPLYPVIYDSNGVVLSMPPIINGDHSRITVNTRNIFIECTGTDFTKAKIVLDIIVTMFSEYCENQFTVEAAEVVFPNGKSHTFPELAYRKEMVRADLINKKVGIRETPENLAKLLTRMYLKSEVIGDGNQIEIEIPPTRADIIHACDIVEDAAIAYGYNNIQMTLPKTYTIANQFPLNKLTELLRHDMAAAGFTEALTFALCSQEDIADKLGVDISATKAVHISNPKTAEFQVARTTLLPGLLKTIAANRKMPLPLKLFEISDIVIKDSNTDVGAKNYRHLCAVYYNKNPGFEIIHGLLDRIMQLLDVPPGEDKGGYVIKASEGPAFFPGRCAEIFARGQSVGKLGVLHPDVITKFELTMPCSSLEINIGPFL

SEQ ID NO: 873579 - protein, 490 aa, Homo sapiens; identical to SEQ ID NO: 873578

SEQ ID NO: 873580 - protein, 564 aa, Homo sapiens
ISSPGRHPGTIRSTSEKEIISKEQGNVKAAGASDVVLYKIDVPANRYDLLCLEGLVRGLQVFKERIKAPVYKRVMPDGKIQKLIITEETAKIRPFAVAAVLRNIKFTKDRYDSFIELQEKLHQNICRKRALVAIGTHDLDTLSGPFTYTAKRPSDIKFKPLNKTKEYTACELMNIYKTDNHLKHYLHIIENKPLYPVIYDSNGVVLSMPPIINGDHSRITVNTRNIFIECTGTDFTKAKIVLDIIVTMFSEYCENQFTVEAAEVVFPNGKSHTFPELAYRKEMVRADLINKKVGIRETPENLAKLLTRMYLKSEVIGDGNQIEIEIPPTRADIIHACDIVEDAAIAYGYNNIQMTLPKTYTIANQFPLNKLTELLRHDMAAAGFTEALTFALCSQEDIADKLGVDISATKAVHISNPKTAEFQVARTTLLPGLLKTIAANRKMPLPLKLFEISDIVIKDSNTDVGAKNYRHLCAVYYNKNPGFEIIHGLLDRIMQLLDVPPGEDKGGYVIKASEGPAFFPGRCAEIFARGQSVGKLGVLHPDVITKFELTMPCSSLEINIGPFL

SEQ ID NO: 873581 - protein, 392 aa, Homo sapiens
MNIYKTDNHLKHYLHIIENKPLYPVIYDSNGVVLSMPPIINGDHSRITVNTRNIFIECTGTDFTKAKIVLDIIVTMFSEYCENQFTVEAAEVVFPNGKSHTFPELAYRKEMVRADLINKKVGIRETPENLAKLLTRMYLKSEVIGDGNQIEIEIPPTRADIIHACDIVEDAAIAYGYNNIQMTLPKTYTIANQFPLNKLTELLRHDMAAAGFTEALTFALCSQEDIADKLGVDISATKAVHISNPKTAEFQVARTTLLPGLLKTIAANRKMPLPLKLFEISDIVIKDSNTDVGAKNYRHLCAVYYNKNPGFEIIHGLLDRIMQLLDVPPGEDKGGYVIKASEGPAFFPGRCAEIFARGQSVGKLGVLHPDVITKFELTMPCSSLEINIGPFL

SEQ ID NO: 873582 - protein, 450 aa, Homo sapiens
  misc_feature (1)..(1): Xaa can be any naturally occurring amino acid
XKRNDIYNYHGYQKRALVAIGTHDLDTLSGPFTYTAKRPSDIKFKPLNKTKEYTACELMNIYKTDNHLKHYLHIIENKPLYPVIYDSNGVVLSMPPIINGDHSRITVNTRNIFIECTGTDFTKAKIVLDIIVTMFSEYCENQFTVEAAEVVFPNGKSHTFPELAYRKEMVRADLINKKVGIRETPENLAKLLTRMYLKSEVIGDGNQIEIEIPPTRADIIHACDIVEDAAIAYGYNNIQMTLPKTYTIANQFPLNKLTELLRHDMAAAGFTEALTFALCSQEDIADKLGVDISATKAVHISNPKTAEFQVARTTLLPGLLKTIAANRKMPLPLKLFEISDIVIKDSNTDVGAKNYRHLCAVYYNKNPGFEIIHGLLDRIMQLLDVPPGEDKGGYVIKASEGPAFFPGRCAEIFARGQSVGKLGVLHPDVITKFELTMPCSSLEINIGPFL

SEQ ID NO: 873583 - protein, 589 aa, Homo sapiens; identical to SEQ ID NO: 873576

SEQ ID NO: 873584 - protein, 589 aa, Homo sapiens; identical to SEQ ID NO: 873576

SEQ ID NO: 873585 - protein, 346 aa, Homo sapiens
AGWYAPAFGMPTVSVKRDLLFQALGRTYTDEEFDELCFEFGLELDEITSEKEIISKEQGNVKAAGASDVVLYKIDVPANRYDLLCLEGLVRGLQVFKERIKAPVYKRVMPDGKIQKLIITEETAKIRPFAVAAVLRNIKFTKDRYDSFIELQEKLHQNICRKRALVAIGTHDLDTLSGPFTYTAKRPSDIKFKPLNKTKEYTACELMNIYKTDNHLKHYLHIIENKPLYPVIYDSNGVVLSMPPIINGDHSRITVNTRNIFIECTGTDFTKAKIVLDIIVTMFSEYCENQFTVEAAEVVFPNGKSHTFPELAYRKEMVRADLINKKVGIRYALKTSLNSRTKYTYD

SEQ ID NO: 873586 - protein, 589 aa, Homo sapiens; identical to SEQ ID NO: 873576

SEQ ID NO: 873587 - protein, 556 aa, Homo sapiens
MPTVSVKRDLLFQALGRTYTDEEFDELCFEFGLELDEITSEKEIISKEQGNVKAAGASDVVLYKIDVPANRYDLLCLEGLVRGLQVFKERIKAPVYKRVMPDGKIQKLIITEETAKIRPFAVAAVLRNIKFTKDRYDSFIELQEKLHQNICRKRALVAIGTHDLDTLSGPFTYTAKRPSDIKFKPLNKTKEYTACELMNIYKTDNHLKHYLHIIENKPLYPVIYDSNGVVLSMPPIINGDHSRITVNTRNIFIECTGTDFTKAKIVLDIIVTMFSEYCENQFTVEAAEVVFPNGKSHTFPELAYRKEMVRADLINKKVGIRETPENLAKLLTRMYLKSEVIGDGNQIEIEIPPTRADIIHACDIVEDAAIAYGYNNIQMTLPKTYTIANQFPLNKLTELLRHDMAAAGFTEALTFALCSQEDIADKLGVDISATKAVHISNPKTAEFQVARTTLLPGLLKTIAANRKMPLPLKLFEISDIVIKDSNTDVGAKNYRHLCAVYYNKNPGFEIIHGLLDRIMQLLDVPPGEDKGGYVIKASEASGSLGSFILTLSPNLS

SEQ ID NO: 873588 - protein, 408 aa, Homo sapiens
MPTVSVKRDLLFQALGRTYTDEEFDELCFEFGLELDEITSEKEIISKEQGNVKAAGASDVVLYKIDVPANRYDLLCLEGLVRGLQVFKERIKAPVYKRVMPDGKIQKLIITEETAKIRPFAVAAVLRNIKFTKDRYDSFIELQEKLHQNICRKRALVAIGTHDLDTLSGPFTYTAKRPSDIKFKPLNKTKEYTACELMNIYKTDNHLKHYLHIIENKPLYPVIYDSNGVVLSMPPIINGDHSRITVNTRNIFIECTGTDFTKAKIVLDIIVTMFSEYCENQFTVEAAEVVFPNGKSHTFPELAYRKEMVRADLINKKVGIRETPENLAKLLTRMYLKSEVIGDGNQIEIEIPPTRADIIHACDIVEDAAIAYGYNNIQMTLPKTYTIANQFPLNKLTELLRHDMAARP

SEQ ID NO: 873589 - protein, 261 aa, Homo sapiens
AGWYAPAFGMPTVSVKRDLLFQALGRTYTDEEFDELCFEFGLELDEITSEKEIISKEQGNVKAAGASDVVLYKIDVPANRYDLLCLEGLVRGLQVFKERIKAPVYKRVMPDGKIQKLIITEETAKIRPFAVAAVLRNIKFTKDRYDSFIELQEKLHQNICRKRALVAIGTHDLDTLSGPFTYTAKRPSDIKFKPLNKTKEYTACELMNIYKTDNHLKHYLHIIENKPLYPVIYDSNGVVLSMPPIINGGHPNKGYRTFLMR

SEQ ID NO: 873590 - protein, 101 aa, Homo sapiens
AGWYAPAFGMPTVSVKRDLLFQALGRTYTDEEFDELCFEFGLELDEITSEKEIISKEQGNVKAAGASDVVLYKIDVPGVPFSSPSVLKSSSTGNIYLGFDV

SEQ ID NO: 873591 - protein, 598 aa, Homo sapiens
AGWYAPAFGMPTVSVKRDLLFQALGRTYTDEEFDELCFEFGLELDEITSEKEIISKEQGNVKAAGASDVVLYKIDVPANRYDLLCLEGLVRGLQVFKERIKAPVYKRVMPDGKIQKLIITEETAKIRPFAVAAVLRNIKFTKDRYDSFIELQEKLHQNICRKRALVAIGTHDLDTLSGPFTYTAKRPSDIKFKPLNKTKEYTACELMNIYKTDNHLKHYLHIIENKPLYPVIYDSNGVVLSMPPIINGDHSRITVNTRNIFIECTGTDFTKAKIVLDIIVTMFSEYCENQFTVEAAEVVFPNGKSHTFPELAYRKEMVRADLINKKVGIRETPENLAKLLTRMYLKSEVIGDGNQIEIEIPPTRADIIHACDIVEDAAIAYGYNNIQMTLPKTYTIANQFPLNKLTELLRHDMAAAGFTEALTFALCSQEDIADKLGVDISATKAVHISNPKTAEFQVARTTLLPGLLKTIAANRKMPLPLKLFEISDIVIKDSNTDVGAKNYRHLCAVYYNKNPGFEIIHGLLDRIMQLLDVPPGEDKGGYVIKASEGPAFFPGRCAEIFARGQSVGKLGVLHPDVITKFELTMPCSSLEINIGPFL

SEQ ID NO: 873592 - protein, 683 aa, Homo sapiens
MSWKDLDDSFPCPFCHLCCPERKFISNPQLGSLTEIAKQLQLRSKRKRQEEKHVCKKHNQVLTFFSQKDLELLCPRCSLSTDHQHRCVWPIKKAASYQKKLEQYNAPWKERVELIEKVITIQTRKSLELKKKTSEKEIISKEQGNVKAAGASDVVLYKIDVPANRYDLLCLEGLVRGLQVFKERIKAPVYKRVMPDGKIQKLIITEETAKIRPFAVAAVLRNIKFTKDRYDSFIELQEKLHQNICRKRALVAIGTHDLDTLSGPFTYTAKRPSDIKFKPLNKTKEYTACELMNIYKTDNHLKHYLHIIENKPLYPVIYDSNGVVLSMPPIINGDHSRITVNTRNIFIECTGTDFTKAKIVLDIIVTMFSEYCENQFTVEAAEVVFPNGKSHTFPELAYRKEMVRADLINKKVGIRETPENLAKLLTRMYLKSEVIGDGNQIEIEIPPTRADIIHACDIVEDAAIAYGYNNIQMTLPKTYTIANQFPLNKLTELLRHDMAAAGFTEALTFALCSQEDIADKLGVDISATKAVHISNPKTAEFQVARTTLLPGLLKTIAANRKMPLPLKLFEISDIVIKDSNTDVGAKNYRHLCAVYYNKNPGFEIIHGLLDRIMQLLDVPPGEDKGGYVIKASEGPAFFPGRCAEIFARGQSVGKLGVLHPDVITKFELTMPCSSLEINIGPFL

SEQ ID NO: 873593 - protein, 607 aa, Homo sapiens
MPTVSVKRDLVLAKPTGDCHATSASMASLYVTMFIERSAVVADCEIETVHYCEQRGTSEKEIISKEQGNVKAAGASDVVLYKIDVPANRYDLLCLEGLVRGLQVFKERIKAPVYKRVMPDGKIQKLIITEETAKIRPFAVAAVLRNIKFTKDRYDSFIELQEKLHQNICRKRALVAIGTHDLDTLSGPFTYTAKRPSDIKFKPLNKTKEYTACELMNIYKTDNHLKHYLHIIENKPLYPVIYDSNGVVLSMPPIINGDHSRITVNTRNIFIECTGTDFTKAKIVLDIIVTMFSEYCENQFTVEAAEVVFPNGKSHTFPELAYRKEMVRADLINKKVGIRETPENLAKLLTRMYLKSEVIGDGNQIEIEIPPTRADIIHACDIVEDAAIAYGYNNIQMTLPKTYTIANQFPLNKLTELLRHDMAAAGFTEALTFALCSQEDIADKLGVDISATKAVHISNPKTAEFQVARTTLLPGLLKTIAANRKMPLPLKLFEISDIVIKDSNTDVGAKNYRHLCAVYYNKNPGFEIIHGLLDRIMQLLDVPPGEDKGGYVIKASEGPAFFPGRCAEIFARGQSVGKLGVLHPDVITKFELTMPCSSLEINIGPFL

SEQ ID NO: 873594 - protein, 591 aa, Homo sapiens
AGWYAPAFGMPTVSVKRDLLFQALGRTYICFEFGLELDEITSEKEIISKEQGNVKAAGASDVVLYKIDVPANRYDLLCLEGLVRGLQVFKERIKAPVYKRVMPDGKIQKLIITEETAKIRPFAVAAVLRNIKFTKDRYDSFIELQEKLHQNICRKRALVAIGTHDLDTLSGPFTYTAKRPSDIKFKPLNKTKEYTACELMNIYKTDNHLKHYLHIIENKPLYPVIYDSNGVVLSMPPIINGDHSRITVNTRNIFIECTGTDFTKAKIVLDIIVTMFSEYCENQFTVEAAEVVFPNGKSHTFPELAYRKEMVRADLINKKVGIRETPENLAKLLTRMYLKSEVIGDGNQIEIEIPPTRADIIHACDIVEDAAIAYGYNNIQMTLPKTYTIANQFPLNKLTELLRHDMAAAGFTEALTFALCSQEDIADKLGVDISATKAVHISNPKTAEFQVARTTLLPGLLKTIAANRKMPLPLKLFEISDIVIKDSNTDVGAKNYRHLCAVYYNKNPGFEIIHGLLDRIMQLLDVPPGEDKGGYVIKASEGPAFFPGRCAEIFARGQSVGKLGVLHPDVITKFELTMPCSSLEINIGPFL

SEQ ID NO: 873595 - protein, 392 aa, Homo sapiens; identical to SEQ ID NO: 873581

SEQ ID NO: 873596 - protein, 461 aa, Homo sapiens
SFTLYFQRFCLFNNMLNFNLLKSLKRALVAIGTHDLDTLSGPFTYTAKRPSDIKFKPLNKTKEYTACELMNIYKTDNHLKHYLHIIENKPLYPVIYDSNGVVLSMPPIINGDHSRITVNTRNIFIECTGTDFTKAKIVLDIIVTMFSEYCENQFTVEAAEVVFPNGKSHTFPELAYRKEMVRADLINKKVGIRETPENLAKLLTRMYLKSEVIGDGNQIEIEIPPTRADIIHACDIVEDAAIAYGYNNIQMTLPKTYTIANQFPLNKLTELLRHDMAAAGFTEALTFALCSQEDIADKLGVDISATKAVHISNPKTAEFQVARTTLLPGLLKTIAANRKMPLPLKLFEISDIVIKDSNTDVGAKNYRHLCAVYYNKNPGFEIIHGLLDRIMQLLDVPPGEDKGGYVIKASEGPAFFPGRCAEIFARGQSVGKLGVLHPDVITKFELTMPCSSLEINIGPFL

SEQ ID NO: 873597 - protein, 317 aa, Homo sapiens
MFSEYCENQFTVEAAEVVFPNGKSHTFPELAYRKEMVRADLINKKVGIRETPENLAKLLTRMYLKSEVIGDGNQIEIEIPPTRADIIHACDIVEDAAIAYGYNNIQMTLPKTYTIANQFPLNKLTELLRHDMAAAGFTEALTFALCSQEDIADKLGVDISATKAVHISNPKTAEFQVARTTLLPGLLKTIAANRKMPLPLKLFEISDIVIKDSNTDVGAKNYRHLCAVYYNKNPGFEIIHGLLDRIMQLLDVPPGEDKGGYVIKASEGPAFFPGRCAEIFARGQSVGKLGVLHPDVITKFELTMPCSSLEINIGPFL

SEQ ID NO: 873598 - protein, 294 aa, Homo sapiens
AGWYAPAFGMPTVSVKRDLLFQALGRTYTDEEFDELCFEFGLELDEITSEKEIISKEQGNVKAAGASDVVLYKIDVPANRYDLLCLEGLVRGLQVFKERIKAPVYKRVMPDGKIQKLIITEETAKIRPFAVAAVLRNIKFTKDRYDSFIELQEKLHQNICRKRALVAIGTHDLDTLSGPFTYTAKRPSDIKFKPLNKTKEYTACELMNIYKTDNHLKHYLHIIENKPLYPVIYDSNGVVLSMPPIINGDHSRITVNTRNIFIECTGTDFTKAKIVLDIIVTMFSEYCENQFTST

SEQ ID NO: 873599 - protein, 301 aa, Homo sapiens
AGWYAPAFGMPTVSVKRDLLFQALGRTYTDEEFDELCFEFGLELDEITSEKEIISKEQGNVKAAGASDVVLYKIDVPANRYDLLCLEGLVRGLQVFKERIKAPVYKRVMPDGKIQKLIITEETAKIRPFAVAAVLRNIKFTKDRYDSFIELQEKLHQNICRKRALVAIGTHDLDTLSGPFTYTAKRPSDIKFKPLNKTKEYTACELMNIYKTDNHLKHYLHIIENKPLYPVIYDSNGVVLSMPPIINGDHSRITVNTRNIFIECTGTDFTKAKIVLDIIVTMFSEYCENQFTSKAAESGFS

SEQ ID NO: 873600 - protein, 115 aa, Homo sapiens
MSWKDLDDSFPCPFCHLCCPERKFISNPQLGSLTEIAKQLQLRSKRKRQEEKHVCKKHNQVLTFFSQKDLELLCPRCSLSTDHQHRCVWPIKKAASYQEKTGAIQCTVEGESGTN

SEQ ID NO: 873601 - protein, 81 aa, Homo sapiens
AGWYAPAFGMPTVSVKRDLLFQALGRTYTDEEFDELCFEFGLELDEIVCIGYLSIFQRCVHKLIFQGYTVFHLCYLIVRLR

SEQ ID NO: 873602 - protein, 310 aa, Homo sapiens
MVYKTLFALCILTAGWRVQSLPTSAPLSVSLPTNIVPPTTIWTSSPQNTDADTASPSNGTHNNSVLPVTASAPTSLLPKNISIESREEEITSPGSNWEGTNTDPSPSGFSSTSGGVHLTTTLEEHSSGTPEAGVAATLSQSAAEPPTLISPQAPASSPSSLSTSPPEVFSASVTTNHSSTVTSTQPTGAPTAPESPTEESSSDHTPTSHATAEPVPQEKTPPTTVSGKVMCELIDMETTTTFPRVIMQEVEHALSSGSIAAITVTVIAVVLLVFGVAAYLKIRHSSYGRLLDDHDYGSWGNYNNPLYDDS

SEQ ID NO: 873603 - protein, 303 aa, Homo sapiens
MEEQNGSGWRVQSLPTSAPLSVSLPTNIVPPTTIWTSSPQNTDADTASPSNGTHNNSVLPVTASAPTSLLPKNISIESREEEITSPGSNWEGTNTDPSPSGFSSTSGGVHLTTTLEEHSSGTPEAGVAATLSQSAAEPPTLISPQAPASSPSSLSTSPPEVFSASVTTNHSSTVTSTQPTGAPTAPESPTEESSSDHTPTSHATAEPVPQEKTPPTTVSGKVMCELIDMETTTTFPRVIMQEVEHALSSGSIAAITVTVIAVVLLVFGVAAYLKIRHSSYGRLLDDHDYGSWGNYNNPLYDDS

SEQ ID NO: 873604 - protein, 131 aa, Homo sapiens
PGSGGWDGAEERGAPEGTQLTELRCVRLVCLAPSTGAVRASRLPPQPTRQRSRYQRPVRSVSPQTPCRPPRAGHQIPGYHGLQDSLRSLHLNCRQHRRHYRDSHCRGAAGVWSCSLPKNQAFLLWKTFGRP

SEQ ID NO: 873605 - protein, 310 aa, Homo sapiens; identical to SEQ ID NO: 873602

SEQ ID NO: 873606 - protein, 235 aa, Homo sapiens
MVYKTLFALCILTAGWRVQSLPTSAPLSVSLPTNIVPPTTIWTSSPQNTDADTASPSNGTHNNSVLPVTASAPTSLLPKNISIESREEEITSPGSNWEGTNTDPSPSGFSSTSGGVHLTTTLEEHSSGTPEAGVAATLSQSAAEPPTLISPQAPASSPSSLSTSPPEVFSASVTTNHSSTVTSTQPTGAPTAPESPTEESSSDHTPTSHATAEPVPQEKTQMCWRCGARWAPPSG

SEQ ID NO: 873607 - protein, 310 aa, Homo sapiens; identical to SEQ ID NO: 873602

SEQ ID NO: 873608 - protein, 362 aa, Homo sapiens
VTATYVACSHHLQTFYICLADTASHPLYLQYQLIPLPINLFYILNLISQYSSHLLTKTLFALCILTGWRVQSLPTSAPLSVSLPTNIVPPTTIWTSSPQNTDADTASPSNGTHNNSVLPVTASAPTSLLPKNISIESREEEITSPGSNWEGTNTDPSPSGFSSTSGGVHLTTTLEEHSSGTPEAGVAATLSQSAAEPPTLISPQAPASSPSSLSTSPPEVFSASVTTNHSSTVTSTQPTGAPTAPESPTEESSSDHTPTSHATAEPVPQEKTPPTTVSGKVMCELIDMETTTTFPRVIMQEVEHALSSGSIAAITVTVIAVVLLVFGVAAYLKIRHSSYGRLLDDHDYGSWGNYNNPLYDDS

SEQ ID NO: 873609 - protein, 310 aa, Homo sapiens; identical to SEQ ID NO: 873602

SEQ ID NO: 873610 - protein, 103 aa, Homo sapiens
SNSTTCKSIVFSVSHGDRTMERKIRCKVIENSLNKHCMKKPDVRLSFNSNWHLSWLKISAKARRGGSCLSSQHFGRLRQVDRLNLGGGGRSAAEHTPSHTTQG

SEQ ID NO: 873611 - protein, 1111 aa, Homo sapiens
GRGPEPWLGSVQGQRSLLEHHPGKKQMGYMGEMEVQGPTRESGQSLPPQKKAYLSHLSTGSGHIEGDWAGRNRKLLKPRSIQKSWFVQFPWLIMNEEQTALFCSACREYPSIRDKRSRLIEGYTGPFKVETLKYHAKSKAHMFCVNALAARDPIWAARFRSIRDPPGDVLASPEPLFTADCPIFYPPGPLGGFDSMAELLPSSRAELEDPGGDGAIPAMYLDCISDLRQKEITDGIHSSSDINILYNDAVESCIQDPSAEGLSEEVPVVFEELPVVFEDVAVYFTREEWGMLDKRQKELYRDVMRMNYELLASLGPAAAKPDLISKLERRAAPWIKDPNGPKWGKGRPPGNKKMVAVREADTQASAADSALLPGSPVEARASCCSSSICEEGDGPRRIKRTYRPRSIQRSWFGQFPWLVIDPKETKLFCSACIERPNLHDKSSRLVRGYTGPFKVETLKYHEVSKAHRLCVNTVEIKEDTPHTALVPEISSDLMANMEHFFNAAYSIAYHSRPLNDFEKILQLLQSTGTVILGKYRNRTACTQFIKYISETLKREILEDVRNSPCVSVLLDSSTDASEQACVGIYIRYFKQMEVKESYITLAPLYSETADGYFETIVSALDELDIPFRKPGWVVGLGTDGSAMLSCRGGLVEKFQEVIPQLLPVHCVAHRLHLAVVDACGSIDLVKKCDRHIRTVFKFYQSSNKRLNELQEGAAPLEQEIIRLKDLNAVRWVASRRRTLHALLVSWPALARHLQRVAEAGGQIGHRAKGMLKLMRGFHFVKFCHFLLDFLSIYRPLSEVCQKEIVLITEVNATLGRAYVALESLRHQAGPKEEEFNASFKDGRLHGICLDKLEVAEQRFQADRERTVLTGIEYLQQRFDADRPPQLKNMEVFDTMAWPSGIELASFGNDDILNLARYFECSLPTGYSEEALLEEWLGLKTIAQHLPFSMLCKNALAQHCRFPLLSKLMAVVVCVPISTSCCERGFKAMNRIRTDERTKLSNEVLNMLMMTAVNGVAVTEYDPQPAIQHWYLTSSGRRFSHVYTCAQVPARSPASARLRKEEMGALYVEEPRTQKPPILPSREAAEVLKDCIMEPPERLLYPHTSQEAPGMS

SEQ ID NO: 873612 - protein, 259 aa, Homo sapiens
GRGPEPWLGSVQGQRSLLEHHPGKKQMGYMGEMEVQGPTRESGQSLPPQKKAYLSHLSTGSGHIEGDWAGRNRKLLKPRSIQKSWFVQFPWLIMNEEQTALFCSACREYPSIRDKRSRLIEGYTGPFKVETLKYHAKSKAHMFCVNALAARDPIWAARFRSIRDPPGDVLASPEPLFTADCPIFYPPGPLGGFDSMAELLPSSRAELEDPGGDGAIPAMYLDCISDLRQKEITDGIHSSSDINILYNDAVESCIQVIRL

SEQ ID NO: 873613 - protein, 377 aa, Homo sapiens
GRGPEPWLGSVQGQRSLLEHHPGKKQMGYMGEMEVQGPTRESGQSLPPQKKAYLSHLSTGSGHIEGDWAGRNRKLLKPRSIQKSWFVQFPWLIMNEEQTALFCSACREYPSIRDKRSRLIEGYTGPFKVETLKYHAKSKAHMFCVNALAARDPIWAARFRSIRDPPGDVLASPEPLFTADCPIFYPPGPLGGFDSMAELLPSSRAELEDPGGDGAIPAMYLDCISDLRQKEITDGIHSSSDINILYNDAVESCIQDPSAEGLSEEVPVVFEELPVVFEDVAVYFTREEWGMLDKRQKELYRDVMRMNYELLASLEMESHFAAQAGLKLLDSSDPADLAPKVLDYGVSHCTWLAISDEVCCFFPKSSQKSQLHPTVKK

SEQ ID NO: 873614 - protein, 1111 aa, Homo sapiens; identical to SEQ ID NO: 873611

SEQ ID NO: 873615 - protein, 99 aa, Homo sapiens
GVSLLIEDGRVLGSRTKHDSIFSKGNKKMVAVREADTQASAADSALLPGSPVEARASCCSSSICEEGDGPRRIKRTYRPRSIQRSWFGQFPWLVIDPKE

SEQ ID NO: 873616 - protein, 275 aa, Homo sapiens
PFLGSLCTYWSQVTLGPGPDCLILEASRQPRLVPKPERMASDGASALPGPDMSMKPSAALSPSPALPFLPPTSDPPDHPPREPPPQPIMPSVFSPDNPLMLSAFPSSLLVTGDGGPCLSGAGAGKVIVKVKTEGGSAEPSQTQNFILTQTALNSTAPGTPCGGLEGPAPPFVTASNVKTILPSKAVGVSQEGPPGLPPQPPPPVAQLVPIVPLEKAWPGPHGTTGEGGPVATLSKPSLGDRSKISKDVYENFRQWQRYKALARRHLSQSPDTEAL

SEQ ID NO: 873617 - protein, 108 aa, Homo sapiens
GIHDTCRNNCSDLHLWRLRQMLILLSNIATACSKTLNIIKEEIGISNCVREKTQTLGVLTGPVRAEFLKLRASYLQERERGGRVLEERQTHSFASLALAFQDPGGGPI

SEQ ID NO: 873618 - protein, 103 aa, Homo sapiens
WGESRRPFLFLGRCFRPKPCPQVILDEPPQTPDLADRINGPQHPPAQAPFCAPRLLWLRPSLPQGTSASVRDGVLHIQPDAVPSSTPNQKARSIQKEKRCLKP

SEQ ID NO: 873619 - protein, 122 aa, Homo sapiens
KYIQIESSSFFIYVVFCFSKVLTISDSKMAKLYHYSYVKVNAMSTIAWTAILTQLSNLNVISIRKPAINCQNGKNSYVCFQSQKCNHVVRLQGFTVVHSSESQDWFPYSVFSHGKLHRGIIG

SEQ ID NO: 873620 - protein, 282 aa, Homo sapiens
RAAWKRVAERRDLGGLAMEEEGVKEAGEKPRGAQMVDKAGWIKKSSGGLLGFWKDRYLLLCQAQLLVYENEDDQKCVETVELGSYEKCQDLRALLKRKHRFILLRSPGNKVSDIKFQAPTGEEKESWIKALNEGINRGKNKAFDEVKVDKSCALEHVTRDLGATGASDSRAQLRVHLKEVASAASDGLLRLDLDVPDSGPTVFAPQEVMSVEATSSGDNPGPHDSYQAFLATETQPGERVENPEGGEKTKPCIKEPESLPEEQREQKPREENRDRRDTKRTD

SEQ ID NO: 873621 - protein, 96 aa, Homo sapiens
GCARRGGGGKGTRLVRRLLGALPAGGQGGRQLGPFALLPALALREQSDQTQCQRLLSTYYVQGTGQSERKRPQSPGRVDLKMDWLEGDSPSTRQTR

SEQ ID NO: 873622 - protein, 522 aa, Homo sapiens
MSLRVHTLPTLLGAVVRPGCRELLCLLMITVTVGPGASGVCPTACICATDIVSCTNKNLSKVPGNLFRLIKRLDLSYNRIGLLDSEWIPVSFAKLNTLILRHNNITSISTGSFSTTPNLKCLDLSSNKLKTVKNAVFQELKVLEVLLLYNNHISYLDPSAFGGLSQLQKLYLSGNFLTQFPMDLYVGRFKLAELMFLDVSYNRIPSMPMHHINLVPGKQLRGIYLHGNPFVCDCSLYSLLVFWYRRHFSSVMDFKNDYTCRLWSDSRHSRQVLLLQDSFMNCSDSIINGSFRALGFIHEAQVGERLMVHCDSKTGNANTDFIWVGPDNRLLEPDKEMENFYVFHNGSLVIESPRFEDAGVYSCIAMNKQRLLNETVDVTINVSNFTVSRSHAHEAFNTAFTTLAACVASIVLVLLYLYLTPCPCKCKTKRQKNMLHQSNAHSSILSPGPASDASADERKAGAGKRVVFLEPLKDTAAGQNGKVRLFPSEAVIAEGILKSTRGKSDSDSVNSVFSDTPFVAST

SEQ ID NO: 873623 - protein, 522 aa, Homo sapiens; identical to SEQ ID NO: 873622

SEQ ID NO: 873624 - protein, 522 aa, Homo sapiens; identical to SEQ ID NO: 873622

SEQ ID NO: 873625 - protein, 522 aa, Homo sapiens; identical to SEQ ID NO: 873622

SEQ ID NO: 873626 - protein, 522 aa, Homo sapiens; identical to SEQ ID NO: 873622

SEQ ID NO: 873627 - protein, 145 aa, Homo sapiens
FKATWIEAAWMTTLSEWPHLCTGSAALGSDTETASRASITRILRVSPCHQAGVQWHELSSLQPPPPGFQRFSCLSLPSSWDYRCAPPRPANLCIFSRDGISPCWPGWSQNPDLKQSTCLGLPKCWDYRREPLCPACPLTLEFLPA

SEQ ID NO: 873628 - protein, 1132 aa, Homo sapiens
MKLKELERPAVQAWSPASQYPLYLATGTSAQQLDSSFSTNGTLEIFEVDFRDPSLDLKHRGVLSALSRFHKLVWGSFGSGLLESSGVIVGGGDNGMLILYNVTHILSSGKEPVIAQKQKHTGAVRALDLNPFQGNLLASGASDSEIFIWDLNNLNVPMTLGSKSQQPPEDIKALSWNRQAQHILSSAHPSGKAVVWDLRKNEPIIKVSDHSNRGILSVSWSQADAELLLTSAKDSQILCRNLGSSEVVYKLPTQSSWCFDVQWCPRDPSVFSAASFNGWISLYSVMGRSWEVQHMRQADKISSSFSKGQPLPPLQVPEQVAQAPLIPPLKKPPKWIRRPTGVSFAFGGKLVTFGLPSTPAHLVPQPCPRLVFISQVTTESEFLMRSAELQEALGSGNLLNYCQNKSQQALLQSEKMLWQFLKVTLEQDSRMKFLKLLGYSKDELQKKVATWLKSDVGLGESPQPKGNDLNSDRQQAFCSQASKHTTKEASASSAFFDELVPQNMTPWEIPITKDIDGLLSQALLLGELGPAVELCLKEERFADAIILAQAGGTDLLKQTQERYLAKKKTKISSLLACVVQKNWKDVVCTCSLKNWREALALLLTYSGTEKFPELCDMLGTRMEQEGSRALTSEARLCYVCSGSVERLVECWAKCHQALSPMALQDLMEKVMVLNRSLEQLRGPHGVSPGPATTYRVTQYANLLAAQGSLATAMSFLPRDCAQPPVQQLRDRLFHAQGSAVLGQQSPPFPFPRIVVGATLHSKETSSYRLGSQPSHQVPTPSPRPRVFTPQSSPAMPLAPSHPSPYQGPRTQNISDYRAPGPQAIQPLPLSPGVRPASSQPQLLGGQRVQVPNPVGFPGTWPLPGSPLPMACPGIMRPGSTSLPETPRLFPLLPLRPLGPGRMVSHTPAPPASFPVPYLPGDPGAPCSSVLPTTGILTPHPGPQDSWKEAPAPRGNLQRNKLPETFMPPAPITAPVMSLTPELQGILPSQPPVSSVSHAPPGVPGELSLQQLQHLPPEKMERKELPPEHQSLKSSFEALLQRCSLSATDLKTKRKLEEAAQRLEYLYEKLCEGTLSPHVVAGLHEVARCVDAGSFEQGLAVHAQVAGCSSFSEVSSFMPILKAVLIIAHKLLV

SEQ ID NO: 873629 - protein, 1023 aa, Homo sapiens
MTLGSKSQQPPEDIKALSWNRQAQHILSSAHPSGKAVVWDLRKNEPIIKVSDHSNRMHCSGLAWHPDIATQLVLCSEDDRLPVIQLWDLRFASSPLKVLESHSRGILSVSWSQADAELLLTSAKDSQILCRNLGSSEVVYKLPTQSSWCFDVQWCPRDPSVFSAASFNGWISLYSVMGRSWEVQHMRQADKISSSFSKGQPLPPLQVPEQVAQAPLIPPLKKPPKWIRRPTGVSFAFGGKLVTFGLPSTPAHLVPQPCPRLVFISQVTTESEFLMRSAELQEALGSGNLLNYCQNKSQQALLQSEKMLWQFLKVTLEQDSRMKFLKLLGYSKDELQKKVATWLKSDVGLGESPQPKGNDLNSDRQQAFCSQASKHTTKEASASSAFFDELVPQNMTPWEIPITKDIDGLLSQALLLGELGPAVELCLKEERFADAIILAQAGGTDLLKQTQERYLAKKKTKISSLLACVVQKNWKDVVCTCSLKNWREALALLLTYSGTEKFPELCDMLGTRMEQEGSRALTSEARLCYVCSGSVERLVECWAKCHQALSPMALQDLMEKVMVLNRSLEQLRGPHGVSPGPATTYRVTQYANLLAAQGSLATAMSFLPRDCAQPPVQQLRDRLFHAQGSAVLGQQSPPFPFPRIVVGATLHSKETSSYRLGSQPSHQVPTPSPRPRVFTPQSSPAMPLAPSHPSPYQGPRTQNISDYRAPGPQAIQPLPLSPGVRPASSQPQLLGGQRVQVPNPVGFPGTWPLPGSPLPMACPGIMRPGSTSLPETPRLFPLLPLRPLGPGRMVSHTPAPPASFPVPYLPGDPGAPCSSVLPTTGILTPHPGPQDSWKEAPAPRGNLQRNKLPETFMPPAPITAPVMSLTPELQGILPSQPPVSSVSHAPPGVPGELSLQQLQHLPPEKMERKELPPEHQSLKSSFEALLQRCSLSATDLKTKRKLEEAAQRLEYLYEKLCEGTLSPHVVAGLHEVARCVDAGSFEQGLAVHAQVAGCSSFSEVSSFMPILKAVLIIAHKLLV

SEQ ID NO: 873630 - protein, 1018 aa, Homo sapiens
MKLKELERPAVQAWSPASQYPLYLATGTSAQQLDSSFSTNGTLEIFEVDFRDPSLDLKHRGVLSALSRFHKLVWGSFGSGLLESSGVIVGGGDNGMLILYNVTHILSSGKEPVIAQKQKHTGAVRALDLNPFQGNLLASGASDSEIFIWDLNNLNVPMTLGSKSQQPPEDIKALSWNRQAQHILSSAHPSGKAVVWDLRKNEPIIKVSDHSNRGILSVSWSQADAELLLTSAKDSQILCRNLGSSEVVYKLPTQSSWCFDVQWCPRDPSVFSAASFNGWISLYSVMGRSWEVQHMRQADKISSSFSKGQPLPPLQVPEQVAQAPLIPPLKKPPKWIRRPTGVSFAFGGKLVTFGLPSTPAHLVPQPCPRLVFISQVTTESEFLMRSAELQEALGSGNLLNYCQNKSQQALLQSEKMLWQFLKVTLEQDSRMKFLKLLGYSKDELQKKVSCFSHQKHVLVEEKKRMLPEYNHLRIPLPGLIIAYVATWLKSDVGLGESPQPKGNDLNSDRQQAFCSQASKHTTKEASASSAFFDELVPQNMTPWEIPITKDIDGLLSQALLLGELGPAVELCLKEERFADAIILAQAGGTDLLKQTQERYLAKKKTKISSLLACVVQKNWKDVVCTCSLKNWREALALLLTYSGTEKFPELCGPDGEGDGSNRSLEQLRGPHGVSPGPATTYRVTQYANLLAAQGSLATAMSFLPRDCAQPPVQQLRDRLFHAQGSAVLGQQSPPFPFPRIVVGATLHSKETSSYRLGSQPSHQVPTPSPRPRVFTPQSSPAMPLAPSHPSPYQGPRTQNISDYRAPGPQAIQPLPLSPGVRPASSQPQLLGGQRVQVPNPVGFPGTWPLPGSPLPMACPGIMRPGSTSLPETPRLFPLLPLRPLGPGRMVSHTPAPPASFPVPYLPGDPGAPCSSVLPTTGILTPHPGPQDSWKEAPAPRGNLQRNKLPETFMPPAPITAPVMSLTPELQGILPSQPPVSSVSHAPPGVPGELSLQVTRTMYSPPLGNLPALLGCRSW

SEQ ID NO: 873631 - protein, 114 aa, Homo sapiens [sequence omitted]

SEQ ID NO: 873632 - protein, 280 aa, Homo sapiens
MAVARAGVLGVQWLQRASRNVMPLGARTASHMTKDMFPGPYPRTPEERAAAAKKYNMRVEDYEPYLPGDPGAPCSSVLPTTGILTPHPGPQDSWKEAPAPRGNLQRNKLPETFMPPAPITAPVMSLTPELQGILPSQPPVSSVSHAPPGVPGELSLQQLQHLPPEKMERKELPPEHQSLKSSFEALLQRCSLSATDLKTKRKLEEAAQRLEYLYEKLCEGTLSPHVVAGLHEVARCVDAGSFEQGLAVHAQVAGCSSFSEVSSFMPILKAVLIIAHKLLV

SEQ ID NO: 873633 - protein, 746 aa, Homo sapiens
MKLKELERPAVQAWSPASQYPLYLATGTSAQQLDSSFSTNGTLEIFEVDFRDPSLDLKHRGVLSALSRFHKLVWGSFGSGLLESSGVIVGGGDNGMLILYNVTHILSSGKEPVIAQKQKHTGAVRALDLNPFQGNLLASGASDSEIFIWDLNNLNVPMTLGSKSQQPPEDIKALSWNRQAQHILSSAHPSGKAVVWDLRKNEPIIKVSDHSNRGILSVSWSQADAELLLTSAKDSQILCRNLGSSEVVYKLPTQSSWCFDVQWCPRDPSVFSAASFNGWISLYSVMGRSWEVQHMRQADKISSSFSKGQPLPPLQVPEQVAQAPLIPPLKKPPKWIRRPTGVSFAFGGKLVTFGLPSTPAHLVPQPCPRLVFISQVTTESEFLMRSAELQEALGSGNLLNYCQNKSQQALLQSEKMLWQFLKPARDSSGAKEMRLYIRQVTLEQDSRMKFLKLLGYSKDELQKKVATWLKSDVGLGESPQPKGNDLNSDRQQAFCSQASKHTTKEASASSAFFDELVPQNMTPWEIPITKDIDGLLSQALLLGELGPAVELCLKEERFADAIILAQAGGTDLLKQTQERYLAKKKTKISSLLACVVQKNWKDVVCTCSLKNWREALALLLTYSGTEKFPELCDMLGTRMEQEGSRALTSEARLCYVCSGSVERLVECWAKCHQALSPMALQVPLLCRVLATPHQALRRLVVEMCRASRGESSGTGWNHGVREERKVLNVWDLLLFPQRRLSSSCFS

SEQ ID NO: 873634 - protein, 139 aa, Homo sapiens
RDSSLTAPCLQCESCSPRSSRRTQPAGDKDNVFPSLGKPSSPPWVQVMVDGPHSSRHVLRETGGRYQVSLLQRKGGCSSPQLCCNGNSVTVSHWGLVLREAMRRTACPSGLSPCFFISSFSTCHLRRWKGRSCPQSISP

SEQ ID NO: 873635 - protein, 1180 aa, Homo sapiens
MKLKELERPAVQAWSPASQYPLYLATGTSAQQLDSSFSTNGTLEIFEVDFRDPSLDLKHRGVLSALSRFHKLVWGSFGSGLLESSGVIVGGGDNGMLILYNVTHILSSGKEPVIAQKQKHTGAVRALDLNPFQGNLLASGASDSEIFIWDLNNLNVPMTLGSKSQQPPEDIKALSWNRQAQHILSSAHPSGKAVVWDLRKNEPIIKVSDHSNRMHCSGLAWHPDIATQLVLCSEDDRLPVIQLWDLRFASSPLKVLESHSRGILSVSWSQADAELLLTSAKDSQILCRNLGSSEVVYKLPTQSSWCFDVQWCPRDPSVFSAASFNGWISLYSVMGRSWEVQHMRQADKISSSFSKGQPLPPLQVPEQVAQAPLIPPLKKPPKWIRRPTGVSFAFGGKLVTFGLPSTPAHLVPQPCPRLVFISQVTTESEFLMRSAELQEALGSGNLLNYCQNKSQQALLQSEKMLWQFLKVTLEQDSRMKFLKLLGYSKDELQKKVATWLKSDVGLGESPQPKGNDLNSDRQQAFCSQASKHTTKEASASSAFFDELVPQNMTPWEIPITKDIDGLLSQALLLGELGPAVELCLKEERFADAIILAQAGGTDLLKQTQERYLAKKKTKISSLLACVVQKNWKDVVCTCSLKNWREALALLLTYSGTEKFPELCDMLGTRMEQEGSRALTSEARLCYVCSGSVERLVECWAKCHQALSPMALQDLMEKVMVLNRSLEQLRGPHGVSPGPATTYRVTQYANLLAAQGSLATAMSFLPRDCAQPPVQQLRDRLFHAQGSAVLGQQSPPFPFPRIVVGATLHSKETSSYRLGSQPSHQVPTPSPRPRVFTPQSSPAMPLAPSHPSPYQGPRTQNISDYRAPGPQAIQPLPLSPGVRPASSQPQLLGGQRVQVPNPVGFPGTWPLPGSPLPMACPGIMRPGSTSLPETPRLFPLLPLRPLGPGRMVSHTPAPPASFPVPYLPGDPGAPCSSVLPTTGILTPHPGPQDSWKEAPAPRGNLQRNKLPETFMPPAPITAPVMSLTPELQGILPSQPPVSSVSHAPPGVPGELSLQQLQHLPPEKMERKELPPEHQSLKSSFEALLQRCSLSATDLKTKRKLEEAAQRLEYLYEKLCEGTLSPHVVAGLHEVARCVDAGSFEQGLAVHAQVAGCSSFSEVSSFMPILKAVLIIAHKLLV

SEQ ID NO: 873636 - protein, 999 aa, Homo sapiens
MKLKELERPAVQAWSPASQYPLYLATGTSAQQLDSSFSTNGTLEIFEVDFRDPSLDLKHRGVLSALSRFHKLVWGSFGSGLLESSGVIVGGGDNGMLILYNVTHILSSGKEPVIAQKQKHTGAVRALDLNPFQGNLLASGASDSEIFIWDLNNLNVPMTLGSKSQQPPEDIKALSWNRQAQHILSSAHPSGKAVVWDLRKNEPIIKVSDHSNRGILSVSWSQADAELLLTSAKDSQILCRNLGSSEVVYKLPTQSSWCFDVQWCPRDPSVFSAASFNGWISLYSVMGRSWEVQHMRQADKISSSFSKGQPLPPLQVPEQVAQAPLIPPLKKPPKWIRRPTGVSFAFGGKLVTFGLPSTPAHLVPQPCPRLVFISQVTTESEFLMRSAELQEALGSGNLLNYCQNKSQQALLQSEKMLWQFLKPARDSSGAKEMRLYIRQVTLEQDSRMKFLKLLGYSKDELQKKVATWLKSDVGLGESPQPKGNDLNSDRQQAFCSQASKHTTKEASASSAFFDELVPQNMTPWEIPITKDIDGLLSQALLLGELGPAVELCLKEERFADAIILAQAGGTDLLKQTQERYLAKKKTKISSLLACVVQKNWKDVVCTCSLKNWREALALLLTYSGTEKFPELCGPDGEGDGSNRSLEQLRGPHGVSPGPATTYRVTQYANLLAAQGSLATAMSFLPRDCAQPPVQQLRDRLFHAQGSAVLGQQSPPFPFPRIVVGATLHSKETSSYRLGSQPSHQVPTPSPRPRVFTPQSSPAMPLAPSHPSPYQGPRTQNISDYRAPGPQAIQPLPLSPGVRPASSQPQLLGGQRVQVPNPVGFPGTWPLPGSPLPMACPGIMRPGSTSLPETPRLFPLLPLRPLGPGRMVSHTPAPPASFPVPYLPGDPGAPCSSVLPTTGILTPHPGPQDSWKEAPAPRGNLQRNKLPETFMPPAPITAPVMSLTPELQGILPSQPPVSSVSHAPPGVPGELSLQVTRTMYSPPLGNLPALLGCRSW

SEQ ID NO: 873637 - protein, 567 aa, Homo sapiens
MRLYIRQVTLEQDSRMKFLKLLGYSKDELQKKVATWLKSDVGLGESPQPKGNDLNSDRQQAFCSQASKHTTKEASASSAFFDELVPQNMTPWEIPITKDIDGLLSQALLLGELGPAVELCLKEERFADAIILAQAGGTDLLKQTQERYLAKKKTKISSLLACVVQKNWKDVVCTCSLKNWREALALLLTYSGTEKFPSSVDLMEKVMVLNRSLEQLRGPHGVSPGPATTYRVTQYANLLAAQGSLATAMSFLPRDCAQPPVQQLRDRLFHAQGSAVLGQQSPPFPFPRIVVGATLHSKETSSYRLGSQPSHQVPTPSPRPRVFTPQSSPAMPLAPSHPSPYQGPRTQNISDYRAPGPQAIQPLPLSPGVRPASSQPQLLGGQRVQVPNPVGFPGTWPLPGSPLPMACPGIMRPGSTSLPETPRLFPLLPLRPLGPGRMVSHTPAPPASFPVPYLPGDPGAPCSSVLPTTGILTPHPGPQDSWKEAPAPRGNLQRNKLPETFMPPAPITAPVMSLTPELQGILPSQPPVSSVSHAPPGVPGELSLQVTRTMYSPPLGNLPALLGCRSW

SEQ ID NO: 873638 - protein, 114 aa, Homo sapiens [sequence omitted]

SEQ ID NO: 873639 - protein, 999 aa, Homo sapiens; identical to SEQ ID NO: 873636

SEQ ID NO: 873640 - protein, 223 aa, Homo sapiens [sequence omitted]

SEQ ID NO: 873641 - protein, 291 aa, Homo sapiens
PRGPSVPTRAAAGAIPPMAGHRPSNHFCPLPGSGGGGPRGPMPLRVDTLTWLSTQAAPGRVMVWPAVRPGICPGPDVWRIPLGPLPHEFRGWIAPCRPRLGASEAGDWLRRPSEGALPGPYIALRSIPKLPPPEDISGILKELQQLAKELRQKRLSLGYSQADVGIAVGALFGKVLSQTTICRFEAQQLSVANMWKLRPLLKKWLKEVEAENLLGLCKMEMILQQSGKWRRASRERRIGNSLEKFFQRCPKPTPQQISHIAGCLQLQKDVVRVWFYNRSKMGSRPTNDASP

SEQ ID NO: 873642 - protein, 173 aa, Homo sapiens
SKGCGQTQCRCHKTRPTGVGDFSCHPHTPVSAPFLQVREGAFALHRSFIFKKYVHSHPPSPLVLSDNCCCWYRPPLLLCLLLVSCVNWIFFGSPCNSFGVCLPVLLKMRFLFSLLVLFGWFQEEKGRMLSSCSRVRTESLSISSLPLPAALHVCDCAPWVLLFWVHSYFVSLL

SEQ ID NO: 873643 - protein, 113 aa, Homo sapiens
FDACPIPRTPETHNTGDNEAKSRVFGHFGRSTLAESAGGLQRPKVHLLLTVCSSLLPPPALHRLKSRRPLYRRQLQLLRRKSLSFPFLAPLTPCTHSHFCQAWASRRARGKDQ

SEQ ID NO: 873644 - protein, 77 aa, Homo sapiens
FGQSRTPSNTRGLDCGRSIARAIPGDGDGEMEAQKEKETFLRSHTGARGAARLQPNVVEFLLISGFIIQVTLMFSVL

SEQ ID NO: 873645 - protein, 199 aa, Homo sapiens
LRHRGGALQGGAQEPILGELEHGGLQVPALPHGEAAEAQREFEHCARGTAVLGDRAPPPQLLAWVLSPSLPGAGGDGGRLRVSAGRGAPRPPGTHAGPRTLRAAPVPACVSASTPPRKQRGPAPTLASPERGVPQCSGGLKGSSSLTRADAEAEEALRRSEGRQHVVTSQEFRTTTALTLTLEIRFCAKMGVTKEQMYK

SEQ ID NO: 873646 - protein, 110 aa, Homo sapiens
PGYSHASVHNFHPESYFSDCPHGESMLFPSSYKMLLTDSIHILLILQEPSQISLLPISLPCYTQKWNESPRWLKDALLFWNAFSWCISRLVQFTREKMPGSHSVTQAGVQ

SEQ ID NO: 873647 - protein, 367 aa, Homo sapiens
MLLTLAGGALFFPGLFALCTWALRRSQPGWSRTDCVMISTRYRRRRDAPRGPGRCPPHPTRPRGPGRKRGAAGSPGAAPSASRRPEFPKPLRVLPWRELGPGRAGMADEPPEPAPHICLRLGRVRPKGRGRAPCGPRTGLSARAVLSARARLVSSVHAVLATGSGIVIIRSCDDVITGRHWLAREYVWFLIPYMIYDSYAMYLCEWCRTRDQNRAPSLTLRNFLSRNRLMITHHAVILFVLVPVAQRLRGDLGDFFVGCIFTAELSTPFVSLGRVLIQLKQQHTLLYKVNGILTLATFLSCRILLFPFMYWSYGRQQGLSLLQVPFSIPFYCNVANAFLVAPQIYWFCLLCRKAVRLFDTPQAKKDG

SEQ ID NO: 873648 - protein, 103 aa, Homo sapiens
FLRSYLKKDPWAWHYNHFAVRGGLTGPKVVLMQAQGSFLRSYLKSSGRWKHGVGSVDQGGKCLHICLSLYQRLPTFQTTQDSTRGTGPAEARDDLVLGSNVVL

SEQ ID NO: 873649 - protein, 257 aa, Homo sapiens
MLLTLAGGALFFPGLFALCTWALRRSQPGWSRTDCVMISTRLVSSVHAVLATGSGIVIIRSCDDVITGRHWLAREYVWFLIPYMIYDSYAMYLCEWCRTRDQNRAPSLTLRNFLSRNRLMITHHAVILFVLVPVAQRLRGDLGDFFVGCIFTAELSTPFVSLGRVLIQLKQQHTLLYKVNGILTLATFLSCRILLFPFMYWSYGRQQGLSLLQVPFSIPFYCNVANAFLVAPQIYWFCLLCRKAVRLFDTPQAKKDG

SEQ ID NO: 873650 - protein, 257 aa, Homo sapiens; identical to SEQ ID NO: 873649

SEQ ID NO: 873651 - protein, 257 aa, Homo sapiens; identical to SEQ ID NO: 873649

SEQ ID NO: 873652 - protein, 225 aa, Homo sapiens
MLLTLAGGALFFPGLFALCTWALRRSQPGWSRTDCVMISTRLVSSVHAVLATGSGIVIIRSCDDVITGRHWLAREYVWFLIPYMIYDSYAMYLCEWCRTRDQNRAPSLTLRNFLSRNRLMITHHAVILFVLVPVAQLKQQHTLLYKVNGILTLATFLSCRILLFPFMYWSYGRQQGLSLLQVPFSIPFYCNVANAFLVAPQIYWFCLLCRKAVRLFDTPQAKKDG

SEQ ID NO: 873653 - protein, 257 aa, Homo sapiens; identical to SEQ ID NO: 873649

SEQ ID NO: 873654 - protein, 147 aa, Homo sapiens
MSDAAEAPREATGENGETEMKEEEEPNPNYKEVEDPQQESKDDTIRTGDESQEEDEENGRGRKRGRSDGDTRPDGPRDTDGPKTICYLRQNNLRTKGCDESPKEDRAGLQGTYPGKENTARIEGPQAERSTDSSPLKSRFGRKHHGF

SEQ ID NO: 873655 - protein, 392 aa, Homo sapiens
RVVVFSDSSCSSSYFLCLNFPTKTPSPEPSNCEGLMEKYVAAMVLSAAGDALGYYNGKWEFLQDGEKIHRQLAQLGGLDALDVGRWRVSDDTVMHLATAEALVEAGKAPKLTQLYYLLAKHYQDCMEDMDGRAPGGASVHNAMQLKPGKPNGWRIPFNSHEGGCGAAMRAMCIGLRFPHHSQLDTLIQVSIESGRMTHHHPTGYLGALASALFTAYAVNSRPPLQWGKGLMELLPEAKKYIVQSGYFVEENLQHWSYFQTKWENYLKLRGILDGESAPTFPESFGVKERDQFYTSLSYSGWGGSSGHDAPMIAYDAVLAAGDSWKELAHRAFFHGGDSDSTAAIAGCWWGVMYGFKGVSPSNYEKLEYRNRLEETARALYSLGSKEDTVISL

SEQ ID NO: 873656 - protein, 392 aa, Homo sapiens; identical to SEQ ID NO: 873655

SEQ ID NO: 873657 - protein, 392 aa, Homo sapiens; identical to SEQ ID NO: 873655

SEQ ID NO: 873658 - protein, 357 aa, Homo sapiens
MEKYVAAMVLSAAGDALGYYNGKWEFLQDGEKIHRQLAQLGGLDALDVGRWRVSDDTVMHLATAEALVEAGKAPKLTQLYYLLAKHYQDCMEDMDGRAPGGASVHNAMQLKPGKPNGWRIPFNSHEGGCGAAMRAMCIGLRFPHHSQLDTLIQVSIESGRMTHHHPTGYLGALASALFTAYAVNSRPPLQWGKGLMELLPEAKKYIVQSGYFVEENLQHWSYFQTKWENYLKLRGILDGESAPTFPESFGVKERDQFYTSLSYSGWGGSSGHDAPMIAYDAVLAAGDSWKELAHRAFFHGGDSDSTAAIAGCWWGVMYGFKGVSPSNYEKLEYRNRLEETARALYSLGSKEDTVISL

SEQ ID NO: 873659 - protein, 136 aa, Homo sapiens
GDRSRYWKHLGTMTAHTSPSPHGHTHPTPPLPRHTHIPAYKLRWEGRRKKQKASITQDLSFSLKLRGSLATPHGPQGSPSAATERLRRTYRAHVCRDTDPSSPRPLLFCSSPLEPPSIQLVRPQPSPLPCQFQHTN

SEQ ID NO: 873660 - protein, 130 aa, Homo sapiens
REANEKVLKEVFAKHGPLLEVLLIKGRTSKSRDFVVIIFENAADAKNAARDMNGKSLDGKEIKVEQAKKPSFPSGGRRRPPPSSRNRSPSGSLRSARGSSGGTRPWLPSHEGHLDDGGYALDLNTSSSRG

SEQ ID NO: 873661 - protein, 1863 aa, Homo sapiens
MDLSALRVEEVQNVINAMQKILECPICLELIKEPVSTKCDHIFCKFCMLKLLNQKKGPSQCPLCKNDITKRSLQESTRFSQLVEELLKIICAFQLDTGLEYANSYNFAKKENNSPEHLKDEVSIIQSMGYRNRAKRLLQSEPENPSLQETSLSVQLSNLGTVRTLRTKQRIQPQKTSVYIELGSDSSEDTVNKATYCSVGDQELLQITPQGTRDEISLDSAKKAACEFSETDVTNTEHHQPSNNDLNTTEKRAAERHPEKYQGSSVSNLHVEPCGTNTHASSLQHENSSLLLTKDRMNVEKAEFCNKSKQPGLARSQHNRWAGSKETCNDRRTPSTEKKVDLNADPLCERKEWNKQKLPCSENPRDTEDVPWITLNSSIQKVNEWFSRSDELLGSDDSHDGESESNAKVADVLDVLNEVDEYSGSSEKIDLLASDPHEALICKSERVHSKSVESNIEDKIFGKTYRKKASLPNLSHVTENLIIGAFVTEPQIIQERPLTNKLKRKRRPTSGLHPEDFIKKADLAVQKTPEMINQGTNQTEQNGQVMNITNSGHENKTKGDSIQNEKNPNPIESLEKESAFKTKAEPISSSISNMELELNIHNSKAPKKNRLRRKSSTRHIHALELVVSRNLSPPNCTELQIDSCSSSEEIKKKKYNQMPVRHSRNLQLMEGKEPATGAKKSNKPNEQTSKRHDSDTFPELKLTNAPGSFTKCSNTSELKEFVNPSLPREEKEEKLETVKVSNNAEDPKDLMLSGERVLQTERSVESSSISLVPGTDYGTQESISLLEVSTLGKAKTEPNKCVSQCAAFENPKGLIHGCSKDNRNDTEGFKYPLGHEVNHSRETSIEMEESELDAQYLQNTFKVSKRQSFAPFSNPGNAEEECATFSAHSGSLKKQSPKVTFECEQKEENQGKNESNIKPVQTVNITAGFPVVGQKDKPVDNAKCSIKGGSRFCLSSQFRGNETGLITPNKHGLLQNPYRIPPLFPIKSFVKTKCKKNLLEENFEEHSMSPEREMGNENIPSTVSTISRNNIRENVFKEASSSNINEVGSSTNEVGSSINEIGSSDENIQAELGRNRGPKLNAMLRLGVLQPEVYKQSLPGSNCKHPEIKKQEYEEVVQTVNTDFSPYLISDNLEQPMGSSHASQVCSETPDDLLDDGEIKEDTSFAENDIKESSAVFSKSVQKGELSRSPSPFTHTHLAQGYRRGAKKLESSEENLSSEDEELPCFQHLLFGKVNNIPSQSTRHSTVATECLSKNTEENLLSLKNSLNDCSNQVILAKASQEHHLSEETKCSASLFSSQCSELEDLTANTNTQDPFLIGSSKQMRHQSESQGVGLSDKELVSDDEERGTGLEENNQEEQSMDSNLGEAASGCESETSVSEDCSGLSSQSDILTTQQRDTMQHNLIKLQQEMAELEAVLEQHGSQPSNSYPSIISDSSALEDLRNPEQSTSEKAVLTSQKSSEYPISQNPEGLSADKFEVSADSSTSKNKEPGVERSSPSKCPSLDDRWYMHSCSGSLQNRNYPSQEELIKVVDVEEQQLEESGPHDLTETSYLPRQDLEGTPYLESGISLFSDDPESDPSEDRAPESARVGNIPSSTSALKVPQLKVAESAQSPAAAHTTDTAGYNAMEESVSREKPELTASTERVNKRMSMVVSGLTPEEFMLVYKFARKHHITLTNLITEETTHVVMKTDAEFVCERTLKYFLGIAGGKWVVSYFWVTQSIKERKMLNEHDFEVRGDVVNGRNHQGPKRARESQDRKIFRGLEICCYGPFTNMPTDQLEWMVQLCGASVVKELSSFTLGTGVHPIVVVQPDAWTEDNGFHAIGQMCEAPVVTREWVLDSVALYQCQELDTYLIPQIPHSHY

SEQ ID NO: 873662 - protein, 1816 aa, Homo sapiens
MLKLLNQKKGPSQCPLCKNDITKRSLQESTRFSQLVEELLKIICAFQLDTGLEYANSYNFAKKENNSPEHLKDEVSIIQSMGYRNRAKRLLQSEPENPSLQETSLSVQLSNLGTVRTLRTKQRIQPQKTSVYIELGSDSSEDTVNKATYCSVGDQELLQITPQGTRDEISLDSAKKAACEFSETDVTNTEHHQPSNNDLNTTEKRAAERHPEKYQGSSVSNLHVEPCGTNTHASSLQHENSSLLLTKDRMNVEKAEFCNKSKQPGLARSQHNRWAGSKETCNDRRTPSTEKKVDLNADPLCERKEWNKQKLPCSENPRDTEDVPWITLNSSIQKVNEWFSRSDELLGSDDSHDGESESNAKVADVLDVLNEVDEYSGSSEKIDLLASDPHEALICKSERVHSKSVESNIEDKIFGKTYRKKASLPNLSHVTENLIIGAFVTEPQIIQERPLTNKLKRKRRPTSGLHPEDFIKKADLAVQKTPEMINQGTNQTEQNGQVMNITNSGHENKTKGDSIQNEKNPNPIESLEKESAFKTKAEPISSSISNMELELNIHNSKAPKKNRLRRKSSTRHIHALELVVSRNLSPPNCTELQIDSCSSSEEIKKKKYNQMPVRHSRNLQLMEGKEPATGAKKSNKPNEQTSKRHDSDTFPELKLTNAPGSFTKCSNTSELKEFVNPSLPREEKEEKLETVKVSNNAEDPKDLMLSGERVLQTERSVESSSISLVPGTDYGTQESISLLEVSTLGKAKTEPNKCVSQCAAFENPKGLIHGCSKDNRNDTEGFKYPLGHEVNHSRETSIEMEESELDAQYLQNTFKVSKRQSFAPFSNPGNAEEECATFSAHSGSLKKQSPKVTFECEQKEENQGKNESNIKPVQTVNITAGFPVVGQKDKPVDNAKCSIKGGSRFCLSSQFRGNETGLITPNKHGLLQNPYRIPPLFPIKSFVKTKCKKNLLEENFEEHSMSPEREMGNENIPSTVSTISRNNIRENVFKEASSSNINEVGSSTNEVGSSINEIGSSDENIQAELGRNRGPKLNAMLRLGVLQPEVYKQSLPGSNCKHPEIKKQEYEEVVQTVNTDFSPYLISDNLEQPMGSSHASQVCSETPDDLLDDGEIKEDTSFAENDIKESSAVFSKSVQKGELSRSPSPFTHTHLAQGYRRGAKKLESSEENLSSEDEELPCFQHLLFGKVNNIPSQSTRHSTVATECLSKNTEENLLSLKNSLNDCSNQVILAKASQEHHLSEETKCSASLFSSQCSELEDLTANTNTQDPFLIGSSKQMRHQSESQGVGLSDKELVSDDEERGTGLEENNQEEQSMDSNLGEAASGCESETSVSEDCSGLSSQSDILTTQQRDTMQHNLIKLQQEMAELEAVLEQHGSQPSNSYPSIISDSSALEDLRNPEQSTSEKAVLTSQKSSEYPISQNPEGLSADKFEVSADSSTSKNKEPGVERSSPSKCPSLDDRWYMHSCSGSLQNRNYPSQEELIKVVDVEEQQLEESGPHDLTETSYLPRQDLEGTPYLESGISLFSDDPESDPSEDRAPESARVGNIPSSTSALKVPQLKVAESAQSPAAAHTTDTAGYNAMEESVSREKPELTASTERVNKRMSMVVSGLTPEEFMLVYKFARKHHITLTNLITEETTHVVMKTDAEFVCERTLKYFLGIAGGKWVVSYFWVTQSIKERKMLNEHDFEVRGDVVNGRNHQGPKRARESQDRKIFRGLEICCYGPFTNMPTDQLEWMVQLCGASVVKELSSFTLGTGVHPIVVVQPDAWTEDNGFHAIGQMCEAPVVTREWVLDSVALYQCQELDTYLIPQIPHSHY

SEQ ID NO: 873663 - protein, 1496 aa, Homo sapiens
MDLSALRVEEVQNVINAMQKILECPICLELIKEPVSTKCDHIFCKFCMLKLLNQKKGPSQCPLCKNDITKRSLQESTRFSQLVEELLKIICAFQLDTGLEYANSYNFAKKENNSPEHLKDEVSIIQSMGYRNRAKRLLQSEPENPSLQETSLSVQLSNLGTVRTLRTKQRIQPQKTSVYIELGSDSSEDTVNKATYCSVGDQELLQITPQGTRDEISLDSAKKAACEFSETDVTNTEHHQPSNNDLNTTEKRAAERHPEKYQGSSVSNLHVEPCGTNTHASSLQHENSSLLLTKDRMNVEKAEFCNKSKQPGLARSQHNRWAGSKETCNDRRTPSTEKKVDLNADPLCERKEWNKQKLPCSENPRDTEDVPWITLNSSIQKVNEWFSRSDELLGSDDSHDGESESNAKVADVLDVLNEVDEYSGSSEKIDLLASDPHEALICKSERVHSKSVESNIEDKIFGKTYRKKASLPNLSHVTENLIIGAFVTEPQIIQERPLTNKLKRKRRPTSGLHPEDFIKKADLAVQKTPEMINQGTNQTEQNGQVMNITNSGHENKTKGDSIQNEKNPNPIESLEKESAFKTKAEPISSSISNMELELNIHNSKAPKKNRLRRKSSTRHIHALELVVSRNLSPPNCTELQIDSCSSSEEIKKKKYNQMPVRHSRNLQLMEGKEPATGAKKSNKPNEQTSKRHDSDTFPELKLTNAPGSFTKCSNTSELKEFVNPSLPREEKEEKLETVKVSNNAEDPKDLMLSGERVLQTERSVESSSISLVPGTDYGTQESISLLEVSTLGKAKTEPNKCVSQCAAFENPKGLIHGCSKDNRNDTEGFKYPLGHEVNHSRETSIEMEESELDAQYLQNTFKVSKRQSFAPFSNPGNAEEECATFSAHSGSLKKQSPKVTFECEQKEENQGKNESNIKPVQTVNITAGFPVVGQKDKPVDNAKCSIKGGSRFCLSSQFRGNETGLITPNKHGLLQNPYRIPPLFPIKSFVKTKCKKNLLEENFEEHSMSPEREMGNENIPSTVSTISRNNIRENVFKEASSSNINEVGSSTNEVGSSINEIGSSDENIQAELGRNRGPKLNAMLRLGVLQPEVYKQSLPGSNCKHPEIKKQEYEEVVQTVNTDFSPYLISDNLEQPMGSSHASQVCSETPDDLLDDGEIKEDTSFAENDIKESSAVFSKSVQKGELSRSPSPFTHTHLAQGYRRGAKKLESSEENLSSEDEELPCFQHLLFGKVNNIPSQSTRHSTVATECLSKNTEENLLSLKNSLNDCSNQVILAKASQEHHLSEETKCSASLFSSQCSELEDLTANTNTQDPFLIGSSKQMRHQSESQGVGLSDKELVSDDEERGTGLEENNQEEQSMDSNLGEAASGCESETSVSEDCSGLSSQSDILTTQQRDTMQHNLIKLQQEMAELEAVLEQHGSQPSNSYPSIISDSSALEDLRNPEQSTSEKAVLTSQKSSEYPISQNPEGLSADKFEVSADSSTSKNKEPGVERC

SEQ ID NO: 873664 - protein, 1598 aa, Homo sapiens
MDLSALRVEEVQNVINAMQKILECPICLELIKEPVSTKCDHIFCKFCMLKLLNQKKGPSQCPLCKNDITKRSLQESTRFSQLVEELLKIICAFQLDTGLEYANSYNFAKKENNSPEHLKDEVSIIQSMGYRNRAKRLLQSEPENPSLQETSLSVQLSNLGTVRTLRTKQRIQPQKTSVYIELGSDSSEDTVNKATYCSVGDQELLQITPQGTRDEISLDSAKKAACEFSETDVTNTEHHQPSNNDLNTTEKRAAERHPEKYQGSSVSNLHVEPCGTNTHASSLQHENSSLLLTKDRMNVEKAEFCNKSKQPGLARSQHNRWAGSKETCNDRRTPSTEKKVDLNADPLCERKEWNKQKLPCSENPRDTEDVPWITLNSSIQKVNEWFSRSDELLGSDDSHDGESESNAKVADVLDVLNEVDEYSGSSEKIDLLASDPHEALICKSERVHSKSVESNIEDKIFGKTYRKKASLPNLSHVTENLIIGAFVTEPQIIQERPLTNKLKRKRRPTSGLHPEDFIKKADLAVQKTPEMINQGTNQTEQNGQVMNITNSGHENKTKGDSIQNEKNPNPIESLEKESAFKTKAEPISSSISNMELELNIHNSKAPKKNRLRRKSSTRHIHALELVVSRNLSPPNCTELQIDSCSSSEEIKKKKYNQMPVRHSRNLQLMEGKEPATGAKKSNKPNEQTSKRHDSDTFPELKLTNAPGSFTKCSNTSELKEFVNPSLPREEKEEKLETVKVSNNAEDPKDLMLSGERVLQTERSVESSSISLVPGTDYGTQESISLLEVSTLGKAKTEPNKCVSQCAAFENPKGLIHGCSKDNRNDTEGFKYPLGHEVNHSRETSIEMEESELDAQYLQNTFKVSKRQSFAPFSNPGNAEEECATFSAHSGSLKKQSPKVTFECEQKEENQGKNESNIKPVQTVNITAGFPVVGQKDKPVDNAKCSIKGGSRFCLSSQFRGNETGLITPNKHGLLQNPYRIPPLFPIKSFVKTKCKKNLLEENFEEHSMSPEREMGNENIPSTVSTISRNNIRENVFKEASSSNINEVGSSTNEVGSSINEIGSSDENIQAELGRNRGPKLNAMLRLGVLQPEVYKQSLPGSNCKHPEIKKQEYEEVVQTVNTDFSPYLISDNLEQPMGSSHASQVCSETPDDLLDDGEIKEDTSFAENDIKESSAVFSKSVQKGELSRSPSPFTHTHLAQGYRRGAKKLESSEENLSSEDEELPCFQHLLFGKVNNIPSQSTRHSTVATECLSKNTEENLLSLKNSLNDCSNQVILAKASQEHHLSEETKCSASLFSSQCSELEDLTANTNTQDPFLIGSSKQMRHQSESQGVGLSDKELVSDDEERGTGLEENNQEEQSMDSNLGEAASGCESETSVSEDCSGLSSQSDILTTQQRDTMQHNLIKLQQEMAELEAVLEQHGSQPSNSYPSIISDSSALEDLRNPEQSTSEKGVTQSIKERKMLNEHDFEVRGDVVNGRNHQGPKRARESQDRKIFRGLEICCYGPFTNMPTDQLEWMVQLCGASVVKELSSFTLGTGVHPIVVVQPDAWTEDNGFHAIGQMCEAPVVTREWVLDSVALYQCQELDTYLIPQIPHSHY

SEQ ID NO: 873665 - protein, 1680 aa, Homo sapiens
KLRLRGVSSLRLPGPRTRLWGFSDNWAPALRRPSPSALGKAACEFSETDVTNTEHHQPSNNDLNTTEKRAAERHPEKYQGSSVSNLHVEPCGTNTHASSLQHENSSLLLTKDRMNVEKAEFCNKSKQPGLARSQHNRWAGSKETCNDRRTPSTEKKVDLNADPLCERKEWNKQKLPCSENPRDTEDVPWITLNSSIQKVNEWFSRSDELLGSDDSHDGESESNAKVADVLDVLNEVDEYSGSSEKIDLLASDPHEALICKSERVHSKSVESNIEDKIFGKTYRKKASLPNLSHVTENLIIGAFVTEPQIIQERPLTNKLKRKRRPTSGLHPEDFIKKADLAVQKTPEMINQGTNQTEQNGQVMNITNSGHENKTKGDSIQNEKNPNPIESLEKESAFKTKAEPISSSISNMELELNIHNSKAPKKNRLRRKSSTRHIHALELVVSRNLSPPNCTELQIDSCSSSEEIKKKKYNQMPVRHSRNLQLMEGKEPATGAKKSNKPNEQTSKRHDSDTFPELKLTNAPGSFTKCSNTSELKEFVNPSLPREEKEEKLETVKVSNNAEDPKDLMLSGERVLQTERSVESSSISLVPGTDYGTQESISLLEVSTLGKAKTEPNKCVSQCAAFENPKGLIHGCSKDNRNDTEGFKYPLGHEVNHSRETSIEMEESELDAQYLQNTFKVSKRQSFAPFSNPGNAEEECATFSAHSGSLKKQSPKVTFECEQKEENQGKNESNIKPVQTVNITAGFPVVGQKDKPVDNAKCSIKGGSRFCLSSQFRGNETGLITPNKHGLLQNPYRIPPLFPIKSFVKTKCKKNLLEENFEEHSMSPEREMGNENIPSTVSTISRNNIRENVFKEASSSNINEVGSSTNEVGSSINEIGSSDENIQAELGRNRGPKLNAMLRLGVLQPEVYKQSLPGSNCKHPEIKKQEYEEVVQTVNTDFSPYLISDNLEQPMGSSHASQVCSETPDDLLDDGEIKEDTSFAENDIKESSAVFSKSVQKGELSRSPSPFTHTHLAQGYRRGAKKLESSEENLSSEDEELPCFQHLLFGKVNNIPSQSTRHSTVATECLSKNTEENLLSLKNSLNDCSNQVILAKASQEHHLSEETKCSASLFSSQCSELEDLTANTNTQDPFLIGSSKQMRHQSESQGVGLSDKELVSDDEERGTGLEENNQEEQSMDSNLGEAASGCESETSVSEDCSGLSSQSDILTTQQRDTMQHNLIKLQQEMAELEAVLEQHGSQPSNSYPSIISDSSALEDLRNPEQSTSEKAVLTSQKSSEYPISQNPEGLSADKFEVSADSSTSKNKEPGVERSSPSKCPSLDDRWYMHSCSGSLQNRNYPSQEELIKVVDVEEQQLEESGPHDLTETSYLPRQDLEGTPYLESGISLFSDDPESDPSEDRAPESARVGNIPSSTSALKVPQLKVAESAQSPAAAHTTDTAGYNAMEESVSREKPELTASTERVNKRMSMVVSGLTPEEFMLVYKFARKHHITLTNLITEETTHVVMKTDAEFVCERTLKYFLGIAGGKWVVSYFWVTQSIKERKMLNEHDFEVRGDVVNGRNHQGPKRARESQDRKIFRGLEICCYGPFTNMPTDQLEWMVQLCGASVVKELSSFTLGTGVHPIVVVQPDAWTEDNGFHAIGQMCEAPVVTREWVLDSVALYQCQELDTYLIPQIPHSHY

SEQ ID NO: 873666 - protein, 721 aa, Homo sapiens
MDLSALRVEEVQNVINAMQKILECPICLELIKEPVSTKCDHIFCKFCMLKLLNQKKGPSQCPLCKNDITKRSLQESTRFSQLVEELLKIICAFQLDTGLEYANSYNFAKKENNSPEHLKDEVSIIQSMGYRNRAKRLLQSEPENPSLQETSLSVQLSNLGTVRTLRTKQRIQPQKTSVYIELGSDSSEDTVNKATYCSVGDQELLQITPQGTRDEISLDSAKKGEAASGCESETSVSEDCSGLSSQSDILTTQQRDTMQHNLIKLQQEMAELEAVLEQHGSQPSNSYPSIISDSSALEDLRNPEQSTSEKAVLTSQKSSEYPISQNPEGLSADKFEVSADSSTSKNKEPGVERSSPSKCPSLDDRWYMHSCSGSLQNRNYPSQEELIKVVDVEEQQLEESGPHDLTETSYLPRQDLEGTPYLESGISLFSDDPESDPSEDRAPESARVGNIPSSTSALKVPQLKVAESAQSPAAAHTTDTAGYNAMEESVSREKPELTASTERVNKRMSMVVSGLTPEEFMLVYKFARKHHITLTNLITEETTHVVMKTDAEFVCERTLKYFLGIAGGKWVVSYFWVTQSIKERKMLNEHDFEVRGDVVNGRNHQGPKRARESQDRKIFRGLEICCYGPFTNMPTDQLEWMVQLCGASVVKELSSFTLGTGVHPIVVVQPDAWTEDNGFHAIGQMCEAPVVTREWVLDSVALYQCQELDTYLIPQIPHSHY

SEQ ID NO: 873667 - protein, 680 aa, Homo sapiens
MDLSALRVEEVQNVINAMQKILECPICLELIKEPVSTKCDHIFCKFCMLKLLNQKKGPSQCPLCKNDITKRSLQESTRFSQLVEELLKIICAFQLDTGLEYANSYNFAKKENNSPEHLKDEVSIIQSMGYRNRAKRLLQSEPENPSLQETSLSVQLSNLGTVRTLRTKQRIQPQKTSVYIELGEAASGCESETSVSEDCSGLSSQSDILTTQQRDTMQHNLIKLQQEMAELEAVLEQHGSQPSNSYPSIISDSSALEDLRNPEQSTSEKAVLTSQKSSEYPISQNPEGLSADKFEVSADSSTSKNKEPGVERSSPSKCPSLDDRWYMHSCSGSLQNRNYPSQEELIKVVDVEEQQLEESGPHDLTETSYLPRQDLEGTPYLESGISLFSDDPESDPSEDRAPESARVGNIPSSTSALKVPQLKVAESAQSPAAAHTTDTAGYNAMEESVSREKPELTASTERVNKRMSMVVSGLTPEEFMLVYKFARKHHITLTNLITEETTHVVMKTDAEFVCERTLKYFLGIAGGKWVVSYFWVTQSIKERKMLNEHDFEVRGDVVNGRNHQGPKRARESQDRKIFRGLEICCYGPFTNMPTDQLEWMVQLCGASVVKELSSFTLGTGVHPIVVVQPDAWTEDNGFHAIGQMCEAPVVTREWVLDSVALYQCQELDTYLIPQIPHSHY

SEQ ID NO: 873668 - protein, 1815 aa, Homo sapiens
MDLSALRVEEVQNVINAMQKILECPICLELIKEPVSTKCDHIFCKFCMLKLLNQKKGPSQCPLCKNDITKRSLQESTRFSQLVEELLKIICAFQLDTGLEYANSYNFAKKENNSPEHLKDEVSIIQSMGYRNRAKRLLQSEPENPSLQETSLSVQLSNLGTVRTLRTKQRIQPQKTSVYIELGSDSSEDTVNKATYCSVGDQELLQITPQGTRDEISLDSAKKAACEFSETDVTNTEHHQPSNNDLNTTEKRAAERHPEKYQGSSVSNLHVEPCGTNTHASSLQHENSSLLLTKDRMNVEKAEFCNKSKQPGLARSQHNRWAGSKETCNDRRTPSTEKKVDLNADPLCERKEWNKQKLPCSENPRDTEDVPWITLNSSIQKVNEWFSRSDELLGSDDSHDGESESNAKVADVLDVLNEVDEYSGSSEKIDLLASDPHEALICKSERVHSKSVESNIEDKIFGKTYRKKASLPNLSHVTENLIIGAFVTEPQIIQERPLTNKLKRKRRPTSGLHPEDFIKKADLAVQKTPEMINQGTNQTEQNGQVMNITNSGHENKTKGDSIQNEKNPNPIESLEKESAFKTKAEPISSSISNMELELNIHNSKAPKKNRLRRKSSTRHIHALELVVSRNLSPPNCTELQIDSCSSSEEIKKKKYNQMPVRHSRNLQLMEGKEPATGAKKSNKPNEQTSKRHDSDTFPELKLTNAPGSFTKCSNTSELKEFVNPSLPREEKEEKLETVKVSNNAEDPKDLMLSGERVLQTERSVESSSISLVPGTDYGTQESISLLEVSTLGKAKTEPNKCVSQCAAFENPKGLIHGCSKDNRNDTEGFKYPLGHEVNHSRETSIEMEESELDAQYLQNTFKVSKRQSFAPFSNPGNAEEECATFSAHSGSLKKQSPKVTFECEQKEENQGKNESNIKPVQTVNITAGFPVVGQKDKPVDNAKCSIKGGSRFCLSSQFRGNETGLITPNKHGLLQNPYRIPPLFPIKSFVKTKCKKNLLEENFEEHSMSPEREMGNENIPSTVSTISRNNIRENVFKEASSSNINEVGSSTNEVGSSINEIGSSDENIQAELGRNRGPKLNAMLRLGVLQPEVYKQSLPGSNCKHPEIKKQEYEEVVQTVNTDFSPYLISDNLEQPMGSSHASQVCSETPDDLLDDGEIKEDTSFAENDIKESSAVFSKSVQKGELSRSPSPFTHTHLAQGYRRGAKKLESSEENLSSEDEELPCFQHLLFGKVNNIPSQSTRHSTVATECLSKNTEENLLSLKNSLNDCSNQVILAKASQEHHLSEETKCSASLFSSQCSELEDLTANTNTQDPFLIGSSKQMRHQSESQGVGLSDKELVSDDEERGTGLEENNQEEQSMDSNLGEAASGCESETSVSEDCSGLSSQSDILTTQQRDTMQHNLIKLQQEMAELEAVLEQHGSQPSNSYPSIISDSSALEDLRNPEQSTSEKAVLTSQKSSEYPISQNPEGLSADKFEVSADSSTSKNKEPGVERSSPSKCPSLDDRWYMHSCSGSLQNRNYPSQEELIKVVDVEEQQLEESGPHDLTETSYLPRQDLEGTPYLESGISLFSDDPESDPSEDRAPESARVGNIPSSTSALKVPQLKVAESAQSPAAAHTTDTAGYNAMEESVSREKPELTASTERVNKRMSMVVSGLTPEEFMLVYKFARKHHITLTNLITEETTHVVMKTDAEFVCERTLKYFLGIAGGKWVVSYFWVTQSIKERKMLNEKPPRSKASKRIPGQKDLQGARNLLLWALHQHAHRSTGMDGTAVWCFCGEGAFIIHPWHRCPPNCGCAARCLDRGQWLPCNWADV

SEQ ID NO: 873669 - protein, 1474 aa, Homo sapiens
MDLSALRVEEVQNVINAMQKILECPICLELIKEPVSTKCDHIFCKFCMLKLLNQKKGPSQCPLCKNDITKRSLQESTRFSQLVEELLKIICAFQLDTGLEYANSYNFAKKENNSPEHLKDEVSIIQSMGYRNRAKRLLQSEPENPSLQETSLSVQLSNLGTVRTLRTKQRIQPQKTSVYIELGSDSSEDTVNKATYCSVGDQELLQITPQGTRDEISLDSAKKAACEFSETDVTNTEHHQPSNNDLNTTEKRAAERHPEKYQGSSVSNLHVEPCGTNTHASSLQHENSSLLLTKDRMNVEKAEFCNKSKQPGLARSQHNRWAGSKETCNDRRTPSTEKKVDLNADPLCERKEWNKQKLPCSENPRDTEDVPWITLNSSIQKVNEWFSRSDELLGSDDSHDGESESNAKVADVLDVLNEVDEYSGSSEKIDLLASDPHEALICKSERVHSKSVESNIEDKIFGKTYRKKASLPNLSHVTENLIIGAFVTEPQIIQERPLTNKLKRKRRPTSGLHPEDFIKKADLAVQKTPEMINQGTNQTEQNGQVMNITNSGHENKTKGDSIQNEKNPNPIESLEKESAFKTKAEPISSSISNMELELNIHNSKAPKKNRLRRKSSTRHIHALELVVSRNLSPPNCTELQIDSCSSSEEIKKKKYNQMPVRHSRNLQLMEGKEPATGAKKSNKPNEQTSKRHDSDTFPELKLTNAPGSFTKCSNTSELKEFVNPSLPREEKEEKLETVKVSNNAEDPKDLMLSGERVLQTERSVESSSISLVPGTDYGTQESISLLEVSTLGKAKTEPNKCVSQCAAFENPKGLIHGCSKDNRNDTEGFKYPLGHEVNHSRETSIEMEESELDAQYLQNTFKVSKRQSFAPFSNPGNAEEECATFSAHSGSLKKQSPKVTFECEQKEENQGKNESNIKPVQTVNITAGFPVVGQKDKPVDNAKCSIKGGSRFCLSSQFRGNETGLITPNKHGLLQNPYRIPPLFPIKSFVKTKCKKNLLEENFEEHSMSPEREMGNENIPSTVSTISRNNIRENVFKEASSSNINEVGSSTNEVGSSINEIGSSDENIQAELGRNRGPKLNAMLRLGVLQPEVYKQSLPGSNCKHPEIKKQEYEEVVQTVNTDFSPYLISDNLEQPMGSSHASQVCSETPDDLLDDGEIKEDTSFAENDIKESSAVFSKSVQKGELSRSPSPFTHTHLAQGYRRGAKKLESSEENLSSEDEELPCFQHLLFGKVNNIPSQSTRHSTVATECLSKNTEENLLSLKNSLNDCSNQVILAKASQEHHLSEETKCSASLFSSQCSELEDLTANTNTQDPFLIGSSKQMRHQSESQGVGLSDKELVSDDEERGTGLEENNQEEQSMDSNLGEAASGCESETSVSEDCSGLSSQSDILTTQQRDTMQHNLIKLQQEMAELEAVLEQHGSQPSNSYPSIISDSSALEDLRNPEQSTSEKGVYCWPNTDILSKILSFPFISF

SEQ ID NO: 873670 - protein, 1863 aa, Homo sapiens; identical to SEQ ID NO: 873661

SEQ ID NO: 873671 - protein, 1822 aa, Homo sapiens
MDLSALRVEEVQNVINAMQKILECPICLELIKEPVSTKCDHIFCKFCMLKLLNQKKGPSQCPLCKNDITKRSLQESTRFSQLVEELLKIICAFQLDTGLEYANSYNFAKKENNSPEHLKDEVSIIQSMGYRNRAKRLLQSEPENPSLQETSLSVQLSNLGTVRTLRTKQRIQPQKTSVYIELAACEFSETDVTNTEHHQPSNNDLNTTEKRAAERHPEKYQGSSVSNLHVEPCGTNTHASSLQHENSSLLLTKDRMNVEKAEFCNKSKQPGLARSQHNRWAGSKETCNDRRTPSTEKKVDLNADPLCERKEWNKQKLPCSENPRDTEDVPWITLNSSIQKVNEWFSRSDELLGSDDSHDGESESNAKVADVLDVLNEVDEYSGSSEKIDLLASDPHEALICKSERVHSKSVESNIEDKIFGKTYRKKASLPNLSHVTENLIIGAFVTEPQIIQERPLTNKLKRKRRPTSGLHPEDFIKKADLAVQKTPEMINQGTNQTEQNGQVMNITNSGHENKTKGDSIQNEKNPNPIESLEKESAFKTKAEPISSSISNMELELNIHNSKAPKKNRLRRKSSTRHIHALELVVSRNLSPPNCTELQIDSCSSSEEIKKKKYNQMPVRHSRNLQLMEGKEPATGAKKSNKPNEQTSKRHDSDTFPELKLTNAPGSFTKCSNTSELKEFVNPSLPREEKEEKLETVKVSNNAEDPKDLMLSGERVLQTERSVESSSISLVPGTDYGTQESISLLEVSTLGKAKTEPNKCVSQCAAFENPKGLIHGCSKDNRNDTEGFKYPLGHEVNHSRETSIEMEESELDAQYLQNTFKVSKRQSFAPFSNPGNAEEECATFSAHSGSLKKQSPKVTFECEQKEENQGKNESNIKPVQTVNITAGFPVVGQKDKPVDNAKCSIKGGSRFCLSSQFRGNETGLITPNKHGLLQNPYRIPPLFPIKSFVKTKCKKNLLEENFEEHSMSPEREMGNENIPSTVSTISRNNIRENVFKEASSSNINEVGSSTNEVGSSINEIGSSDENIQAELGRNRGPKLNAMLRLGVLQPEVYKQSLPGSNCKHPEIKKQEYEEVVQTVNTDFSPYLISDNLEQPMGSSHASQVCSETPDDLLDDGEIKEDTSFAENDIKESSAVFSKSVQKGELSRSPSPFTHTHLAQGYRRGAKKLESSEENLSSEDEELPCFQHLLFGKVNNIPSQSTRHSTVATECLSKNTEENLLSLKNSLNDCSNQVILAKASQEHHLSEETKCSASLFSSQCSELEDLTANTNTQDPFLIGSSKQMRHQSESQGVGLSDKELVSDDEERGTGLEENNQEEQSMDSNLGEAASGCESETSVSEDCSGLSSQSDILTTQQRDTMQHNLIKLQQEMAELEAVLEQHGSQPSNSYPSIISDSSALEDLRNPEQSTSEKAVLTSQKSSEYPISQNPEGLSADKFEVSADSSTSKNKEPGVERSSPSKCPSLDDRWYMHSCSGSLQNRNYPSQEELIKVVDVEEQQLEESGPHDLTETSYLPRQDLEGTPYLESGISLFSDDPESDPSEDRAPESARVGNIPSSTSALKVPQLKVAESAQSPAAAHTTDTAGYNAMEESVSREKPELTASTERVNKRMSMVVSGLTPEEFMLVYKFARKHHITLTNLITEETTHVVMKTDAEFVCERTLKYFLGIAGGKWVVSYFWVTQSIKERKMLNEHDFEVRGDVVNGRNHQGPKRARESQDRKIFRGLEICCYGPFTNMPTDQLEWMVQLCGASVVKELSSFTLGTGVHPIVVVQPDAWTEDNGFHAIGQMCEAPVVTREWVLDSVALYQCQELDTYLIPQIPHSHY

SEQ ID NO: 873672 - protein, 1624 aa, Homo sapiens
MDLSALRVEEVQNVINAMQKILECPICLELIKEPVSTKCDHIFCKFCMLKLLNQKKGPSQCPLCKNDITKRSLQESTRFSQLVEELLKIICAFQLDTGLEYANSYNFAKKENNSPEHLKDEVSIIQSMGYRNRAKRLLQSEPENPSLQETSLSVQLSNLGTVRTLRTKQRIQPQKTSVYIELGSDSSEDTVNKATYCSVGDQELLQITPQGTRDEISLDSAKKAACEFSETDVTNTEHHQPSNNDLNTTEKRAAERHPEKYQGSSVSNLHVEPCGTNTHASSLQHENSSLLLTKDRMNVEKAEFCNKSKQPGLARSQHNRWAGSKETCNDRRTPSTEKKVDLNADPLCERKEWNKQKLPCSENPRDTEDVPWITLNSSIQKVNEWFSRSDELLGSDDSHDGESESNAKVADVLDVLNEVDEYSGSSEKIDLLASDPHEALICKSERVHSKSVESNIEDKIFGKTYRKKASLPNLSHVTENLIIGAFVTEPQIIQERPLTNKLKRKRRPTSGLHPEDFIKKADLAVQKTPEMINQGTNQTEQNGQVMNITNSGHENKTKGDSIQNEKNPNPIESLEKESAFKTKAEPISSSISNMELELNIHNSKAPKKNRLRRKSSTRHIHALELVVSRNLSPPNCTELQIDSCSSSEEIKKKKYNQMPVRHSRNLQLMEGKEPATGAKKSNKPNEQTSKRHDSDTFPELKLTNAPGSFTKCSNTSELKEFVNPSLPREEKEEKLETVKVSNNAEDPKDLMLSGERVLQTERSVESSSISLVPGTDYGTQESISLLEVSTLGKAKTEPNKCVSQCAAFENPKGLIHGCSKDNRNDTEGFKYPLGHEVNHSRETSIEMEESELDAQYLQNTFKVSKRQSFAPFSNPGNAEEECATFSAHSGSLKKQSPKVTFECEQKEENQGKNESNIKPVQTVNITAGFPVVGQKDKPVDNAKCSIKGGSRFCLSSQFRGNETGLITPNKHGLLQNPYRIPPLFPIKSFVKTKCKKNLLEENFEEHSMSPEREMGNENIPSTVSTISRNNIRENVFKEASSSNINEVGSSTNEVGSSINEIGSSDENIQAELGRNRGPKLNAMLRLGVLQPEVYKQSLPGSNCKHPEIKKQEYEEVVQTVNTDFSPYLISDNLEQPMGSSHASQVCSETPDDLLDDGEIKEDTSFAENDIKESSAVFSKSVQKGELSRSPSPFTHTHLAQGYRRGAKKLESSEENLSSEDEELPCFQHLLFGKVNNIPSQSTRHSTVATECLSKNTEENLLSLKNSLNDCSNQVILAKASQEHHLSEETKCSASLFSSQCSELEDLTANTNTQDPFLIGSSKQMRHQSESQGVGLSDKELVSDDEERGTGLEENNQEEQSMDSNLGEAASGCESETSVSEDCSGLSSQSDILTTQQRDTMQHNLIKLQQEMAELEAVLEQHGSQPSNSYPSIISDSSALEDLRNPEQSTSEKDAEFVCERTLKYFLGIAGGKWVVSYFWVTQSIKERKMLNEHDFEVRGDVVNGRNHQGPKRARESQDRKIFRGLEICCYGPFTNMPTDQLEWMVQLCGASVVKELSSFTLGTGVHPIVVVQPDAWTEDNGFHAIGQMCEAPVVTREWVLDSVALYQCQELDTYLIPQIPHSHY

SEQ ID NO: 873673 - protein, 760 aa, Homo sapiens
MDLSALRVEEVQNVINAMQKILECPICLELIKEPVSTKCDHIFCKFCMLKLLNQKKGPSQCPLCKNDITKRSLQESTRFSQLVEELLKIICAFQLDTGLEYANSYNFAKKENNSPEHLKDEVSIIQSMGYRNRAKRLLQSEPENPSLQETSLSVQLSNLGTVRTLRTKQRIQPQKTSVYIELGSDSSEDTVNKATYCSVGDQELLQITPQGTRDEISLDSAKKAACEFSETDVTNTEHHQPSNNDLNTTEKRAAERHPEKYQGEAASGCESETSVSEDCSGLSSQSDILTTQQRDTMQHNLIKLQQEMAELEAVLEQHGSQPSNSYPSIISDSSALEDLRNPEQSTSEKAVLTSQKSSEYPISQNPEGLSADKFEVSADSSTSKNKEPGVERSSPSKCPSLDDRWYMHSCSGSLQNRNYPSQEELIKVVDVEEQQLEESGPHDLTETSYLPRQDLEGTPYLESGISLFSDDPESDPSEDRAPESARVGNIPSSTSALKVPQLKVAESAQSPAAAHTTDTAGYNAMEESVSREKPELTASTERVNKRMSMVVSGLTPEEFMLVYKFARKHHITLTNLITEETTHVVMKTDAEFVCERTLKYFLGIAGGKWVVSYFWVTQSIKERKMLNEHDFEVRGDVVNGRNHQGPKRARESQDRKIFRGLEICCYGPFTNMPTDQLEWMVQLCGASVVKELSSFTLGTGVHPIVVVQPDAWTEDNGFHAIGQMCEAPVVTREWVLDSVALYQCQELDTYLIPQIPHSHY

SEQ ID NO: 873674 - protein, 719 aa, Homo sapiens
MDLSALRVEEVQNVINAMQKILECPICLELIKEPVSTKCDHIFCKFCMLKLLNQKKGPSQCPLCKNDITKRSLQESTRFSQLVEELLKIICAFQLDTGLEYANSYNFAKKENNSPEHLKDEVSIIQSMGYRNRAKRLLQSEPENPSLQETSLSVQLSNLGTVRTLRTKQRIQPQKTSVYIELAACEFSETDVTNTEHHQPSNNDLNTTEKRAAERHPEKYQGEAASGCESETSVSEDCSGLSSQSDILTTQQRDTMQHNLIKLQQEMAELEAVLEQHGSQPSNSYPSIISDSSALEDLRNPEQSTSEKAVLTSQKSSEYPISQNPEGLSADKFEVSADSSTSKNKEPGVERSSPSKCPSLDDRWYMHSCSGSLQNRNYPSQEELIKVVDVEEQQLEESGPHDLTETSYLPRQDLEGTPYLESGISLFSDDPESDPSEDRAPESARVGNIPSSTSALKVPQLKVAESAQSPAAAHTTDTAGYNAMEESVSREKPELTASTERVNKRMSMVVSGLTPEEFMLVYKFARKHHITLTNLITEETTHVVMKTDAEFVCERTLKYFLGIAGGKWVVSYFWVTQSIKERKMLNEHDFEVRGDVVNGRNHQGPKRARESQDRKIFRGLEICCYGPFTNMPTDQLEWMVQLCGASVVKELSSFTLGTGVHPIVVVQPDAWTEDNGFHAIGQMCEAPVVTREWVLDSVALYQCQELDTYLIPQIPHSHY

SEQ ID NO: 873675 - protein, 1793 aa, Homo sapiens
MSLQESTRFSQLVEELLKIICAFQLDTGLEYANSYNFAKKENNSPEHLKDEVSIIQSMGYRNRAKRLLQSEPENPSLQETSLSVQLSNLGTVRTLRTKQRIQPQKTSVYIELGSDSSEDTVNKATYCSVGDQELLQITPQGTRDEISLDSAKKAACEFSETDVTNTEHHQPSNNDLNTTEKRAAERHPEKYQGSSVSNLHVEPCGTNTHASSLQHENSSLLLTKDRMNVEKAEFCNKSKQPGLARSQHNRWAGSKETCNDRRTPSTEKKVDLNADPLCERKEWNKQKLPCSENPRDTEDVPWITLNSSIQKVNEWFSRSDELLGSDDSHDGESESNAKVADVLDVLNEVDEYSGSSEKIDLLASDPHEALICKSERVHSKSVESNIEDKIFGKTYRKKASLPNLSHVTENLIIGAFVTEPQIIQERPLTNKLKRKRRPTSGLHPEDFIKKADLAVQKTPEMINQGTNQTEQNGQVMNITNSGHENKTKGDSIQNEKNPNPIESLEKESAFKTKAEPISSSISNMELELNIHNSKAPKKNRLRRKSSTRHIHALELVVSRNLSPPNCTELQIDSCSSSEEIKKKKYNQMPVRHSRNLQLMEGKEPATGAKKSNKPNEQTSKRHDSDTFPELKLTNAPGSFTKCSNTSELKEFVNPSLPREEKEEKLETVKVSNNAEDPKDLMLSGERVLQTERSVESSSISLVPGTDYGTQESISLLEVSTLGKAKTEPNKCVSQCAAFENPKGLIHGCSKDNRNDTEGFKYPLGHEVNHSRETSIEMEESELDAQYLQNTFKVSKRQSFAPFSNPGNAEEECATFSAHSGSLKKQSPKVTFECEQKEENQGKNESNIKPVQTVNITAGFPVVGQKDKPVDNAKCSIKGGSRFCLSSQFRGNETGLITPNKHGLLQNPYRIPPLFPIKSFVKTKCKKNLLEENFEEHSMSPEREMGNENIPSTVSTISRNNIRENVFKEASSSNINEVGSSTNEVGSSINEIGSSDENIQAELGRNRGPKLNAMLRLGVLQPEVYKQSLPGSNCKHPEIKKQEYEEVVQTVNTDFSPYLISDNLEQPMGSSHASQVCSETPDDLLDDGEIKEDTSFAENDIKESSAVFSKSVQKGELSRSPSPFTHTHLAQGYRRGAKKLESSEENLSSEDEELPCFQHLLFGKVNNIPSQSTRHSTVATECLSKNTEENLLSLKNSLNDCSNQVILAKASQEHHLSEETKCSASLFSSQCSELEDLTANTNTQDPFLIGSSKQMRHQSESQGVGLSDKELVSDDEERGTGLEENNQEEQSMDSNLGEAASGCESETSVSEDCSGLSSQSDILTTQQRDTMQHNLIKLQQEMAELEAVLEQHGSQPSNSYPSIISDSSALEDLRNPEQSTSEKAVLTSQKSSEYPISQNPEGLSADKFEVSADSSTSKNKEPGVERSSPSKCPSLDDRWYMHSCSGSLQNRNYPSQEELIKVVDVEEQQLEESGPHDLTETSYLPRQDLEGTPYLESGISLFSDDPESDPSEDRAPESARVGNIPSSTSALKVPQLKVAESAQSPAAAHTTDTAGYNAMEESVSREKPELTASTERVNKRMSMVVSGLTPEEFMLVYKFARKHHITLTNLITEETTHVVMKTDAEFVCERTLKYFLGIAGGKWVVSYFWVTQSIKERKMLNEHDFEVRGDVVNGRNHQGPKRARESQDRKIFRGLEICCYGPFTNMPTDQLEWMVQLCGASVVKELSSFTLGTGVHPIVVVQPDAWTEDNGFHAIGQMCEAPVVTREWVLDSVALYQCQELDTYLIPQIPHSHY

SEQ ID NO: 873676 - protein, 36 aa, Homo sapiens
VGQEPEAGGARQRPTTVSHAAGSCSCLFTDCADPSP

SEQ ID NO: 873677 - protein, 149 aa, Homo sapiens
SGRGGAPAHRSRQGFWWPWGIRGVDSPGRGSGSCTDQGPVPPSTALRELIEELVNITQNQKAPLCNGSMVWSINLTAGMYCAALESLINVSGCSAIEKTQRMLSGFCPHKVSAGQFSSLHVRDTKIEVAQFVKDLLLHLKKLFREGQFN

SEQ ID NO: 873678 - protein, 104 aa, Homo sapiens
SLCHLCQLWIRNETTMMQGEVAHGAWLPGLFLMHVCISGAGIKSLWACGFTEWWKKTGGVRDRRLNHDNQLVNQHFGSKIIWECIDQVSARLMLHNKWPPNSEA

SEQ ID NO: 873679 - protein, 158 aa, Homo sapiens
GAGCGWGELVAIRSEEWVEAAAAAAAFAVARTPRSASTSRARRATMSTASSSSSSSSSQTPHPPSQRMRRSAAGSPPAVAAAGSGNGAGGGGGVGCAPAAGAGRLLQPIRATVPYQLLRGSQHSPPFAIPPNTHTPTTHNTSQNPHPTTNQTPHLPPP

SEQ ID NO: 873680 - protein, 184 aa, Homo sapiens
MEPSQCVEELEDDVFQPEDGEPVTQPGSLLSADLFAQSLLDCPLSRLQLFPLTHCCGPGLRPTSQEDKATQTLSPASPSQGVMLPCGVTEEPQRLFYGNAGYRLPLPASFPAVLPIGEQPPEGQWQHQAEVQIARKLQCIADQFHRLHVQQHQQNQNRVWWQILLFLHNLALNGEENRNGAGPR

SEQ ID NO: 873681 - protein, 184 aa, Homo sapiens; identical to SEQ ID NO: 873680

SEQ ID NO: 873682 - protein, 184 aa, Homo sapiens; identical to SEQ ID NO: 873680

SEQ ID NO: 873683 - protein, 184 aa, Homo sapiens; identical to SEQ ID NO: 873680

SEQ ID NO: 873684 - protein, 184 aa, Homo sapiens; identical to SEQ ID NO: 873680

SEQ ID NO: 873685 - protein, 92 aa, Homo sapiens
KKGRGVLPGMALVGQQPRCLRCPLTGEMEPSQCVEELEDDVFQPEDGEPVTQPGSLLSADLFAQSLLDCPLSRLQLFPLTHCCGPGLRPTSQ

SEQ ID NO: 873686 - protein, 222 aa, Homo sapiens
SGRRPHRHVPLELRQRGGGGSRTSMHHRNDSQRLGKAGCPPEPSLQMANTNFLSTLSPEHCRPLAGECMNKLKCGAAEAEIMNLPERVGTFSAIPALGGISLPPGVIVMTALHSPAAASAAVTDSAFQIANLADCPQNHSSSSSSSSGGAGGANPAKKKRKRCGVCVPCKRLINCGVCSSCRNRKTGHQICKFRKCEELKKKPGTSLERTPVPSAEAFRWFF

SEQ ID NO: 873687 - protein, 375 aa, Homo sapiens
MARVASVLGLVMLSVALLILSLISYVSLKKENIFTTPKYASPGAPRMYMFHAGFRSQFALKFLDPSFVPITNSLTQELQEKPSKWKFNRTAFLHQRQEILQHVDVIKNFSLTKNSVRIGQLMHYDYSSHKYVFSISNNFRSLLPDVSPIMNKHYNICAVVGNSGILTGSQCGQEIDKSDFVFRCNFAPTEAFQRDVGRKTNLTTFNPSILEKYYNNLLTIQDRNNFFLSLKKLDGAILWIPAFFFHTSATVTRTLVDFFVEHRGQLKVQLAWPGNIMQHVNRYWKNKHLSPKRLSTGILMYTLASAICEEIHLYGFWPFGFDPNTREDLPYHYYDKKGTKFTTKWQESHQLPAEFQLLYRMHGEGLTKLTLSHCA

SEQ ID NO: 873688 - protein, 300 aa, Homo sapiens
MARVASVLGLVMLSVALLILSLISYVSLKKENIFTTPKYASPGAPRMYMFHAGFRSQFALKFLDPSFVPITNSLTQELQEKPSKWKFNRTAFLHQRQEILQHVDVIKNFSLTKNSVRIGQLMHYDYSSHKYVFSISNNFRSLLPDVSPIMNKHYNICAVVGNSGILTGSQCGQEIDKSDFVFRCNFAPTEAFQRDVGRKTNLTTFNPSILEKYYNNLLTIQDRNNFFLSLKKLDGAILWIPAFFFHTSATVTRTLVDFFVEHRGQLKVQLAWPGNIMQHVNRFFATLHCCKQCSDEHLWN

SEQ ID NO: 873689 - protein, 123 aa, Homo sapiens
TAILWSLRHPEGWTMQMGFPSFLFFSRVCVGAEGGPNERGSGTERSPHAYQPPSPQPLHFNGYLGFPELRPARLSVLMLLSRSQFALKFLDPSFVPITNSLTQELQEKPSKWKFNRTAFLHQR

SEQ ID NO: 873690 - protein, 403 aa, Homo sapiens
MTAILWSLRHPEGWTMQMGFPSFLFFSRVCVGAEGGPNERGSGTERSPHAYQPPSPQPLHFNGYLGFPELRPARLSVLMLLSRSQFALKFLDPSFVPITNSLTQELQEKPSKWKFNRTAFLHQRQEILQHVDVIKNFSLTKNSVRIGQLMHYDYSSHKYVFSISNNFRSLLPDVSPIMNKHYNICAVVGNSGILTGSQCGQEIDKSDFVFRCNFAPTEAFQRDVGRKTNLTTFNPSILEKYYNNLLTIQDRNNFFLSLKKLDGAILWIPAFFFHTSATVTRTLVDFFVEHRGQLKVQLAWPGNIMQHVNRYWKNKHLSPKRLSTGILMYTLASAICEEIHLYGFWPFGFDPNTREDLPYHYYDKKGTKFTTKWQESHQLPAEFQLLYRMHGEGLTKLTLSHCA

SEQ ID NO: 873691 - protein, 110 aa, Homo sapiens
TGNVGTHAATSDCTNSHCVPQSQALSLTVKKQSQFHLRIFLTRQETLLTLLNFSYRTHLLSVQCYEVGIPPSLYGCTLTVFRKSTCEIVWFELTYMFFSFFMKHHFYLKE

SEQ ID NO: 873692 - protein, 136 aa, Homo sapiens
MSLKHPSRESGVCSATLCPIPRPSPPPLFLCLHELSLTGRGFPQAGGLGAGSMSWAGTTTEGFRPGFFPTAGCSEGVLPGLPCPPERGLGVRPRPVREFGVRFLRSPHSACGRCTCHLKTPKTLLGTVVNKMFLRM

SEQ ID NO: 873693 - protein, 562 aa, Homo sapiens
HGSGAPGRGRGVASVRGGGRCRHQGLFLRAVLPRPACAGQSWYPLERAVAESGAGTGWRVAARRGGGGAGLWLLLPLHVAGGRRAVQFAHSSPAASPSGSPRVTGAMAFAETYPAASSLPNGDCGRPRARPGGNRVTVVLGAQWGDEGKGKVVDLLAQDADIVCRCQGGNNAGHTVVVDSVEYDFHLLPSGIINPNVTAFIGNGVVIHLPGLFEEAEKNVQKGKGLEGWEKRLIISDRAHIVFDFHQAADGIQEQQRQEQAGKNLGTTKKGIGPVYSSKAARSGLRMCDLVSDFDGFSERFKVLANQYKSIYPTLEIDIEGELQKLKGYMEKIKPMVRDGVYFLYEALHGPPKKILVEGANAALLDIDFGTYPFVTSSNCTVGGVCTGLGMPPQNVGEVYGVVKAYTTRVGIGAFPTEQDNEIGELLQTRGREFGVTTGRKRRCGWLDLVLLKYAHMINGFTALALTKLDILDMFTEIKVGVAYKLDGEIIPHIPANQEVLNKVEVQYKTLPGWNTDISNARAFKELPVNAQNYVRFIEDELQIPVKWIGVGKSRESMIQLF

SEQ ID NO: 873694 - protein, 334 aa, Homo sapiens
HGSGAPGRGRGVASVRGGGRCRHQGLFLRAVLPRPACAGQSWYPLERAVAESGAGTGWRVAARRGGGGAGLWLLLPLHVAGGRRAVQFAHSSPAASPSGSPRVTGAMAFAETYPAASSLPNGDCGRPRARPGGNRVTVVLGAQWGDEGKGKVVDLLAQDADIVCRCQGGNNAGHTVVVDSVEYDFHLLPSGIINPNVTAFIGNGVVIHLPGLFEEAEKNVQKGKGLEGWEKRLIISDRAHIVFDFHQAADGIQEQQRQEQAGKNLGTTKKGIGPVYSSKAARSGLRMCDLVSDFDGFSERFKVLANQYKSIYPTLEIDTKENLGRRCKCSTIRY

SEQ ID NO: 873695 - protein, 562 aa, Homo sapiens; identical to SEQ ID NO: 873693

SEQ ID NO: 873696 - protein, 652 aa, Homo sapiens
HGSGAPGRGRGVASVRGGGRCRHQGLFLRAVLPRPACAGQSWYPLERAVAESGAGTGWRVAARRGGGGAGLWLLLPLHVAGGRRAVQFAHSSPAASPSGSPRVTGAMAFAETYPAASSLPNGDCGRPRARPGGNRVTVVLGAQWGDEGKGKVVDLLAQDADIVCRCQCAPYMKVKEKLLLLVGPRGRNPFSVQKKGDLVMLWGRRIRIPSFLAVDSGREAEACVSPSLTSGHLVNMEIAQVELHYGLEEGLENTTIMGGNNAGHTVVVDSVEYDFHLLPSGIINPNVTAFIGNGVVIHLPGLFEEAEKNVQKGKGLEGWEKRLIISDRAHIVFDFHQAADGIQEQQRQEQAGKNLGTTKKGIGPVYSSKAARSGLRMCDLVSDFDGFSERFKVLANQYKSIYPTLEIDIEGELQKLKGYMEKIKPMVRDGVYFLYEALHGPPKKILVEGANAALLDIDFGTYPFVTSSNCTVGGVCTGLGMPPQNVGEVYGVVKAYTTRVGIGAFPTEQDNEIGELLQTRGREFGVTTGRKRRCGWLDLVLLKYAHMINGFTALALTKLDILDMFTEIKVGVAYKLDGEIIPHIPANQEVLNKVEVQYKTLPGWNTDISNARAFKELPVNAQNYVRFIEDELQIPVKWIGVGKSRESMIQLF

SEQ ID NO: 873697 - protein, 412 aa, Homo sapiens
ELRAAVPRRNCVVSAAQGGNNAGHTVVVDSVEYDFHLLPSGIINPNVTAFIGNGVVIHLPGLFEEAEKNVQKGKGLEGWEKRLIISDRAHIVFDFHQAADGIQEQQRQEQAGKNLGTTKKGIGPVYSSKAARSGLRMCDLVSDFDGFSERFKVLANQYKSIYPTLEIDIEGELQKLKGYMEKIKPMVRDGVYFLYEALHGPPKKILVEGANAALLDIDFGTYPFVTSSNCTVGGVCTGLGMPPQNVGEVYGVVKAYTTRVGIGAFPTEQDNEIGELLQTRGREFGVTTGRKRRCGWLDLVLLKYAHMINGFTALALTKLDILDMFTEIKVGVAYKLDGEIIPHIPANQEVLNKVEVQYKTLPGWNTDISNARAFKELPVNAQNYVRFIEDELQIPVKWIGVGKSRESMIQLF

SEQ ID NO: 873698 - protein, 233 aa, Homo sapiens
MEKIKPMVRDGVYFLYEALHGPPKKILVEGANAALLDIDFGTYPFVTSSNCTVGGVCTGLGMPPQNVGEVYGVVKAYTTRVGIGAFPTEQDNEIGELLQTRGREFGVTTGRKRRCGWLDLVLLKYAHMINGFTALALTKLDILDMFTEIKVGVAYKLDGEIIPHIPANQEVLNKVEVQYKTLPGWNTDISNARAFKELPVNAQNYVRFIEDELQIPVKWIGVGKSRESMIQLF

SEQ ID NO: 873699 - protein, 172 aa, Homo sapiens [sequence omitted]

SEQ ID NO: 873700 - protein, 214 aa, Homo sapiens
MEKIKPMVRDGVYFLYEALHGPTYPFVTSSNCTVGGVCTGLGMPPQNVGEVYGVVKAYTTRVGIGAFPTEQDNEIGELLQTRGREFGVTTGRKRRCGWLDLVLLKYAHMINGFTALALTKLDILDMFTEIKVGVAYKLDGEIIPHIPANQEVLNKVEVQYKTLPGWNTDISNARAFKELPVNAQNYVRFIEDELQIPVKWIGVGKSRESMIQLF

SEQ ID NO: 873701 - protein, 54 aa, Homo sapiens
YLSNLQGVAIKFLPRTFLGNTPEIQPLPTFCLTFRSGHAVGKTYPNTELSCCRQ

SEQ ID NO: 873702 - protein, 562 aa, Homo sapiens; identical to SEQ ID NO: 873693

SEQ ID NO: 873703 - protein, 456 aa, Homo sapiens
MAFAETYPAASSLPNGDCGRPRARPGGNRVTVVLGAQWGDEGKGKVVDLLAQDADIVCRCQGGNNAGHTVVVDSVEYDFHLLPSGIINPNVTAFIGNGVVIHLPGLFEEAEKNVQKGKGLEGWEKRLIISDRAHIVFDFHQAADGIQEQQRQEQAGKNLGTTKKGIGPVYSSKAARSGLRMCDLVSDFDGFSERFKVLANQYKSIYPTLEIDIEGELQKLKGYMEKIKPMVRDGVYFLYEALHGPPKKILVEGANAALLDIDFGTYPFVTSSNCTVGGVCTGLGMPPQNVGEVYGVVKAYTTRVGIGAFPTEQDNEIGELLQTRGREFGVTTGRKRRCGWLDLVLLKYAHMINGFTALALTKLDILDMFTEIKVGVAYKLDGEIIPHIPANQEVLNKVEVQYKTLPGWNTDISNARAFKELPVNAQNYVRFIEDELQIPVKWIGVGKSRESMIQLF

SEQ ID NO: 873704 - protein, 499 aa, Homo sapiens
HGSGAPGRGRGVASVRGGGRCRHQGLFLRAVLPRPACAGQSWYPLERAVAESGAGTGWRVAARRGGGGAGLWLLLPLHVAGGRRAVQFAHSSPAASPSGSPRVTGAMAFAETYPAASSLPNGDCGRPRARPGGNRVTVVLGAQWGDEGKGKVVDLLAQDADIVCRCQGGNNAGHTVVVDSVEYDFHLLPSGIINPNVTAFIGNGVVIHLPGLFEEAEKNVQKGKGLEGWEKRLIISDRAHIVFDFHQAADGIQEQQRQEQAGKNLGTTKKGIGPVYSSKAARSGLRMCDLVSDFDGFSERFKVLANQYKSIYPTLEIDIEGELQKLKGYMEKIKPMVRDGVYFLYEALHGPPKKILVEGANAALLDIDFGTYPFVTSSNCTVGGVCTGLGMPPQNVGEVYGVVKAYTTRVGIGAFPTEQDNEIGELLQTRGREFGVTTGRKRRCGWLDLVLLKYAHMINGFTALALTKLDILDMFTEIKVGVAYKLDGEIIPHIPGIFF

SEQ ID NO: 873705 - protein, 241 aa, Homo sapiens
HGSGAPGRGRGVASVRGGGRCRHQGLFLRAVLPRPACAGQSWYPLERAVAESGAGTGWRVAARRGGGGAGLWLLLPLHVAGGRRAVQFAHSSPAASPSGSPRVTGAMAFAETYPAASSLPNGDCGRPRARPGGNRVTVVLGAQWGDEGKGKVVDLLAQDADIVCRCQGGNNAGHTVVVDSVEYDFHLLPSGIINPNVTAFIGNGVVIHLPGLFEEAEKNVQKGKGGRSRSRTSPRVRDPRV

SEQ ID NO: 873706 - protein, 96 aa, Homo sapiens
GNAEIIEGTRLRILTRFGCFLSCFPRVWPLLVLASSFSAEMESHHVAQAGLKLLSSRNPPTLTSQSAGIIEMSHHAWAPNSRSWRKWKKGDIDDLS

SEQ ID NO: 873707 - protein, 45 aa, Homo sapiens
MGQSSMQLPLCLTPCLMQRRRSTQSRKVDAKKKGSNAEKKGFGRQ

SEQ ID NO: 873708 - protein, 132 aa, Homo sapiens
LWQRQEDRSEQAQGGRTEEGRGKNRGGNCDSCVAAVLHTNRWLSSLCDSTSVCFPQASQISLQLLLFSKHAVSWPHRPRAFSFVRVHNSYMNFFWYKYTVCNNQIRVAGIPLTSNTAHSFVLGYSKSSLLAI

SEQ ID NO: 873709 - protein, 507 aa, Homo sapiens
MQEPLLGAEGPDYDTFPEKPPPSPGDRARVGTLQNKRVFLATFAAVLGNFSFGYALVYTSPVIPALERSLDPDLHLTKSQASWFGSVFTLGAAAGGLSAMILNDLLGRKLSIMFSAVPSAAGYALMAGAHGLWMLLLGRTLTGFAGGLTAACIPVYVSEIAPPGVRGALGATPQLMAVFGSLSLYALGLLLPWRWLAVAGEAPVLIMILLLSFMPNSPRFLLSRGRDEEALRALAWLRGTDVDVHWEFEQIQDNVRRQSSRVSWAEARAPHVCRPITVALLMRLLQQLTGITPILVYLQSIFDSTAVLLPPKDDAAIVGAVRLLSVLIAALTMDLAGRKVLLFVSAAIMFAANLTLGLYIHFGPRPLSPNSTAGLESESWGDLAQPLAAPAGYLTLVPLLATMLFIMGYAVGWGPITWLLMSEVLPLRARGVASGLCVLASWLTAFVLTKSFLPVVSTFGLQVPFFFFAAICLVSLVFTGCCVPETKGRSLEQIESFFRTGRRSFLR

SEQ ID NO: 873710 - protein, 294 aa, Homo sapiens
MPNSPRFLLSRGRDEEALRALAWLRGTDVDVHWEFEQIQDNVRRQSSRVSWAEARAPHVCRPITVALLMRLLQQLTGITPILVYLQSIFDSTAVLLPPKDDAAIVGAVRLLSVLIAALTMDLAGRKVLLFVSAAIMFAANLTLGLYIHFGPRPLSPNSTAGLESESWGDLAQPLAAPAGYLTLVPLLATMLFIMGYAVGWGPITWLLMSEVLPLRARGVASGLCVLASWLTAFVLTKSFLPVVSTFGLQVPFFFFAAICLVSLVFTGCCVPETKGRSLEQIESFFRTGRRSFLR

SEQ ID NO: 873711 - protein, 95 aa, Homo sapiens
LVPRRLRKGTRPEVTQQGRVPFPCVKDTPHRRLRGGLRGQGWRQPSNVVISSRSDLVASGCARKTRLCPHKSYGHHREHPGLKKPGQAGHSGSRL

SEQ ID NO: 873712 - protein, 274 aa, Homo sapiens
MPILKQLVSSSVHSKRRSRADLTAEMISAPLGDFRHTMHVGRAGDAFGDTSFLNSKAGEPDGESLDEQPSSSSSKRSLLSRKFRGSKRSQSVTRGEREQRDMLGSLRDSALFVKNAMSLPQLNEKEAAEKGTSKLPKSLSSSPVKKANDGEGGDEEAGTEEAVPRRNGAAGPHSPDPLLDEQALGDLTDLPVVPKATYGLKHAESIMSFHIDWGLPCWVDVLRSLGKDGVDPESGARGYPWPCMGPLCHSTQGPPKRGGPPPGGGSRLARIGVL

SEQ ID NO: 873713 - protein, 274 aa, Homo sapiens; identical to SEQ ID NO: 873712

SEQ ID NO: 873714 - protein, 101 aa, Homo sapiens
MAGYQNKNTETLYTTKCKATSGMFPSLQGPHDAELLSILKVHLGNLRLQDRLLFSRGQHIRSAMDKPRPGKTTFVIMVSPLDFPKCGKLDCIICGSRGKRR

SEQ ID NO: 873715 - protein, 279 aa, Homo sapiens
ERRTESSGTLEDALCLRRSFCLPVLMPLLLLLLLLPSPLHPHPICEVSKVASHLEVNCDKRNLTALPPDLPKDTTILHLSENLLYTFSLATLMPYTRLTQLNLDRCELTKLQVDGTLPVLGTLDLSHNQLQSLPLLGQTLPALTVLDVSFNRLTSLPLGALRGLGELQELYLKGNELKTLPPGLLTPTPKLEKLSLANNNLTELPAGLLNGLENLDTLLLQENSLYTIPKGFFGSHLLPFAFLHGNPWLCNCEILYFRRWLQDNAENVYVWKQGVDVKA

SEQ ID NO: 873716 - protein, 431 aa, Homo sapiens
MGPVIGMTPDKRAETPGAEKIAGLSQIYKMGSLPEAVDAARPKATLVDSESADDELTNLNWLHESTNLLTNFSLGSEGLPIVSPLYDIEGDDVPSFGPACYQNPEKKSATSKPPYSFSLLIYMAIEHSPNKCLPVKEIYSWILDHFPYFATAPTGWKNSVRHNLSLNKCFQKVERSHGKVNGKGSLWCVDPEYKPNLIQALKKQPFSSASSQNGSLSPHYLSSVIKQNQVRNLKESDIDAAAAMMLLNTSIEQGILECEKPLPLKTALQKKRSYGNAFHHPSAVRLQESDSLATSIDPKEDHNYSASSMAAQRCASRSSVSSLSSVDEVYEFIPKNSHVGSDGSEGFHSEEDTDVDYEDDPLGDSGYASQPCAKISEKGQSGKKMRKQTCQEIDEELKEAAGSLLHLAGIRTCLGSLISTAKTQNQKQRKK

SEQ ID NO: 873717 - protein, 199 aa, Homo sapiens
SDNKRLGARLGGGYFRRLDLPSNLPGLILSSEHCNKYSKIPRHCMSEDSKYVLIQMLWDNMKLHQDPGQPLYILWNAHTQKYPMVHLLQKSDNSFNQELLKSMVKSIKMNDVYGPMSQILETLNKCPHFKRQRSLYREILFLSLVALGRENIDIDAFDKEYKMAYDRLTPSQVKSTHNCDRPPSTGVMECRKTFGEPYL

SEQ ID NO: 873718 - protein, 199 aa, Homo sapiens; identical to SEQ ID NO: 873717

SEQ ID NO: 873719 - protein, 199 aa, Homo sapiens; identical to SEQ ID NO: 873717

SEQ ID NO: 873720 - protein, 78 aa, Homo sapiens
WSGGWKHKDISKILGQFKQGLGADDKPTHSAKKQGLGETGNWKRLFRRGQSESGRRDSRGTHSTHKGPEAGTEGPQAT

SEQ ID NO: 873721 - protein, 77 aa, Homo sapiens
VMIRSSAVPMSNLGMHMLMFTNWHLENNSPYLITTKNFGKYISPPWEFSKDFKILISTTSLFPKVAYFLSHVRSTSH

SEQ ID NO: 873722 - protein, 76 aa, Homo sapiens
GKASLPTTAAWMLMAEAKVPLPGRKFRLRPTSHGLEGSSGGWVRGCSSSCFFNRGWSRSLQGGGGASGGVRSSFTL

SEQ ID NO: 873723 - protein, 453 aa, Homo sapiens
MKLLVILLFSGLITGFRSDSSSSLPPKLLLVSFDGFRADYLKNYEFPHLQNFIKEGVLVEHVKNVFITKTFPNHYSIVTGLYEESHGIVANSMYDAVTKKHFSDSNDKDPFWWNEAVPIWVTNQLQENRSSAAAMWPGTDVPIHDTISSYFMNYNSSVSFEERLNNITMWLNNSNPPVTFATLYWEEPDASGHKYGPEDKENMSRVLKKIDDLIGDLVQRLKMLGLWENLNVIITSDHGMTQCSQDRLINLDSCIDHSYYTLIDLSPVAAILPKINRTEVYNKLKNCSPHMNVYLKEDIPNRFYYQHNDRIQPIILVADEGWTIVLNESSQKLGDHGYDNSLPSMHPFLAAHGPAFHKGYKHSTINIVDIYPMMCHILGLKPHPNNGTFGHTKCLLVDQWCINLPEAIAIVIGSLLVLTMLTCLIIIMQNRLSVPRPFSRLQLQEDDDDPLIG

SEQ ID NO: 873724 - protein, 435 aa, Homo sapiens
MKLLVILLFSGLITGFRSDSSSSLPPKLLLVSFDGFRADYLKNYEFPHLQNFIKEGVLVEHVKNVFITKTFPNHYSIVTGLYEESHGIVANSMYDAVTKKHFSDSNDKDPFWWNEAVPIWVTNQLQDTISSYFMNYNSSVSFEERLNNITMWLNNSNPPVTFATLYWEEPDASGHKYGPEDKENMSRVLKKIDDLIGDLVQRLKMLGLWENLNVIITSDHGMTQCSQDRLINLDSCIDHSYYTLIDLSPVAAILPKINRTEVYNKLKNCSPHMNVYLKEDIPNRFYYQHNDRIQPIILVADEGWTIVLNESSQKLGDHGYDNSLPSMHPFLAAHGPAFHKGYKHSTINIVDIYPMMCHILGLKPHPNNGTFGHTKCLLVDQWCINLPEAIAIVIGSLLVLTMLTCLIIIMQNRLSVPRPFSRLQLQEDDDDPLIG

SEQ ID NO: 873725 - protein, 128 aa, Homo sapiens [sequence omitted]

SEQ ID NO: 873726 - protein, 453 aa, Homo sapiens; identical to SEQ ID NO: 873723

SEQ ID NO: 873727 - protein, 453 aa, Homo sapiens; identical to SEQ ID NO: 873723

SEQ ID NO: 873728 - protein, 453 aa, Homo sapiens; identical to SEQ ID NO: 873723

SEQ ID NO: 873729 - protein, 355 aa, Homo sapiens [sequence omitted]

SEQ ID NO: 873730 - protein, 39 aa, Homo sapiens
IHIPDAEPESPTSLLPVLRQRLLCALPLAGHWVGAHEDR

SEQ ID NO: 873731 - protein, 87 aa, Homo sapiens
SRDPSRTPSALRTPPSPLPPAPFASPALSSCPEPRSRPGSRASGASTSSPAEALPGSSPDLILPAAGTDQAGRGGVGTAAAATRAGQ

SEQ ID NO: 873732 - protein, 578 aa, Homo sapiens
MPFRLLIPLGLLCALLPQHHGAPGPDGSAPDPAHYRERVKAMFYHAYDSYLENAFPFDELRPLTCDGHDTWGSFSLTLIDALDTLLILGNVSEFQRVVEVLQDSVDFDIDVNASVFETNIRVVGGLLSAHLLSKKAGVEVEAGWPCSGPLLRMAEEAARKLLPAFQTPTGMPYGTVNLLHGVNPGETPVTCTAGIGTFIVEFATLSSLTGDPVFEDVARVALMRLWESRSDIGLVGNHIDVLTGKWVAQDAGIGAGVDSYFEYLVKGAILLQDKKLMAMFLEYNKAIRNYTRFDDWYLWVQMYKGTVSMPVFQSLEAYWPGLQSLIGDIDNAMRTFLNYYTVWKQFGGLPEFYNIPQGYTVEKREGYPLRPELIESAMYLYRATGDPTLLELGRDAVESIEKISKVECGFATIKDLRDHKLDNRMESFFLAETVKYLYLLFDPTNFIHNNGSTFDAVITPYGECILGAGGYIFNTEAHPIDPAALHCCQRLKEEQWEVEDLMREFYSLKRSRSKFQKNTVSSGPWEPPARPGTLFSPENHDQARERKPAKQKVPLLSCPSQPFTSKLALLGQVFLDSS

SEQ ID NO: 873733 - protein, 578 aa, Homo sapiens; identical to SEQ ID NO: 873732

SEQ ID NO: 873734 - protein, 400 aa, Homo sapiens
MPFRLLIPLGLLCALLPQHHGAPGPDGSAPDPAHYRERVKAMFYHAYDSYLENAFPFDELRPLTCDGHDTWGSFSLTLIDALDTLLILGNVSEFQRVVEVLQDSVDFDIDVNASVFETNIRVVGGLLSAHLLSKKAGVEVEAGWPCSGPLLRMAEEAARKLLPAFQTPTGMPYGTVNLLHGVNPGETPVTCTAGIGTFIVEFATLSSLTGDPVFEDVARVALMRLWESRSDIGLVGNHIDVLTGKWVAQDAGIGAGVDSYFEYLVKGAILLQDKKLMAMFLEYNKAIRNYTRFDDWYLWVQMYKGTVSMPVFQSLEAYWPGLQSLIGDIDNAMRTFLNYYTVWKQFGGLPEFYNIPQGYTVEKREGYPLRPDQRSARPQAGQPHGVVLPGRDCEIPLPPV

SEQ ID NO: 873735 - protein, 510 aa, Homo sapiens
MPFRLLIPLGLLCALLPQHHGAPGPDGSAPDPAHYRERVKAMFYHAYDSYLENAFPFDELRPLTCDGHDTWGSFSLTLIDALDTLLILGNVSEFQRVVEVLQDSVDFDIDVNASVFETNIRVVGGLLSAHLLSKKAGVEVEAGWPCSGPLLRMAEEAARKLLPAFQTPTGMPYGTVNLLHGVNPGETPVTCTAGIGTFIVEFATLSSLTGDPVFEDVARVALMRLWESRSDIGLVGNHIDVLTGKWVAQDAGIGAGVDSYFEYLVKGAILLQDKKLMAMFLEYNKAIRNYTRFDDWYLWVQMYKGTVSMPVFQSLEAYWPGLQSLIGDIDNAMRTFLNYYTVWKQFGGLPEFYNIPQGYTVEKREGYPLRPELIESAMYLYRATGDPTLLELGRDAVESIEKISKVECGFATIKDLRDHKLDNRMESFFLAETVKYLYLLFDPTNFIHNNGSTFDAVPPGGGPGGGGTLQNTTTGPQADKNGGHEHPRGERATAKPQQERAAPEPKTLTY

SEQ ID NO: 873736 - protein, 541 aa, Homo sapiens
MPFRLLIPLGLLCALLPQHHGAPGPDGSAPDPAHYSFSLTLIDALDTLLILGNVSEFQRVVEVLQDSVDFDIDVNASVFETNIRVVGGLLSAHLLSKKAGVEVEAGWPCSGPLLRMAEEAARKLLPAFQTPTGMPYGTVNLLHGVNPGETPVTCTAGIGTFIVEFATLSSLTGDPVFEDVARVALMRLWESRSDIGLVGNHIDVLTGKWVAQDAGIGAGVDSYFEYLVKGAILLQDKKLMAMFLEYNKAIRNYTRFDDWYLWVQMYKGTVSMPVFQSLEAYWPGLQSLIGDIDNAMRTFLNYYTVWKQFGGLPEFYNIPQGYTVEKREGYPLRPELIESAMYLYRATGDPTLLELGRDAVESIEKISKVECGFATIKDLRDHKLDNRMESFFLAETVKYLYLLFDPTNFIHNNGSTFDAVITPYGECILGAGGYIFNTEAHPIDPAALHCCQRLKEEQWEVEDLMREFYSLKRSRSKFQKNTVSSGPWEPPARPGTLFSPENHDQARERKPAKQKVPLLSCPSQPFTSKLALLGQVFLDSS

SEQ ID NO: 873737 - protein, 537 aa, Homo sapiens
MFYHAYDSYLENAFPFDELRPLTCDGHDTWGSFSLTLIDALDTLLILGNVSEFQRVVEVLQDSVDFDIDVNASVFETNIRVVGGLLSAHLLSKKAGVEVEAGWPCSGPLLRMAEEAARKLLPAFQTPTGMPYGTVNLLHGVNPGETPVTCTAGIGTFIVEFATLSSLTGDPVFEDVARVALMRLWESRSDIGLVGNHIDVLTGKWVAQDAGIGAGVDSYFEYLVKGAILLQDKKLMAMFLEYNKAIRNYTRFDDWYLWVQMYKGTVSMPVFQSLEAYWPGLQSLIGDIDNAMRTFLNYYTVWKQFGGLPEFYNIPQGYTVEKREGYPLRPELIESAMYLYRATGDPTLLELGRDAVESIEKISKVECGFATIKDLRDHKLDNRMESFFLAETVKYLYLLFDPTNFIHNNGSTFDAVITPYGECILGAGGYIFNTEAHPIDPAALHCCQRLKEEQWEVEDLMREFYSLKRSRSKFQKNTVSSGPWEPPARPGTLFSPENHDQARERKPAKQKVPLLSCPSQPFTSKLALLGQVFLDSS

SEQ ID NO: 873738 - protein, 426 aa, Homo sapiens
MAEEAARKLLPAFQTPTGMPYGTVNLLHGVNPGETPVTCTAGIGTFIVEFATLSSLTGDPVFEDVARVALMRLWESRSDIGLVGNHIDVLTGKWVAQDAGIGAGVDSYFEYLVKGAILLQDKKLMAMFLEYNKAIRNYTRFDDWYLWVQMYKGTVSMPVFQSLEAYWPGLQSLIGDIDNAMRTFLNYYTVWKQFGGLPEFYNIPQGYTVEKREGYPLRPELIESAMYLYRATGDPTLLELGRDAVESIEKISKVECGFATIKDLRDHKLDNRMESFFLAETVKYLYLLFDPTNFIHNNGSTFDAVITPYGECILGAGGYIFNTEAHPIDPAALHCCQRLKEEQWEVEDLMREFYSLKRSRSKFQKNTVSSGPWEPPARPGTLFSPENHDQARERKPAKQKVPLLSCPSQPFTSKLALLGQVFLDSS

SEQ ID NO: 873739 - protein, 103 aa, Homo sapiens
MSPVCPPSPVVLACLVSSPHVPASLTPPPTRGSPEIAENSKRSPGTGKKSRQGRLRSLHPSLLPSLHPDPAQTFVTTPSLSPAGWVGGIPLCRWLPEAGQASW

SEQ ID NO: 873740 - protein, 217 aa, Homo sapiens
MEVAGLFLGGRGAGQRVPSVLLAWASWRLLGRIPSPCAGRGLEALGRDWRGTVAEPRPEAQGRVPSFRSNARRVRSVRGGGVTAPAPPDAEVGSGRPAGLAARDHGGSAKRRPRRPGACANPAPAPAPACGAGGPGTAPASAPAPAPAPAPAPARAQPVGAAGRRALPHRLHFLVLTASSAGCRPSVRRPLWFLPALSPLPTSLRLLHPLPPEAPQR

SEQ ID NO: 873741 - protein, 418 aa, Homo sapiens
MPFRLLIPLGLLCALLPQHHGAPGPDGSAPDPAHYRERVKAMFYHAYDSYLENAFPFDELRPLTCDGHDTWGSFSLTLIDALDTLLILGNVSEFQRVVEVLQDSVDFDIDVNASVFETNIREYNKAIRNYTRFDDWYLWVQMYKGTVSMPVFQSLEAYWPGLQSLIGDIDNAMRTFLNYYTVWKQFGGLPEFYNIPQGYTVEKREGYPLRPELIESAMYLYRATGDPTLLELGRDAVESIEKISKVECGFATIKDLRDHKLDNRMESFFLAETVKYLYLLFDPTNFIHNNGSTFDAVITPYGECILGAGGYIFNTEAHPIDPAALHCCQRLKEEQWEVEDLMREFYSLKRSRSKFQKNTVSSGPWEPPARPGTLFSPENHDQARERKPAKQKVPLLSCPSQPFTSKLALLGQVFLDSS

SEQ ID NO: 873742 - protein, 157 aa, Homo sapiens
TRYDPQRILLLLGEYLYLLFDPTNFIHNNGSTFDAVITPYGECILGAGGYIFNTEAHPIDPAALHCCQRLKEEQWEVEDLMREFYSLKRSRSKFQKNTVSSGPWEPPARPGTLFSPENHDQARERKPAKQKVPLLSCPSQPFTSKLALLGQVFLDSS

SEQ ID NO: 873743 - protein, 114 aa, Homo sapiens
MEVAGLFLGGRGAGQRVPSVLLAWASWRLLGRIPSPCAGRGLEALGRDWRGTVAEPRPEAQGRVPSFRSNARRVRSVRGGGVTAPAPPDAEVGSGRPAGLAARDWVTQGVPGVH

SEQ ID NO: 873744 - protein, 578 aa, Homo sapiens; identical to SEQ ID NO: 873732

SEQ ID NO: 873745 - protein, 560 aa, Homo sapiens
MPFRLLIPLGLLCALLPQHHGAPGPDGSAPDPAHYRERVKAMFYHAYDSYLENAFPFDELRPLTCDGHDTWGSFSLTLIDALDTLLILGNVSEFQRVVEVLQDSVDFDIDVNASVFETNIRVVGGLLSAHLLSKKAGVEVEAGWPCSGPLLRMAEEAARKLLPAFQTPTGMPYGTVNLLHGVNPGETPVTCTAGIGTFIVEFATLSSLTGDPVFEDVARVALMRLWESRSDIGLVGNHIDVLTGKWVAQDAGIGAGVDSYFEYLVKGAILLQDKKLMAMFLEYNKAIRNYTRFDDWYLWVQMYKGTVSMPVFQSLEAYWPGLQSLIGDIDNAMRTFLNYYTVWKQFGGLPEFYNIPQGYTVEKREGYPLRPELIESAMYLYRATGDPTLLELGRDAVESIEKLDNRMESFFLAETVKYLYLLFDPTNFIHNNGSTFDAVITPYGECILGAGGYIFNTEAHPIDPAALHCCQRLKEEQWEVEDLMREFYSLKRSRSKFQKNTVSSGPWEPPARPGTLFSPENHDQARERKPAKQKVPLLSCPSQPFTSKLALLGQVFLDSS

SEQ ID NO: 873746 - protein, 537 aa, Homo sapiens; identical to SEQ ID NO: 873737

SEQ ID NO: 873747 - protein, 277 aa, Homo sapiens [sequence omitted]

SEQ ID NO: 873748 - protein, 163 aa, Homo sapiens
MEVAGLFLGGRGAGQRVPSVLLAWASWRLLGRIPSPCAGRGLEALGRDWRGTVAEPRPEAQGRVPSFRSNARRVRSVRGGGVTAPAPPDAETMGAQLSGGRGAPEPAQTQPQPQPQPAAPEGPEQPRHPPQPQPQPQPQPQPEPSPWGPLDDVRFLIACTSWY

SEQ ID NO: 873749 - protein, 460 aa, Homo sapiens
MPFRLLIPLGLLCALLPQHHGAPGPDGSAPDPAHYRERVKAMFYHAYDSYLENAFPFDELRPLTCDGHDTWGSFSLTLIDALDTLLILGNVSEFQRVVEVLQDSVDFDIDVNASVFETNIRVVGGLLSAHLLSKKAGVEVEAGWPCSGPLLRMAEEAARKLLPEYNKAIRNYTRFDDWYLWVQMYKGTVSMPVFQSLEAYWPGLQSLIGDIDNAMRTFLNYYTVWKQFGGLPEFYNIPQGYTVEKREGYPLRPELIESAMYLYRATGDPTLLELGRDAVESIEKISKVECGFATIKDLRDHKLDNRMESFFLAETVKYLYLLFDPTNFIHNNGSTFDAVITPYGECILGAGGYIFNTEAHPIDPAALHCCQRLKEEQWEVEDLMREFYSLKRSRSKFQKNTVSSGPWEPPARPGTLFSPENHDQARERKPAKQKVPLLSCPSQPFTSKLALLGQVFLDSS

SEQ ID NO: 873750 - protein, 163 aa, Homo sapiens; identical to SEQ ID NO: 873748

SEQ ID NO: 873751 - protein, 163 aa, Homo sapiens; identical to SEQ ID NO: 873748

SEQ ID NO: 873752 - protein, 288 aa, Homo sapiens
HQIHQVRAVLTTTFPFVSIMSWKKALRIPGGLRAATVTLMLSMLSTPVAEGRDSPEDFVYQFKGMCYFTNGTERVRLVSRSIYNREEIVRFDSDVGEFRAVTLLGLPAAEYWNSQKDILERKRAAVDRVCRHNYQLELRTTLQRRVEPTVTISPSRTEALNHHNLLVCSVTDFYPAQIKVRWFRNGQEETAGVVSTPLIRNGDWTFQILVMLEMTPQRGDVYTCHVEHPSLQSPITVEWRAQSESAQSKMLSGIGGFVLGLIFLGLGLIIHHRSQKGPQGPPPAGLLH

SEQ ID NO: 873753 - protein, 280 aa, Homo sapiens
HQIHQVRAVLTTTFPFVSIMSWKKALRIPGGLRAATVTLMLSMLSTPVAEGRDSPEDFVYQFKGMCYFTNGTERVRLVSRSIYNREEIVRFDSDVGEFRAVTLLGLPAAEYWNSQKDILERKRAAVDRVCRHNYQLELRTTLQRRVEPTVTISPSRTEALNHHNLLVCSVTDFYPAQIKVRWFRNGQEETAGVVSTPLIRNGDWTFQILVMLEMTPQRGDVYTCHVEHPSLQSPITVEWRAQSESAQSKMLSGIGGFVLGLIFLGLGLIIHHRSQKGLLH

SEQ ID NO: 873754 - protein, 42 aa, Homo sapiens
IAPLKTQYWKLVLEDKPWQAEGTCSSVCPPGTTRRVTGRWAE

SEQ ID NO: 873755 - protein, 70 aa, Homo sapiens
FELPYVTSLIPDSNKRHHSVIIESAGDESLQASGRIPAHLEEPFHIPGSQVLHPLTRYVVPENHYLKNGC

SEQ ID NO: 873756 - protein, 134 aa, Homo sapiens
MKAFSPVRSIRKNSLLDHRLGISQSKTPVDDLMSLLYNMNDCYSKLKELVPSIPQNKNVSKMEILQHVIDYILDLQITLDLHPTIVSLHHQRPGQNQASRMPLTTLNTDISILSLQASEFPSELMSNDRKALCG

SEQ ID NO: 873757 - protein, 591 aa, Homo sapiens
MAVAPLRGALLLWQLLAAGGAALEIGRFDPERGRGAAPCQAVEIPMCRGIGYNLTRMPNLLGHTSQGEAAAELAEFAPLVQYGCHSHLRFFLCSLYAPMCTDQVSTPIPACRPMCEQARLRCAPIMEQFNFGWPDSLDCARLPTRNDPHALCMEAPENATAGPAEPHKGLGMLPVAPRPARPPGDLGPGAGGSGTCENPEKFQYVEKSRSCAPRCGPGVEVFWSRRDKDFALVWMAVWSALCFFSTAFTVLTFLLEPHRFQYPERPIIFLSMCYNVYSLAFLIRAVAGAQSVACDQEAGALYVIQEGLENTGCTLVFLLLYYFGMASSLWWVVLTLTWFLAAGKKWGHEAIEAHGSYFHMAAWGLPALKTIVILTLRKVAGDELTGLCYVASTDAAALTGFVLVPLSGYLVLGSSFLLTGFVALFHIRKIMKTGGTNTEKLEKLMVKIGVFSILYTVPATCVIVCYVYERLNMDFWRLRATEQPCAAAAGPGGRRDCSLPGGSVPTVAVFMLKIFMSLVVGITSGVWVWSSKTFQTWQSLCYRKIAAGRARAKACRAPGSYGRGTHCHYKAPTVVLHMTKTDPSLENPTHL

SEQ ID NO: 873758 - protein, 369 aa, Homo sapiens
MEGSLEREAPAGALAAVLKHSSTLPPESTQVRGYDFNRGVNYRALLEAFGTTGFQATNFGRAVQQVNAMIEKKLEPLSQDEDQHADLTQSRRPLTSCTIFLGYTSNLISSGIRETIRYLVQHNMVDVLVTTAGGVEEDLIKCLAPTYLGEFSLRGKELRENGINRIGNLLVPNENYCKFEDWLMPILDQMVMEQNTEGVKWTPSKMIARLGKEINNPESVYYWAQKNHIPVFSPALTDGSLGDMIFFHSYKNPGLVLDIVEDLRLINTQAIFAKCTGMIILGGGVVKHHIANANLMRNGADYAVYINTAQEFDGSDSGARPDEAVSWGKIRVDAQPVKVYADASLVFPLLVAETFAQKMDAFMHEKNED

SEQ ID NO: 873759 - protein, 319 aa, Homo sapiens [sequence omitted]

SEQ ID NO: 873760 - protein, 322 aa, Homo sapiens
MEGSLEREAPAGALAAVLKHSSTLPPESTQVRGYDFNRGVNYRALLEAFGTTGFQATNFGRAVQQVNAMIEKKLEPLSQDEDQHADLTQSRRPLTSCTIFLGYTSNLISSGIRETIRYLVQHNMVDVLVTTAGGVEEDLIKCLAPTYLGEFSLRGKELRENGINRIGNLLVPNENYCKFEDWLMPILDQMVMEQNTEGVKWTPSKMIARLGKEINNPESVYYWAQKNHIPVFSPALTDGSLGDMIFFHSYKNPGLVLDIVEAQEFDGSDSGARPDEAVSWGKIRVDAQPVKVYADASLVFPLLVAETFAQKMDAFMHEKNED

SEQ ID NO: 873761 - protein, 313 aa, Homo sapiens
MEGSLEREAPAGALAAVLKHSSTLPPESTQVRGYDFNRGVNYRALLEAFGTTGFQATNFGRAVQQVNAMIEKKLEPLSQDEDQHADLTQSRRPLTSCTIFLGYTSNLISSGIRETIRYLVQHNMVDVLVTTAGGVEEDLIKCLAPTYLGEFSLRGKELRENGINRIGNLLVPNENYCKFEDWLMPILDQMVMEQNTEGVKWTPSKMIARLGKEINNPESVYYWAQKNHIPVFSPALTDGSLGDMIFFHSYKNPGLVLDIVEGARPDEAVSWGKIRVDAQPVKVYADASLVFPLLVAETFAQKMDAFMHEKNED

SEQ ID NO: 873762 - protein, 277 aa, Homo sapiens
MEGSLEREAPAGALAAVLKHSSTLPPESTQVRGYDFNRGVNYRALLEAFGTTGFQATNFGRAVQQVNAMIEKKLEPLSQDEDQHADLTQSRRPLTSCTIFLGYTSNLISSGIRETIRYLVQHNMVDVLVTTAGGVEEDLIKCLAPTYLGEFSLRGKELRENGINRIGNLLVPNENYCKFEDWLMPILDQMVMEQNTEGVKWTPSKMIARLGKEINNPESVYYWAQKNHIPVFSPALTDGSLGDMIFFHSYKNPGLVLDIVEAERGRLRCLHQHSPGV

SEQ ID NO: 873763 - protein, 280 aa, Homo sapiens [sequence omitted]

SEQ ID NO: 873764 - protein, 353 aa, Homo sapiens
SGEGTGSERRCSLIPKRVGAGWARWRMPIIPAFWEAEAGGSREEEFETSLANMIEKKLEPLSQDEDQHADLTQSRRPLTSCTIFLGYTSNLISSGIRETIRYLVQHNMVDVLVTTAGGVEEDLIKCLAPTYLGEFSLRGKELRENGINRIGNLLVPNENYCKFEDWLMPILDQMVMEQNTEGVKWTPSKMIARLGKEINNPESVYYWAQKNHIPVFSPALTDGSLGDMIFFHSYKNPGLVLDIVEDLRLINTQAIFAKCTGMIILGGGVVKHHIANANLMRNGADYAVYINTAQEFDGSDSGARPDEAVSWGKIRVDAQPVKVYADASLVFPLLVAETFAQKMDAFMHEKNED

SEQ ID NO: 873765 - protein, 405 aa, Homo sapiens
MEGSLEREAPAGALAAVLKHSSTLPPESTQVRGYDFNRGVNYRALLEAFGTTGFQATNFGRAVQQVNAMIEKKLEPLSQDEDQHADLTQSRRPLTSCTIFLGYTSNLISSGIRETIRYLVQHNMQSSLIRVLDKDEVRSSAQNEEQGLPSWAKFTALWLQVDVLVTTAGGVEEDLIKCLAPTYLGEFSLRGKELRENGINRIGNLLVPNENYCKFEDWLMPILDQMVMEQNTEGVKWTPSKMIARLGKEINNPESVYYWAQKNHIPVFSPALTDGSLGDMIFFHSYKNPGLVLDIVEDLRLINTQAIFAKCTGMIILGGGVVKHHIANANLMRNGADYAVYINTAQEFDGSDSGARPDEAVSWGKIRVDAQPVKVYADASLVFPLLVAETFAQKMDAFMHEKNED

SEQ ID NO: 873766 - protein, 246 aa, Homo sapiens [sequence omitted]

SEQ ID NO: 873767 - protein, 335 aa, Homo sapiens
MEGSLEREAPAGALAAVLKHSSTLPPESTQVRGYDFNRGVNYRALLEAFGTTGFQATNFGRAVQQVNAMIEKKLEPLSQDEDQFTALWLQVDVLVTTAGGVEEDLIKCLAPTYLGEFSLRGKELRENGINRIGNLLVPNENYCKFEDWLMPILDQMVMEQNTEGVKWTPSKMIARLGKEINNPESVYYWAQKNHIPVFSPALTDGSLGDMIFFHSYKNPGLVLDIVEDLRLINTQAIFAKCTGMIILGGGVVKHHIANANLMRNGADYAVYINTAQEFDGSDSGARPDEAVSWGKIRVDAQPVKVYADASLVFPLLVAETFAQKMDAFMHEKNED

SEQ ID NO: 873768 - protein, 186 aa, Homo sapiens
MEGSLEREAPAGALAAVLKHSSTLPPESTQVRGYDFNRGVNYRALLEAFGTTGFQATNFGRAVQQVNAMIEKKLEPLSQDEDQAGAWSSTTLPMPTSCGTGPTTLFTSTQPRSLMALTQVPDQTRLSPGARSGWMHSPSRSMLTPPWSSPCLWLKPLPRRWMPSCMRRTRTERLRSQEGLTPSSIY

SEQ ID NO: 873769 - protein, 285 aa, Homo sapiens
MEGSLEREAPAGALAAVLKHSSTLPPESTQVRGYDFNRGVNYRALLEAFGTTGFQATNFGRAVQQVNAMIEKKLEPLSQDEDQFTALWLQVDVLVTTAGGVEEDLIKCLAPTYLGEFSLRGKELRENGINRIGNLLVPNENYCKFEDWLMPILDQMVMEQNTEGVKWTPSKMIARLGKEINNPESVYYWAQKNHIPVFSPALTDGSLGDMIFFHSYKNPGLVLDIVEDLKVNSHHRPSLAQVARGMILLARGGVGPSQPHLANGPTSMRNGGRTKLFTLKPGQEF

SEQ ID NO: 873770 - protein, 72 aa, Homo sapiens
SSSVSCMICIHLLGKGFSHKQGEDQGGVCIDLDGLCIHPDLVYADASLVFPLLVAETFAQKMDAFMHEKNED

SEQ ID NO: 873771 - protein, 369 aa, Homo sapiens; identical to SEQ ID NO: 873758

SEQ ID NO: 873772 - protein, 369 aa, Homo sapiens; identical to SEQ ID NO: 873758

SEQ ID NO: 873773 - protein, 322 aa, Homo sapiens; identical to SEQ ID NO: 873760

SEQ ID NO: 873774 - protein, 396 aa, Homo sapiens
MEGSLEREAPAGALAAVLKHSSTLPPESTQVRGYDFNRGVNYRALLEAFGTTGFQATNFGRAVQQVNAMIEKKLEPLSQDEDQHADLTQSRRPLTSCTIFLGYTSNLISSGIRETIRYLVQHNMVDVLVTTAGGVEEDLIKCLAPTYLGEFSLRGKELRENGINRIGNLLVPNENYCKFEDWLMPILDQMVMEQNTEVGLGQPGGASSVGVRGGMALKVTSSPEGVKWTPSKMIARLGKEINNPESVYYWAQKNHIPVFSPALTDGSLGDMIFFHSYKNPGLVLDIVEDLRLINTQAIFAKCTGMIILGGGVVKHHIANANLMRNGADYAVYINTAQEFDGSDSGARPDEAVSWGKIRVDAQPVKVYADASLVFPLLVAETFAQKMDAFMHEKNED

SEQ ID NO: 873775 - protein, 448 aa, Homo sapiens
MEGSLEREAPAGALAAVLKHSSTLPPESTQVRGYDFNRGVNYRALLEAFGTTGFQATNFGRAVQQVNAMIEKKLEPLSQDEDQHADLTQSRRPLTSCTIFLGYTSNLISSGIRETIRYLVQHNMVGPGEAVALASGSMGNAVIDRLSEMGRYGVCYKQRNRIKFCFVAELPHKSHWTRMRLEVLPRRGQGLPSWAKFTALWLQVDVLVTTAGGVEEDLIKCLAPTYLGEFSLRGKELRENGINRIGNLLVPNENYCKFEDWLMPILDQMVMEQNTEGVKWTPSKMIARLGKEINNPESVYYWAQKNHIPVFSPALTDGSLGDMIFFHSYKNPGLVLDIVEDLRLINTQAIFAKCTGMIILGGGVVKHHIANANLMRNGADYAVYINTAQEFDGSDSGARPDEAVSWGKIRVDAQPVKVYADASLVFPLLVAETFAQKMDAFMHEKNED

SEQ ID NO: 873776 - protein, 186 aa, Homo sapiens
MPILDQMVMEQNTEGVKWTPSKMIARLGKEINNPESVYYWAQKNHIPVFSPALTDGSLGDMIFFHSYKNPGLVLDIVEDLRLINTQAIFAKCTGMIILGGGVVKHHIANANLMRNGADYAVYINTAQEFDGSDSGARPDEAVSWGKIRVDAQPVKVYADASLVFPLLVAETFAQKMDAFMHEKNED

SEQ ID NO: 873777 - protein, 199 aa, Homo sapiens
MEGSLEREAPAGALAAVLKHSSTLPPESTQVRGYDFNRGVNYRALLEAFGTTGFQATNFGRAVQQVNAMIEKKLEPLSQDEDQHADLTQSRRPLTSCTIFLGYTSNLISSGIRETIRYLVQHNMVDVLVTTAGGVEEDLIKCLAPTYLGEFSLRGKELRENGINRIGNLLVPNENYCKFEDWLMPILDQMVMEQNTEGL

SEQ ID NO: 873778 - protein, 145 aa, Homo sapiens
MEGSLEREAPAGALAAVLKHSSTLPPESTQVRGYDFNRGVNYRALLEAFGTTGFQATNFGRAVQQVNAMIEKKLEPLSQDEDQHADLTQSRRPLTSCTIFLGYTSNLISSGILKPLPRRWMPSCMRRTRTERLRSQEGLTPSSIY

SEQ ID NO: 873779 - protein, 908 aa, Homo sapiens
MARERSSAAAGRKQFCKNNHTQPGNCLPLGLSLSRRPHSLQGGGHRIYRGKNIPPSQQITMLQTKDLIWTLFFLGTAVSLQVDIVPSQGEISVGESKFFLCQVAGDAKDKDISWFSPNGEKLTPNQQRISVVWNDDSSSTLTIYNANIDDAGIYKCVVTGEDGSESEATVNVKIFQKLMFKNAPTPQEFREGEDAVIVCDVVSSLPPTIIWKHKGRDVILKKDVRFIVLSNNYLQIRGIKKTDEGTYRCEGRILARGEINFKDIQVIVNVPPTIQARQNIVNATANLGQSVTLVCDAEGFPEPTMSWTKDGEQIEQEEDDEKYIFSDDSSQLTIKKVDKNDEAEYICIAENKAGEQDATIHLKVFAKPKITYVENQTAMELEEQVTLTCEASGDPIPSITWRTSTRNISSEEKTLDGHMVVRSHARVSSLTLKSIQYTDAGEYICTASNTIGQDSQSMYLEVQYAPKLQGPVAVYTWEGNQVNITCEVFAYPSATISWFRDGQLLPSSNYSNIKIYNTPSASYLEVTPDSENDFGNYNCTAVNRIGQESLEFILVQADTPSSPSIDQVEPYSSTAQVQFDEPEATGGVPILKYKAEWRAVGEEVWHSKWYDAKEASMEGIVTIVGLKPETTYAVRLAALNGKGLGEISAASEFKTQPVQGEPSAPKLEGQMGEDGNSIKVNLIKQDDGGSPIRHYLVRYRALSSEWKPEIRLPSGSDHVMLKSLDWNAEYEVYVVAENQQGKSKAAHFVFRTSAQPTAIPANGSPTSGLSTGAIVGILIVIFVLLLVVVDITCYFLNKCGLFMCIAVNLCGKAGPGAKGKDMEEGKAAFSKDESKEPIVEVRTEEERTPNHDGGKHTEPNETTPLTEPEKGPVEAKPECQETETKPAPAEVKTVPNDATQTKENESKA

SEQ ID NO: 873780 - protein, 858 aa, Homo sapiens
MLQTKDLIWTLFFLGTAVSLQVDIVPSQGEISVGESKFFLCQVAGDAKDKDISWFSPNGEKLTPNQQRISVVWNDDSSSTLTIYNANIDDAGIYKCVVTGEDGSESEATVNVKIFQKLMFKNAPTPQEFREGEDAVIVCDVVSSLPPTIIWKHKGRDVILKKDVRFIVLSNNYLQIRGIKKTDEGTYRCEGRILARGEINFKDIQVIVNVPPTIQARQNIVNATANLGQSVTLVCDAEGFPEPTMSWTKDGEQIEQEEDDEKYIFSDDSSQLTIKKVDKNDEAEYICIAENKAGEQDATIHLKVFAKPKITYVENQTAMELEEQVTLTCEASGDPIPSITWRTSTRNISSEEKASWTRPEKQETLDGHMVVRSHARVSSLTLKSIQYTDAGEYICTASNTIGQDSQSMYLEVQYAPKLQGPVAVYTWEGNQVNITCEVFAYPSATISWFRDGQLLPSSNYSNIKIYNTPSASYLEVTPDSENDFGNYNCTAVNRIGQESLEFILVQADTPSSPSIDQVEPYSSTAQVQFDEPEATGGVPILKYKAEWRAVGEEVWHSKWYDAKEASMEGIVTIVGLKPETTYAVRLAALNGKGLGEISAASEFKTQPVQGEPSAPKLEGQMGEDGNSIKVNLIKQDDGGSPIRHYLVRYRALSSEWKPEIRLPSGSDHVMLKSLDWNAEYEVYVVAENQQGKSKAAHFVFRTSAQPTAIPANGSPTSGLSTGAIVGILIVIFVLLLVVVDITCYFLNKCGLFMCIAVNLCGKAGPGAKGKDMEEGKAAFSKDESKEPIVEVRTEEERTPNHDGGKHTEPNETTPLTEPEKGPVEAKPECQETETKPAPAEVKTVPNDATQTKENESKA

SEQ ID NO: 873781 - protein, 918 aa, Homo sapiens
MARERSSAAAGRKQFCKNNHTQPGNCLPLGLSLSRRPHSLQGGGHRIYRGKNIPPSQQITMLQTKDLIWTLFFLGTAVSLQVDIVPSQGEISVGESKFFLCQVAGDAKDKDISWFSPNGEKLTPNQQRISVVWNDDSSSTLTIYNANIDDAGIYKCVVTGEDGSESEATVNVKIFQKLMFKNAPTPQEFREGEDAVIVCDVVSSLPPTIIWKHKGRDVILKKDVRFIVLSNNYLQIRGIKKTDEGTYRCEGRILARGEINFKDIQVIVNVPPTIQARQNIVNATANLGQSVTLVCDAEGFPEPTMSWTKDGEQIEQEEDDEKYIFSDDSSQLTIKKVDKNDEAEYICIAENKAGEQDATIHLKVFAKPKITYVENQTAMELEEQVTLTCEASGDPIPSITWRTSTRNISSEEKASWTRPEKQETLDGHMVVRSHARVSSLTLKSIQYTDAGEYICTASNTIGQDSQSMYLEVQYAPKLQGPVAVYTWEGNQVNITCEVFAYPSATISWFRDGQLLPSSNYSNIKIYNTPSASYLEVTPDSENDFGNYNCTAVNRIGQESLEFILVQADTPSSPSIDQVEPYSSTAQVQFDEPEATGGVPILKYKAEWRAVGEEVWHSKWYDAKEASMEGIVTIVGLKPETTYAVRLAALNGKGLGEISAASEFKTQPVQGEPSAPKLEGQMGEDGNSIKVNLIKQDDGGSPIRHYLVRYRALSSEWKPEIRLPSGSDHVMLKSLDWNAEYEVYVVAENQQGKSKAAHFVFRTSAQPTAIPANGSPTSGLSTGAIVGILIVIFVLLLVVVDITCYFLNKCGLFMCIAVNLCGKAGPGAKGKDMEEGKAAFSKDESKEPIVEVRTEEERTPNHDGGKHTEPNETTPLTEPEKGPVEAKPECQETETKPAPAEVKTVPNDATQTKENESKA

SEQ ID NO: 873782 - protein, 892 aa, Homo sapiens
MLQTKDLIWTLFFLGTAVSLQVDIVPSQGEISVGESKFFLCQVAGDAKDKDISWFSPNGEKLTPNQQRISVVWNDDSSSTLTIYNANIDDAGIYKCVVTGEDGSESEATVNVKIFQKLMFKNAPTPQEFREGEDAVIVCDVVSSLPPTIIWKHKGRDVILKKDVRFIVLSNNYLQIRGIKKTDEGTYRCEGRILARGEINFKDIQVIVNVPPTIQARQNIVNATANLGQSVTLVCDAEGFPEPTMSWTKDGEQIEQEEDDEKYIFSDDSSQLTIKKVDKNDEAEYICIAENKAGEQDATIHLKVFAKPKITYVENQTAMELEEQVTLTCEASGDPIPSITWRTSTRNISSEEKASWTRPEKQETLDGHMVVRSHARVSSLTLKSIQYTDAGEYICTASNTIGQDSQSMYLEVQYAPKLQGPVAVYTWEGNQVNITCEVFAYPSATISWFRDGQLLPSSNYSNIKIYNTPSASYLEVTPDSENDFGNYNCTAVNRIGQESLEFILVQADTPSSPSIDQVEPYSSTAQVQFDEPEATGGVPILKYKAEWRAVGEEVWHSKWYDAKEASMEGIVTIVGLKPETTYAVRLAALNGKGLGEISAASEFKTQPVPLLHRHLLARLPPVPLSPPDTTWPLPALATTEPAKGEPSAPKLEGQMGEDGNSIKVNLIKQDDGGSPIRHYLVRYRALSSEWKPEIRLPSGSDHVMLKSLDWNAEYEVYVVAENQQGKSKAAHFVFRTSAQPTAIPANGSPTSGLSTGAIVGILIVIFVLLLVVVDITCYFLNKCGLFMCIAVNLCGKAGPGAKGKDMEEGKAAFSKDESKEPIVEVRTEEERTPNHDGGKHTEPNETTPLTEPEKGPVEAKPECQETETKPAPAEVKTVPNDATQTKENESKA

SEQ ID NO: 873783 - protein, 848 aa, Homo sapiens
MLQTKDLIWTLFFLGTAVSLQVDIVPSQGEISVGESKFFLCQVAGDAKDKDISWFSPNGEKLTPNQQRISVVWNDDSSSTLTIYNANIDDAGIYKCVVTGEDGSESEATVNVKIFQKLMFKNAPTPQEFREGEDAVIVCDVVSSLPPTIIWKHKGRDVILKKDVRFIVLSNNYLQIRGIKKTDEGTYRCEGRILARGEINFKDIQVIVNVPPTIQARQNIVNATANLGQSVTLVCDAEGFPEPTMSWTKDGEQIEQEEDDEKYIFSDDSSQLTIKKVDKNDEAEYICIAENKAGEQDATIHLKVFAKPKITYVENQTAMELEEQVTLTCEASGDPIPSITWRTSTRNISSEEKTLDGHMVVRSHARVSSLTLKSIQYTDAGEYICTASNTIGQDSQSMYLEVQYAPKLQGPVAVYTWEGNQVNITCEVFAYPSATISWFRDGQLLPSSNYSNIKIYNTPSASYLEVTPDSENDFGNYNCTAVNRIGQESLEFILVQADTPSSPSIDQVEPYSSTAQVQFDEPEATGGVPILKYKAEWRAVGEEVWHSKWYDAKEASMEGIVTIVGLKPETTYAVRLAALNGKGLGEISAASEFKTQPVQGEPSAPKLEGQMGEDGNSIKVNLIKQDDGGSPIRHYLVRYRALSSEWKPEIRLPSGSDHVMLKSLDWNAEYEVYVVAENQQGKSKAAHFVFRTSAQPTAIPANGSPTSGLSTGAIVGILIVIFVLLLVVVDITCYFLNKCGLFMCIAVNLCGKAGPGAKGKDMEEGKAAFSKDESKEPIVEVRTEEERTPNHDGGKHTEPNETTPLTEPEKGPVEAKPECQETETKPAPAEVKTVPNDATQTKENESKA

SEQ ID NO: 873784 - protein, 760 aa, Homo sapiens
MLQTKDLIWTLFFLGTAVSLQVDIVPSQGEISVGESKFFLCQVAGDAKDKDISWFSPNGEKLTPNQQRISVVWNDDSSSTLTIYNANIDDAGIYKCVVTGEDGSESEATVNVKIFQKLMFKNAPTPQEFREGEDAVIVCDVVSSLPPTIIWKHKGRDVILKKDVRFIVLSNNYLQIRGIKKTDEGTYRCEGRILARGEINFKDIQVIVNVPPTIQARQNIVNATANLGQSVTLVCDAEGFPEPTMSWTKDGEQIEQEEDDEKYIFSDDSSQLTIKKVDKNDEAEYICIAENKAGEQDATIHLKVFAKPKITYVENQTAMELEEQVTLTCEASGDPIPSITWRTSTRNISSEEKTLDGHMVVRSHARVSSLTLKSIQYTDAGEYICTASNTIGQDSQSMYLEVQYAPKLQGPVAVYTWEGNQVNITCEVFAYPSATISWFRDGQLLPSSNYSNIKIYNTPSASYLEVTPDSENDFGNYNCTAVNRIGQESLEFILVQADTPSSPSIDQVEPYSSTAQVQFDEPEATGGVPILKYKAEWRAVGEEVWHSKWYDAKEASMEGIVTIVGLKPETTYAVRLAALNGKGLGEISAASEFKTQPVPLLHRHLLARLPPVPLSPPDTTWPLPALATTEPAKGEPSAPKLEGQMGEDGNSIKVNLIKQDDGGSPIRHYLVRYRALSSEWKPEIRLPSGSDHVMLKSLDWNAEYEVYVVAENQQGKSKAAHFVFRTSAQPTAIPATLGGNSASYTFVSLLFSAVTLLLLC

SEQ ID NO: 873785 - protein, 648 aa, Homo sapiens
MLQTKDLIWTLFFLGTAVSLQVDIVPSQGEISVGESKFFLCQVAGDAKDKDISWFSPNGEKLTPNQQRISVVWNDDSSSTLTIYNANIDDAGIYKCVVTGEDGSESEATVNVKIFQKLMFKNAPTPQEFREGEDAVIVCDVVSSLPPTIIWKHKGRDVILKKDVRFIVLSNNYLQIRGIKKTDEGTYRCEGRILARGEINFKDIQVIVNVPPTIQARQNIVNATANLGQSVTLVCDAEGFPEPTMSWTKDGEQIEQEEDDEKYIFSDDSSQLTIKKVDKNDEAEYICIAENKAGEQDATIHLKVFAKPKITYVENQTAMELEEQVTLTCEASGDPIPSITWRTSTRNISSEEKASWTRPEKQETLDGHMVVRSHARVSSLTLKSIQYTDAGEYICTASNTIGQDSQSMYLEVQYAPKLQGPVAVYTWEGNQVNITCEVFAYPSATISWFRDGQLLPSSNYSNIKIYNTPSASYLEVTPDSENDFGNYNCTAVNRIGQESLEFILVQADTPSSPSIDQVEPYSSTAQVQFDEPEATGGVPILKYKAEWRAVGEEVWHSKWYDAKEASMEGIVTIVGLKPETTYAVRLAALNGKGLGEISAASEFKTQPVQGEPSAPKLEGQMSARVTPEPGASSDVNTNHQTSRLPIIN

SEQ ID NO: 873786 - protein, 131 aa, Homo sapiens
  misc_feature (118)..(118): Xaa can be any naturally occurring amino acid
  misc_feature (131)..(131): Xaa can be any naturally occurring amino acid
MGEPPSSCLIRLPSGSDHVMLKSLDWNAEYEVYVVAENQQGKSKAAHFVFRTSAQPTAIPANGSPTSGLSTGAIVGILIVIFVLLLVVVDITCYFLNKCGLFMCIAVNLCGKAGLPSXSDHVMLEVPGLDX

SEQ ID NO: 873787 - protein, 848 aa, Homo sapiens; identical to SEQ ID NO: 873783

SEQ ID NO: 873788 - protein, 848 aa, Homo sapiens; identical to SEQ ID NO: 873783

SEQ ID NO: 873789 - protein, 760 aa, Homo sapiens; identical to SEQ ID NO: 873784

SEQ ID NO: 873790 - protein, 661 aa, Homo sapiens
MLQTKDLIWTLFFLGTAVSLQVDIVPSQGEISVGESKFFLCQVAGDAKDKDISWFSPNGEKLTPNQQRISVVWNDDSSSTLTIYNANIDDAGIYKCVVTGEDGSESEATVNVKIFQKLMFKNAPTPQEFREGEDAVIVCDVVSSLPPTIIWKHKGRDVILKKDVRFIVLSNNYLQIRGIKKTDEGTYRCEGRILARGEINFKDIQVIVNVPPTIQARQNIVNATANLGQSVTLVCDAEGFPEPTMSWTKDGEQIEQEEDDEKYIFSDDSSQLTIKKVDKNDEAEYICIAENKAGEQDATIHLKVFAKPKITYVENQTAMELEEQVTLTCEASGDPIPSITWRTSTRNISSEEKASWTRPEKQETLDGHMVVRSHARVSSLTLKSIQYTDAGEYICTASNTIGQDSQSMYLEVQYAPKLQGPVAVYTWEGNQVNITCEVFAYPSATISWFRDGQLLPSSNYSNIKIYNTPSASYLEVTPDSENDFGNYNCTAVNRIGQESLEFILVQADTPSSPSIDQVEPYSSTAQVQFDEPEATGGVPILKYKAEWRAVGEEVWHSKWYDAKEASMEGIVTIVGLKPETTYAVRLAALNGKGLGEISAASEFKTQPVPLLHRHLLARLPLFHCLHQIQLGLFLPLQPQNQLKTLHRITAVTCSKLVFIML

SEQ ID NO: 873791 - protein, 176 aa, Homo sapiens
MARERSSAAAGRKQFCKNNHTQPGNCLPLGLSLSRRPHSLQGGGHRIYRGKNIPPSQQITMLQTKDLIWTLFFLGTAVSLQVDIVPSQGEISVGESKFFLCQVAGDAKDKDISWFSPNGEKLTPNQQRISVVWNDDSSSTLTIYNANIDDAGIYKCVVTGEDGSESEAYFTKRLPP

SEQ ID NO: 873792 - protein, 71 aa, Homo sapiens
MAGGEAGTFFTRQQEMEMQAGKCQMLIKPSDLMRTHYHKNIMGETAPMIQSLPSLDVRLTGPSLDTWGLQF

SEQ ID NO: 873793 - protein, 121 aa, Homo sapiens
CALGHAVPAAWKASVLHPRALTLLLRTPIHPSKPSLSVPSPGSPPLTCQSPPSGSPASFSVWLLRTLMTDCPTSWRSQTRAFSSTGVVWFARFTLQAPSTEPDWVPEGAPRLRLAPPAPCL

SEQ ID NO: 873794 - protein, 376 aa, Homo sapiens
MFNPHALDVPAVIFDNGSGLCKAGLSGEIGPRHVISSVLGHCKFNVPLARLNQKYFVGQEALYKYEALHLHYPIERGLVTGWDDMEKLWKHLFERELGVKPSQQPVLMTEPSLNPREIREKLAEMMFETFSVPGFYLSNHAVAALYASACVTGLVVDSGDGVTCTVPIFEGYSLPHAVTKLCMAGRDITEHLTRLLFASGFNFPCILNKAVVNNIKEKLCYIALEPEKELRKSRGEVLGAYRLPDGHVIHFGDELYQVPEVLFAPDQLGIHSPGLSKMVSSSIMKCDTDIQNKLYADIVLSGGTTLLPGLEERLMKEVEQLASKGTPIKITASPDRCFSAWIGASIMTSMSSFKQMWVTSADFKEYGTSVVQRRCF

SEQ ID NO: 873795 - protein, 115 aa, Homo sapiens
HFYQFWNHSSSMAKFLFMSQVSEHGLIFPVQTGRSAALLIQLTTVHCSDVQGVGVDTFQLAGVWNGTSHSQRRDSLWRLSWQCSSLPCGWHVGHQQSSEYQPAKLRPSWGTEIYC

SEQ ID NO: 873796 - protein, 103 aa, Homo sapiens [sequence omitted]

SEQ ID NO: 873797 - protein, 203 aa, Homo sapiens
SEHNLSPEPLELDRMPHSPLISIPHVWCHPEEEERMHDELLQAVSKGPVMFRDVSIDFSQEEWECLDADQMNLYKEVMLENFSNLVSVGLSNSKPAVISLLEQGKEPWMVDRELTRGLCSDLESMCETKILSLKKRHFSQVIITREDMSTFIQPTFLIPPQKTMSEEKPWECKICGKTFNQNSQFIQHQRIHFGEKHYESKEY

SEQ ID NO: 873798 - protein, 107 aa, Homo sapiens
KKNINYKYGSSYESVAKINEKLVQLIEDYSLVSFIPLNIQDKESIQRVLQAVDKANGYCFGAQEQRSLEAMMSAAMGADFHFSSTLGIQEKYLAPSNQSVEQEAMQL

SEQ ID NO: 873799 - protein, 183 aa, Homo sapiens
MAGAAPTTAFGQAVIGPPGSGKTTYCLGMSEFLRALGRRVAVVNLDPANEGLPYECAVDVGELVGLGDVMDALRLGPNGGLLYCMEYLEANLDWLRAKLDPLRGHYFLFDCPGQVELCTHHGALRSIFSQMAQWDLRLTAVHLVDSHYCTDPAKFISVLCTSLATMLHVELPPHQPPFQDGPH

SEQ ID NO: 873800 - protein, 183 aa, Homo sapiens; identical to SEQ ID NO: 873799

SEQ ID NO: 873801 - protein, 183 aa, Homo sapiens; identical to SEQ ID NO: 873799

SEQ ID NO: 873802 - protein, 183 aa, Homo sapiens; identical to SEQ ID NO: 873799

SEQ ID NO: 873803 - protein, 258 aa, Homo sapiens
GTEEQHKEGTDETETDCQRIGRSMTGRYYIRDVTLAIRSLCDLATRYATQIAFRAWFACGTDRETQRTNEKGKHASQKQQDFGDKKTAVIGPPGSGKTTYCLGMSEFLRALGRRVAVVNLDPANEGLPYECAVDVGELVGLGDVMDALRLGPNGGLLYCMEYLEANLDWLRAKLDPLRGHYFLFDCPGQVELCTHHGALRSIFSQMAQWDLRLTAVHLVDSHYCTDPAKFISVLCTSLATMLHVELPPHQPPFQDGPH

SEQ ID NO: 873804 - protein, 183 aa, Homo sapiens; identical to SEQ ID NO: 873799

SEQ ID NO: 873805 - protein, 134 aa, Homo sapiens
MILVAPEHWFLSLAFNLDYYTEVLDLSYLLDHLASDPFFRHYRQLNEKLVQLIEDYSLVSFIPLNIQDKESIQRVLQAVDKANGYCFGAQEQRSLEAMMSAAMGADFHFSSTLGIQEKYLAPSNQSVEQEAMQL

SEQ ID NO: 873806 - protein, 71 aa, Homo sapiens
QALILMRECLSLFLQATLTLSIPSQLTAVHLVDSHYCTDPAKFISVLCTSLATMLHVELPPHQPPFQDGPH

SEQ ID NO: 873807 - protein, 183 aa, Homo sapiens; identical to SEQ ID NO: 873799

SEQ ID NO: 873808 - protein, 183 aa, Homo sapiens; identical to SEQ ID NO: 873799

SEQ ID NO: 873809 - protein, 183 aa, Homo sapiens; identical to SEQ ID NO: 873799

SEQ ID NO: 873810 - protein, 131 aa, Homo sapiens
MDLIEHYGKLAFNLDYYTEVLDLSYLLDHLASDPFFRHYRQLNEKLVQLIEDYSLVSFIPLNIQDKESIQRVLQAVDKANGYCFGAQEQRSLEAMMSAAMGADFHFSSTLGIQEKYLAPSNQSVEQEAMQL

SEQ ID NO: 873811 - protein, 145 aa, Homo sapiens
MAGAAPTTAFGQAVIGPPGSGKTTYCLGMSEFLRALGRRVAVVNLDPANEGLPYECAVDVGELVGLGDVMDALRLGPNGGLLYCMEYLEANLDWLRAKLDPLRGHYFLFDCPGQVELCTHHGALRSIFSQMAQWDLRPPYCQWCP

SEQ ID NO: 873812 - protein, 223 aa, Homo sapiens
KQYYFDCTCEHCQKKLKDDLFLGVKDNPKPSQEVVKEMIQFSKDTLEKIDKARSEGLYHEVVKLCRECLEKQEPVFADTNIYMLRMLSIVSEVLSYLQAFEEASFYARRMVDGYMKLYHPNNAQLGMAVMRAGLTNWHAGNIEVGHGMICKAYAILLVTHGPSHPITKDLEAMRVQTEMELRMFRQNEFMYYKMREAALNNQPMQVMAEPSNEPSPALFHKKQ

SEQ ID NO: 873813 - protein, 223 aa, Homo sapiens; identical to SEQ ID NO: 873812

SEQ ID NO: 873814 - protein, 188 aa, Homo sapiens
KQYYFDCTCEHCQKKLKDDLFLGVKDNPKPSQEVVKEMIQFSKDTLEKIDKARSEGLYHEVVKLCRECLEKQEPVFADTNIYMLRMLSIVSEVLSYLQAFEEASFYARRMVDGYISSTTPTMPNCTVIFNNGNHEAVKSMFHTQMRIELRALGKISEGEELTVSFYSSSYPQNLAQILECGRCSVNVC

SEQ ID NO: 873815 - protein, 57 aa, Homo sapiens
GIFPNLGLVNHDCWPNCTVIFNNGNHEAVKSMFHTQMRIELRALGKISEGEELTVSY

SEQ ID NO: 873816 - protein, 89 aa, Homo sapiens
RPLQHQNGIGFADNNDKAYAILLVTHGPSHPITKDLEAMRVQTEMELRMFRQNEFMYYKMREAALNNQPMQVMAEPSNEPSPALFHKKQ

SEQ ID NO: 873817 - protein, 103 aa, Homo sapiens
MTIGRMENVEVFTAEGKGRGLKATKEFWAADIIFAERAYSAVVFDSLVNFVCHTCFKRQEKLHRCGQCKFAHYCDRTCQKDAWLNHKNECSAIKRYGKVLQED

SEQ ID NO: 873818 - protein, 244 aa, Homo sapiens
KQYYFDCTCEHCQKKLKDDLFLGVKDNPKPSQEVVKEMIQFSKDTLEKIDKARSEGLYHEVVKLCRECLEKQEPVFADTNIYMLRMLSIVSEVLSYLQAFEEASFYARRMVDGYMKLYHPNNAQLGMAVMRAGLTNWHAGNIEVGHGMICKAYAILLVTHGPSHPITKDLEAMRVQTEMELRMFRQNEFMYYKMREAALNNQPMQVMAEPSNEPSPALFHKNAISKNAENSWILIFMTEFFLVV

SEQ ID NO: 873819 - protein, 715 aa, Homo sapiens
MVQKYQSPVRVYKYPFELIMAAYERRFPTCPLIPMFVGSDTVNEFKSEDGAIHVIERRCKLDVDAPRLLKKIAGVDYVYFVQKNSLNSRERTLHIEAYNETFSNRVIINEHCCYTVHPENEDWTCFEQSASLDIKSFFGFESTVEKIAMKQYTSNIKKGKEIIEYYLRQLEEEGITFVPRWSPPSITPSSETSSSSSKKQAASMAVVIPEAALKEGLSGDALSSPSAPEPVVGTPDDKLDADYIKRYLGDLTPLQESCLIRLRQWLQETHKGKIPKDEHILRFLRARDFNIDKAREIMCQSLTWRKQHQVDYILETWTPPQVLQDYYAGGWHHHDKDGRPLYVLRLGQMDTKGLVRALGEEALLRYVLSINEEGLRRCEENTKVFGRPISSWTCLVDLEGLNMRHLWRPGVKALLRIIEVVEANYPETLGRLLILRAPRVFPVLWTLVSPFIDDNTRRKFLIYAGNDYQGPGGLLDYIDKEIIPDFLSGECMCEVPEGGLVPKSLYRTAEELENEDLKLWTETIYQSASVFKGAPHEILIQIVDASSVITWDFDVCKGDIVFNIYHSKRSPQPPKKDSLGAHSITSPGGNNVQLIDKVWQLGRDYSMVESPLICKEGESVQGSHVTRWPGFYILQWKFHSMPACAASSLPRVDDVLASLQVSSHKCKVMYYTEVIGSEDFRGSMTSLESSHSGFSQLSAATTSSSQSHSSSMISR

SEQ ID NO: 873820 - protein, 80 aa, Homo sapiens
HQQCSYKILTSVDQYLELIGNSLPGTTAKAAVPPSSRVIQSHSPCKGILGQLWFEYAVCIVFLPLVPCHSFKTLLSFPIS

SEQ ID NO: 873821 - protein, 132 aa, Homo sapiens
HIVILILDTQAAEKYDCMVFSSSQVSPFIDDNTRRKFLIYAGNDYQGPGGLLDYIDKEIIPDFLSGECMVCPEARNCTFGPLCRWKGGGKTFKFIYFFCKVYLHGIRTLTFCFSPFLNNLRNFISLHVLLSG

SEQ ID NO: 873822 - protein, 672 aa, Homo sapiens [sequence omitted]

SEQ ID NO: 873823 - protein, 715 aa, Homo sapiens; identical to SEQ ID NO: 873819

SEQ ID NO: 873824 - protein, 466 aa, Homo sapiens
FRLVRPRGMGYRGPTASRETHKCTIPKDEHILRFLRARDFNIDKAREIMCQSLTWRKQHQVDYILETWTPPQVLQDYYAGGWHHHDKDGRPLYVLRLGQMDTKGLVRALGEEALLRYVLSINEEGLRRCEENTKVFGRPISSWTCLVDLEGLNMRHLWRPGVKALLRIIEVVEANYPETLGRLLILRAPRVFPVLWTLVSPFIDDNTRRKFLIYAGNDYQGPGGLLDYIDKEIIPDFLSGECMCEVPEGGLVPKSLYRTAEELENEDLKLWTETIYQSASVFKGAPHEILIQIVDASSVITWDFDVCKGDIVFNIYHSKRSPQPPKKDSLGAHSITSPGGNNVQLIDKVWQLGRDYSMVESPLICKEGESVQGSHVTRWPGFYILQWKFHSMPACAASSLPRVDDVLASLQVSSHKCKVMYYTEVIGSEDFRGSMTSLESSHSGFSQLSAATTSSSQSHSSSMISR

SEQ ID NO: 873825 - protein, 256 aa, Homo sapiens
AVVDLEESRYNAKVIGRRDFRGSMTSLESSHSGFSQLSAATTPKSLYRTAEELENEDLKLWTETIYQSASVFKGAPHEILIQIVDASSVITWDFDVCKGDIVFNIYHSKRSPQPPKKDSLGAHSITSPGGNNVQLIDKVWQLGRDYSMVESPLICKEGESVQGSHVTRWPGFYILQWKFHSMPACAASSLPRVDDVLASLQVSSHKCKVMYYTEVIGSEDFRGSMTSLESSHSGFSQLSAATTSSSQSHSSSMISR

SEQ ID NO: 873826 - protein, 715 aa, Homo sapiens; identical to SEQ ID NO: 873819

SEQ ID NO: 873827 - protein, 116 aa, Homo sapiens
RTRTPTHLRLGSEAWVFSHPHCQFSSQPSVGHLLCALWWLIVSEPRQFQPLGGRLGTSKSHLPLDTVHGVLLVAKQQLSHPLQGGVWHVGVLLLCTWELWTHACVCVHVLCVCMCA

SEQ ID NO: 873828 - protein, 715 aa, Homo sapiens; identical to SEQ ID NO: 873819

SEQ ID NO: 873829 - protein, 715 aa, Homo sapiens; identical to SEQ ID NO: 873819

SEQ ID NO: 873830 - protein, 386 aa, Homo sapiens [sequence omitted]

SEQ ID NO: 873831 - protein, 306 aa, Homo sapiens
HRAWCMTCSRIQRLNGWWCVTLGKEIRPYAFSVSLPSFSTCTLDPLESTMRSQHAGLVLVDRGCLTLPLFQILIQIVDASSVITWDFDVCKGDIVFNIYHSKRSPQPPKKDSLGAHSITSPGGNNVQLIDKVWQLGRDYSMVESPLICKEGESVQGSHVTRWPGFYILQWKFHSMPACAASSLPRVDDVLASLQVSSHKCKVMYYTEVIGSEDFRCGHPRHSRCCGQLGMVGGSLQSHAVCRISSGGGCQECLEGQEGVALGSFVGTVTPCLSAEGECRRQSRLTAFALAHTAVCVQAVGSRSPWW

SEQ ID NO: 873832 - protein, 52 aa, Homo sapiens
  misc_feature (31)..(31): Xaa can be any naturally occurring amino acid
  misc_feature (49)..(49): Xaa can be any naturally occurring amino acid
MGGPGEFWKDLGKGPGRKIQASGSNGNTGLXEPAKVETGVNSPEKEGDXSRL

SEQ ID NO: 873833 - protein, 715 aa, Homo sapiens; identical to SEQ ID NO: 873819

SEQ ID NO: 873834 - protein, 391 aa, Homo sapiens
MVLTTHSFPSSADGRPLYVLRLGQMDTKGLVRALGEEALLRYVLSINEEGLRRCEENTKVFGRPISSWTCLVDLEGLNMRHLWRPGVKALLRIIEVVEANYPETLGRLLILRAPRVFPVLWTLVSPFIDDNTRRKFLIYAGNDYQGPGGLLDYIDKEIIPDFLSGECMCEVPEGGLVPKSLYRTAEELENEDLKLWTETIYQSASVFKGAPHEILIQIVDASSVITWDFDVCKGDIVFNIYHSKRSPQPPKKDSLGAHSITSPGGNNVQLIDKVWQLGRDYSMVESPLICKEGESVQGSHVTRWPGFYILQWKFHSMPACAASSLPRVDDVLASLQVSSHKCKVMYYTEVIGSEDFRGSMTSLESSHSGFSQLSAATTSSSQSHSSSMISR

SEQ ID NO: 873835 - protein, 719 aa, Homo sapiens
MVQKYQSPVRVYKYPFELIMAAYERRFPTCPLIPMFVGSDTVNEFKSEDGAIHVIERRCKLDVDAPRLLKKIAGVDYVYFVQKNSLNSRERTLHIEAYNETFSNRVIINEHCCYTVHPENEDWTCFEQSASLDIKSFFGFESTVEKIAMKQYTSNIKKGKEIIEYYLRQLEEEGITFVPRWSPPSITPSSETSSSSSKKQAASMAVVIPEAALKEGLSGDALSSPSAPEPVVGTPDDKLDADYIKRYLGDLTPLQESCLIRLRQWLQETHKGKIPKDEHILRFLRARDFNIDKAREIMCQSLTWRKQHQVDYILETWTPPQVLQDYYAGGWHHHDKDGRPLYVLRLGQMDTKGLVRALGEEALLRYVLSINEEGLRRCEENTKVFGRPISSWTCLVDLEGLNMRHLWRPGVKALLRIIEVVEANYPETLGRLLILRAPRVFPVLWTLVSPFIDDNTRRKFLIYAGNDYQGPGGLLDYIDKEIIPDFLSGECMCEVPEGGLVPKSLYRTAEELENEDLKLWTETIYQSASVFKGAPHEILIQIVDASSVITWDFDVCKGDIVFNIYHSKRSPQPPKKDSLGAHSITSPGGNNVQLIDKVWQLGRDYSMVESPLICKEGESVQGSHVTRWPGFYILQWKFHSMPACAASSLPRVDDVLASLQVSSHKCKVMYYTEVIGSEDFRGSMTSLESSHSGFSQLSAATTSSSQSHSSSMISRWRFC

SEQ ID NO: 873836 - protein, 715 aa, Homo sapiens; identical to SEQ ID NO: 873819

SEQ ID NO: 873837 - protein, 715 aa, Homo sapiens; identical to SEQ ID NO: 873819

SEQ ID NO: 873838 - protein, 572 aa, Homo sapiens
MVQKYQSPVRVYKYPFELIMAAYERRFPTCPLIPMFVGSDTVNEFKSEDGAIHVIERRCKLDVDAPRLLKKIAGVDYVYFVQKNSLNSRERTLHIEAYNETFSNRVIINEHCCYTVHPENEDWTCFEQSASLDIKSFFGFESTVEKIAMKQYTSNIKKGKEIIEYYLRQLEEEGITFVPRWSPPSITPSSETSSSSSKKQAASMAVVIPEAALKEGLSGDALSSPSAPEPVVGTPDDKLDADYIKRYLGDLTPLQESCLIRLRQWLQETHKGKIPKDEHILRFLRARDFNIDKAREIMCQSLTWRKQHQVDYILETWTPPQVLQDYYAGGWHHHDKDGRPLYVLRLGQMDTKGLVRALGEEALLRYVLSINEEGLRRCEENTKVFGRPISSWTCLVDLEGLNMRHLWRPGVKALLRIIEVVEANYPETLGRLLILRAPRVFPVLWTLVSPFIDDNTRRKFLIYAGNDYQGPGGLLDYIDKEIIPDFLSGECMCEVPEGGLVPKSLYRTAEELENEDLKLWTETIYQSASVFKGAPHEILIQIVDASSVITWDFDVCKGDIVFNIYHSLSLRP

SEQ ID NO: 873839 - protein, 209 aa, Homo sapiens
NHCAQPAPKLAPILNMELQCAAGNFLCPAGALSFNAFKTVMDIDTSGTFNVSRVLYEKFFRVGASALCEKFFRDHGGVIVNITATLGNRGQALQVHAGSAKAAVDAMTRHLAVEWGPQNIRVNSLAPGPISGTEGLRRLGIFRPLLPAASLSQVESTNLNQQCLQPSPSSEHSAITALSLPTPMVKGVLPAWVQGLREPHGSRDLCSLG

SEQ ID NO: 873840 - protein, 208 aa, Homo sapiens
MDVRAPPAVMAAVDQALKEFGRIDILINCAAGNFLCPAGALSFNAFKTVMDIDTSGTFNVSRVLYEKFFRDHGGVIVNITATLGNRGQALQVHAGSAKAAVDAMTRHLAVEWGPQNIRVNSLAPGPISGTEGLRRLGGPQASLSTKVTASPLQRLGNKTEIAHSVLYLASPLASYVTGAVLVADGGAWLTFPNGVKGLPDFASFSAKL

SEQ ID NO: 873841 - protein, 105 aa, Homo sapiens [sequence omitted]

SEQ ID NO: 873842 - protein, 364 aa, Homo sapiens
RGSRFQASSQLRAGSWRPRPLPPVVPAVPDGSAMAQPPPDVEGDDCLPAYRHLFCPDLLRDKVAFITGGGSGIGFRIAEIFMRHGCHTVIASRSLPRVLTAVLPQSGVQQQTQGPRGTRKHRPLQIPKAFSPGRGCRAAVCLFTWLAARKLAGATGRRCLPLSMDVRAPPAVMAAVDQALKEFGRIDILINCAAGNFLCPAGALSFNAFKTVMDIDTSGTFNVSRVLYEKFFRDHGGVIVNITATLGNRGQALQVHAGSAKAAVDAMTRHLAVEWGPQNIRVNSLAPGPISGTEGLRRLGIFRPLLPAASLSQVESTNLNQQCLQPSPSSEHSAITALSLPTAPTPGQEQLDSGPGPWSCHAGA

SEQ ID NO: 873843 - protein, 158 aa, Homo sapiens
HGGVIVNITATLGNRGQALQVHAGSAKAAVGMTTPPRPGLPTWVPNGPSASIPGGQQSPLEAEPSCRQRDLALALRPRRGQSGLSYPTFFCADAMTRHLAVEWGPQNIRVNSLAPGPISGTEGLRRLGKALREPRPPTDPLLGHRVPMKLPEPWQGVC

SEQ ID NO: 873844 - protein, 325 aa, Homo sapiens
RGSRFQASSQLRAGSWRPRPLPPVVPAVPDGSAMAQPPPDVEGDDCLPAYRHLFCPDLLRDKVAFITGGGSGIGFRIAEIFMRHGCHTVIASRSLPRVLTAARKLAGATGRRCLPLSMDVRAPPAVMAAVDQALKEFGRIDILINCAAGNFLCPAGALSFNAFKTVMDIDTSGTFNVSRVLYEKFFRDHGGVIVNITATLGNRGQALQVHAGSAKAAVDAMTRHLAVEWGPQNIRVNSLAPGPISGTEGLRRLGGPQASLSTKVTASPLQRLGNKTEIAHSVLYLASPLASYVTGAVLVADGGAWLTFPNGVKGLPDFASFSAKL

SEQ ID NO: 873845 - protein, 296 aa, Homo sapiens
GQVRPESDWDVRPQVPGPAAARPPQLPPHRTIHVPGLPPSASGIGFRIAEIFMRHGCHTVIASRSLPRVLTAARKLAGATGRRCLPLSMDVRAPPAVMAAVDQALKEFGRIDILINCAAGNFLCPAGALSFNAFKTVMDIDTSGTFNVSRVLYEKFFRDHGGVIVNITATLGNRGQALQVHAGSAKAAVDAMTRHLAVEWGPQNIRVNSLAPGPISGTEGLRRLGGPQASLSTKVTASPLQRLGNKTEIAHSVLYLASPLASYVTGAVLVADGGAWLTFPNGVKGLPDFASFSAKL

SEQ ID NO: 873846 - protein, 307 aa, Homo sapiens
GQVRPESDWDVRPQVPGPAAARPPQLPPHRTIHVPGLPPSASGIGFRIAEIFMRHGCHTVIASRSLPRVLTAARKLAGATGRRCLPLSMDVRAPPAVMAAVDQALKEFGRIDILINCSSSSCGSHSAGAAGNFLCPAGALSFNAFKTVMDIDTSGTFNVSRVLYEKFFRDHGGVIVNITATLGNRGQALQVHAGSAKAAVDAMTRHLAVEWGPQNIRVNSLAPGPISGTEGLRRLGGPQASLSTKVTASPLQRLGNKTEIAHSVLYLASPLASYVTGAVLVADGGAWLTFPNGVKGLPDFASFSAKL

SEQ ID NO: 873847 - protein, 318 aa, Homo sapiens
RGSRFQASSQLRAGSWRPRPLPPVVPAVPDGSAMAQPPPDVEGDDCLPAYRHLFCPDLLRDKVAFITGGGSGIGFRIAEIFMRHGCHTVIASRSLPRVLTAARKLAGATGRRCLPLSMDVRAPPAVMAAVDQALKEFGRIDILINCAAGNFLCPAGALSFNAFKTVMDIDTSGTFNVSRVLYEKFFRDHGGVIVNITATLGNRGQALQVHAGSAKAAVDAMTRHLAVEWGPQNIRVNSLAPGPISGTEGLRRLGIFRPLLPAASLSQVESTNLNQQCLQPSPSSEHSAITALSLPTAPTPGQEQLDSGPGPWSCHAGA

SEQ ID NO: 873848 - protein, 325 aa, Homo sapiens; identical to SEQ ID NO: 873844

SEQ ID NO: 873849 - protein, 169 aa, Homo sapiens
DFKPSIYSSTIPTPTTPRSYSLNPLTPDLLLTLSSFMPPGSLPGLDHMVYPQSSHRFFCAMLNSLMPPPSTVLTWQNPNPRLNPTPCPLLPSPALHLGCRKQNSFRAPAQLPIQSFLLEPPGTGLLFSPFHSYSSYQSHQRSPRYQAHSETRLFLAPALAASDIDITLL

SEQ ID NO: 873850 - protein, 1098 aa, Homo sapiens
MAERGGDGGESERFNPGELRMAQQQALRFRGPAPPPNAVMRGPPPLMRPPPPFGMMRGPPPPPRPPFGRPPFDPNMPPMPPPGGIPPPMGPPHLQRPPFMPPPMSSMPPPPGMMFPPGMPPVTAPGTPALPPTEEIWVENKTPDGKVYYYNARTRESAWTKPDGVKVIQQSELTPMLAAQAQVQAQAQAQAQAQAQAQAQAQAQAQAQAQAQAQAQAQAQAQAQAQAQAQAQAQAQAQAQAQVQAQVQAQVQAQAVGASTPTTSSPAPAVSTSTSSSTPSSTTSTTTTATSVAQTVSTPTTQDQTPSSAVSVATPTVSVSTPAPTATPVQTVPQPHPQTLPPAVPHSVPQPTTAIPAFPPVMVPPFRVPLPGMPIPLPGVAMMQIVSCPYVKTVATTKTGVLPGMAPPIVPMIHPQVAIAASPATLAGATAVSEWTEYKTADGKTYYYNNRTLESTWEKPQELKEKEKLEEKIKEPIKEPSEEPLPMETEEEDPKEEPIKEIKEEPKEEEMTEEEKAAQKAKPVATAPIPGTPWCVVWTGDERVFFYNPTTRLSMWDRPDDLIGRADVDKIIQEPPHKKGMEELKKLRHPTPTMLSIQKWQFSMSAIKEEQELMEEINEDEPVKAKKRKRDDNKDIDSEKEAAMEAEIKAARERAIVPLEARMKQFKDMLLERGVSAFSTWEKELHKIVFDPRYLLLNPKERKQVFDQYVKTRAEEERREKKNKIMQAKEDFKKMMEEAKFNPRATFSEFAAKHAKDSRFKAIEKMKDREALFNEFVAAARKKEKEDSKTRGEKIKSDFFELLSNHHLDSQSRWSKVKDKVESDPRYKAVDSSSMREDLFKQYIEKIAKNLDSEKEKELERQARIEASLREREREVQKARSEQTKEIDREREQHKREEAIQNFKALLSDMVRSSDVSWSDTRRTLRKDHRWESGSLLEREEKEKLFNEHIEALTKKKREHFRQLLDETSAITLTSTWKEVKKIIKEDPRCIKFSSSDRKKQREFEEYIRDKYITAKADFRTLLKETKFITYRSKKLIQESDQHLKDVEKILQNDKRYLVLDCVPEERRKLIVAYVDDLDRRGPPPPPTASEPTRRSTK

SEQ ID NO: 873851 - protein, 1011 aa, Homo sapiens
MAERGGDGGESERFNPGELRMAQQQALRFRGPAPPPNAVMRGPPPLMRPPPPFGMMRGPPPPPRPPFGRPPFDPNMPPMPPPGGIPPPMGPPHLQRPPFMPPPMSSMPPPPGMMFPPGMPPVTAPGTPALPPTEEIWVENKTPDGKVYYYNARTRESAWTKPDGVKVIQQSELTPMLAAQAQVQAQAQAQAQAQAQAQAQAQAQAQAQAQAQAQAQAQAQAQAQAQAQAQAQAQAQAQAQAQVQAQVQAQVQAQAVGASTPTTSSPAPAVSTSTSSSTPSSTTSTTTTATSVAQTVSTPTTQDQTPSSAVSVATPTVSVSTPAPTATPVQTVPQPHPQTLPPAVPHSVPQPTTAIPAFPPVMVPPFRVPLPGMPIPLPGVLPGMAPPIVPMIHPQVAIAASPATLAGATAVSEWTEYKTADGKTYYYNNRTLESTWEKPQELKEKEKLEEKIKEPIKEPSEEPLPMETEEEDPKEEPIKEIKEEPKEEEMTEEEKAAQKAKPVATAPIPGTPWCVVWTGDERVFFYNPTTRLSMWDRPDDLIGRADVDKIIQEPPHKKGMEELKKLRHPTPTMLSIQKWQFSMSAIKEEQELMEEINEDEPVKAKKRKRDDNKDIDSEKEAAMEAEIKAARERAIVPLEARMKQFKDMLLERGVSAFSTWEKELHKIVFDPRYLLLNPKERKQVFDQYVKTRAEEERREKKNKIMQAKEDFKKMMEEAKFNPRATFSEFAAKHAKDSRFKAIEKMKDREALFNEFVAAARKKEKEDSKTRGEKIKSDFFELLSNHHLDSQSRWSKVKDKVESDPRYKAVDSSSMREDLFKQYIEKIAKNLDSEKEKELERQARIEASLREREREVQKARSEQTKEIDREREQHKREEAIQNFKALLSDMVRSSDVSWSDTRRTLRKDHRWESGSLLEREEKEKLFNEHIEALTKKKREHFRQLLDETSAITLTSTWKEVKKIIKEDPRCIKFSSSDRKKQREFEEYIRDKYITAKADFRTLLKETKFITYS

SEQ ID NO: 873852 - protein, 1077 aa, Homo sapiens
MAERGGDGGESERFNPGELRMAQQQALRFRGPAPPPNAVMRGPPPLMRPPPPFGMMRGPPPPPRPPFGRPPFDPNMPPMPPPGGIPPPMGPPHLQRPPFMPPPMSSMPPPPGMMFPPGMPPVTAPGTPALPPTEEIWVENKTPDGKVYYYNARTRESAWTKPDGVKVIQQSELTPMLAAQAQVQAQAQAQAQAQAQAQAQAQAQAQAQAQAQAQAQAQAQAQAQAQAQAQAQAQAQAQAQAQVQAQVQAQVQAQAVGASTPTTSSPAPAVSTSTSSSTPSSTTSTTTTATSVAQTVSTPTTQDQTPSSAVSVATPTVSVSTPAPTATPVQTVPQPHPQTLPPAVPHSVPQPTTAIPAFPPVMVPPFRVPLPGMPIPLPGVLPGMAPPIVPMIHPQVAIAASPATLAGATAVSEWTEYKTADGKTYYYNNRTLESTWEKPQELKEKEKLEEKIKEPIKEPSEEPLPMETEEEDPKEEPIKEIKEEPKEEEMTEEEKAAQKAKPVATAPIPGTPWCVVWTGDERVFFYNPTTRLSMWDRPDDLIGRADVDKIIQEPPHKKGMEELKKLRHPTPTMLSIQKWQFSMSAIKEEQELMEEINEDEPVKAKKRKRDDNKDIDSEKEAAMEAEIKAARERAIVPLEARMKQFKDMLLERGVSAFSTWEKELHKIVFDPRYLLLNPKERKQVFDQYVKTRAEEERREKKNKIMQAKEDFKKMMEEAKFNPRATFSEFAAKHAKDSRFKAIEKMKDREALFNEFVAAARKKEKEDSKTRGEKIKSDFFELLSNHHLDSQSRWSKVKDKVESDPRYKAVDSSSMREDLFKQYIEKIAKNLDSEKEKELERQARIEASLREREREVQKARSEQTKEIDREREQHKREEAIQNFKALLSDMVRSSDVSWSDTRRTLRKDHRWESGSLLEREEKEKLFNEHIEALTKKKREHFRQLLDETSAITLTSTWKEVKKIIKEDPRCIKFSSSDRKKQREFEEYIRDKYITAKADFRTLLKETKFITYRSKKLIQESDQHLKDVEKILQNDKRYLVLDCVPEERRKLIVAYVDDLDRRGPPPPPTASEPTRRSTK

SEQ ID NO: 873853 - protein, 635 aa, Homo sapiens
MAERGGDGGESERFNPGELRMAQQQALRFRGPAPPPNAVMRGPPPLMRPPPPFGMMRGPPPPPRPPFGRPPFDPNMPPMPPPGGIPPPMGPPHLQRPPFMPPPMSSMPPPPGMMFPPGMPPVTAPGTPALPPTEEIWVENKTPDGKVYYYNARTRESAWTKPDGVKVIQQSELTPMLAAQAQVQAQAQAQAQAQAQAQAQAQAQAQAQAQAQAQAQAQAQAQAQAQAQAQAQAQAQAQAQAQVQAQVQAQVQAQAVGASTPTTSSPAPAVSTSTSSSTPSSTTSTTTTATSVAQTVSTPTTQDQTPSSAVSVATPTVSVSTPAPTATPVQTVPQPHPQTLPPAVPHSVPQPTTAIPAFPPVMVPPFRVPLPGMPIPLPGVLPGMAPPIVPMIHPQVAIAASPATLAGATAVSEWTEYKTADGKTYYYNNRTLESTWEKPQELKEKEKLEEKIKEPIKEPSEEPLPMETEEEDPKEEPIKEIKEEPKEEEMTEEEKAAQKAKPVATAPIPGTPWCVVWTGDERVFFYNPTTRLSMWDRPDDLIGRADVDKIIQEPPHKKGMEELKKLRHPTPTMLSIQKWQFSMSAIKEEQELMEEINEDEPVKAKKRKRMSKKSFMWIARASLFRYKAKSLFFLA

SEQ ID NO: 873854 - protein, 1094 aa, Homo sapiens
MAERGGDGGESERFNPGELRMAQQQALRFRGPAPPPNAVMRGPPPLMRPPPPFGMMRGPPPPPRPPFGRPPFDPNMPPMPPPGGIPPPMGPPHLQRPPFMPPPMSSMPPPPGMMFPPGMPPVTAPGTPALPPTEEIWVENKTPDGKVYYYNARTRESAWTKPDGVKVIQQSELTPMLAAQAQVQAQAQAQAQAQAQAQAQAQAQAQAQAQAQAQAQAQAQAQAQAQAQAQAQAQAQAQAQAQVQAQVQAQVQAQAVGASTPTTSSPAPAVSTSTSSSTPSSTTSTTTTATSVAQTVSTPTTQDQTPSSAVSVATPTVSVSTPAPTATPVQTVPQPHPQTLPPAVPHSVPQPTTAIPAFPPVMVPPFRVPLPGMPIPLPGVLPGMAPPIVPMIHPQVAIAASPATLAGATAVSEWTEYKTADGKTYYYNNRTLESTWEKPQELKEKEKLEEKIKEPIKEPSEEPLPMETEEEDPKEEPIKEIKEEPKEEEMTEEEKAAQKAKPVATAPIPGTPWCVVWTGDERVFFYNPTTRLSMWDRPDDLIGRADVDKIIQEPPHKKGMEELKKLRHPTPTMLSIQKWQFSMSAIKEEQELMEEINEDEPVKAKKRKRMSKKSFMWIARASLFRRDDNKDIDSEKEAAMEAEIKAARERAIVPLEARMKQFKDMLLERGVSAFSTWEKELHKIVFDPRYLLLNPKERKQVFDQYVKTRAEEERREKKNKIMQAKEDFKKMMEEAKFNPRATFSEFAAKHAKDSRFKAIEKMKDREALFNEFVAAARKKEKEDSKTRGEKIKSDFFELLSNHHLDSQSRWSKVKDKVESDPRYKAVDSSSMREDLFKQYIEKIAKNLDSEKEKELERQARIEASLREREREVQKARSEQTKEIDREREQHKREEAIQNFKALLSDMVRSSDVSWSDTRRTLRKDHRWESGSLLEREEKEKLFNEHIEALTKKKREHFRQLLDETSAITLTSTWKEVKKIIKEDPRCIKFSSSDRKKQREFEEYIRDKYITAKADFRTLLKETKFITYRSKKLIQESDQHLKDVEKILQNDKRYLVLDCVPEERRKLIVAYVDDLDRRGPPPPPTASEPTRRSTK

SEQ ID NO: 873855 - protein, 412 aa, Homo sapiens
LPLEDPPPFTTISKERKQVFDQYVKTRAEEERREKKNKIMQAKEDFKKMMEEAKFNPRATFSEFAAKHAKDSRFKAIEKMKDREALFNEFVAAARKKEKEDSKTRGEKIKSDFFELLSNHHLDSQSRWSKVKDKVESDPRYKAVDSSSMREDLFKQYIEKIAKNLDSEKEKELERQARIEASLREREREVQKARSEQTKEIDREREQHKREEAIQNFKALLSDMVRSSDVSWSDTRRTLRKDHRWESGSLLEREEKEKLFNEHIEALTKKKREHFRQLLDETSAITLTSTWKEVKKIIKEDPRCIKFSSSDRKKQREFEEYIRDKYITAKADFRTLLKETKFITYRSKKLIQESDQHLKDVEKILQNDKRYLVLDCVPEERRKLIVAYVDDLDRRGPPPPPTASEPTRRSTK

SEQ ID NO: 873856 - protein, 264 aa, Homo sapiens
MREDLFKQYIEKIAKNLDSEKEKELERQARIEASLREREREVQKARSEQTKEIDREREQHKREEAIQNFKALLSDMVRSSDVSWSDTRRTLRKDHRWESGSLLEREEKEKLFNEHIEALTKKKREHFRQLLDETSAITLTSTWKEVKKIIKEDPRCIKFSSSDRKKQREFEEYIRDKYITAKADFRTLLKETKFITYRSKKLIQESDQHLKDVEKILQNDKRYLVLDCVPEERRKLIVAYVDDLDRRGPPPPPTASEPTRRSTK

SEQ ID NO: 873857 - protein, 320 aa, Homo sapiens [sequence omitted]

SEQ ID NO: 873858 - protein, 964 aa, Homo sapiens
MAERGGDGGESERFNPGELRMAQQQALRFRGPAPPPNAVMRGPPPLMRPPPPFGMMRGPPPPPRPPFGRPPFDPNMPPMPPPGGIPPPMGPPHLQRPPFMPPPMSSMPPPPGMMFPPGMPPVTAPGTPALPPTEEIWVENKTPDGKVYYYNARTRESAWTKPDGVKVIQQSELTPMLAAQAQVQAQAQAQAQAQAQAQAQAQAQAQAQAQAQAQAQAQAQAQAQAQAQAQAQAQAQAQAQAQVQAQVQAQVQAQAVGASTPTTSSPAPAVSTSTSSSTPSSTTSTTTTATSVAQTVSTPTTQDQTPSSAVSVATPTVSVSTPAPTATPVQTVPQPHPQTLPPAVPHSVPQPTTAIPAFPPVMVPPFRVPLPGMPIPLPGVLPGMAPPIVPMIHPQVAIAASPATLAGATAVSEWTEYKTADGKTYYYNNRTLESTWEKPQELKEKEKLEEKIKEPIKEPSEEPLPMETEEEDPKEEPIKEIKEEPKEEEMTEEEKAAQKAKPVATAPIPGTPWCVVWTGDERVFFYNPTTRLSMWDRPDDLIGRADVDKIIQEPPHKKGMEELKKLRHPTPTMLSIQKWQFSMSAIKEEQELMEEINEDEPVKAKKRKRDDNKDIDSEKEAAMEAEIKAARERAIVPLEARMKQFKDMLLERGVSAFSTWEKELHKIVFDPRYLLLNPKERKQVFDQYVKTRAEEERREKKNKIMQAKEDFKKMMEEAKFNPRATFSEFAAKHAKDSRFKAIEKMKDREALFNEFVAAARKKEKEDSKTRGEKIKSDFFELLSNHHLDSQSRWSKVKDKVESDPRYKAVDSSSMREDLFKQYIEKIAKNLDSEKEKELERQARIEASLREREREVQKARSEQTKEIDREREQHKREEAIQNFKALLSDMVRSSDVSWSDTRRTLRKDHRWESGSLLEREEKEKLFNEHIEALTKKKREHFRQLLDETSAVRISYFSHFNLDESC

SEQ ID NO: 873859 - protein, 1077 aa, Homo sapiens; identical to SEQ ID NO: 873852

SEQ ID NO: 873860 - protein, 1060 aa, Homo sapiens
MAERGGDGGESERFNPGELRMAQQQALRFRGPAPPPNAVMRGPPPLMRPPPPFGMMRGPPPPPRPPFGRPPFDPNMPPMPPPGGIPPPMGPPHLQRPPFMPPPMSSMPPPPGMMFPPGMPPVTAPGTPALPPTEEIWVENKTPDGKVYYYNARTRESAWTKPDGVKVIQQSELTPMLAAQAQVQAQAQAQAQAQAQAQAQAQAQAQAQAQAQAQAQAQAQAQAQAQAQAQAQAQAQAQAQAQVQAQVQAQVQAQAVGASTPTTSSPAPAVSTSTSSSTPSSTTSTTTTATSVAQTVSTPTTQDQTPSSAVSVATPTVSVSTPAPTATPVQTVPQPHPQTLPPAVPHSVPQPTTAIPAFPPVMVPPFRVPLPGMPIPLPGVLPGMAPPIVPMIHPQVAIAASPATLAGATAVSEWTEYKTADGKTYYYNNRTLESTWEKPQELKEKEKLEEKIKEPIKEPSEEPLPMETEEEDPKEEPIKEIKEEPKEEEMTEEEKAAQKAKPVATAPIPGTPWCVVWTGDERVFFYNPTTRLSMWDRPDDLIGRADVDKIIQEPPHKKGMEELKKLRHPTPTMLSIQKWQFSMSAIKEEQELMEEINEDEPVKAKKRKRDDNKDIDSEKEAAMEAEIKAARERAIVPLEARMKQFKDMLLERGVSAFSTWEKELHKIVFDPRYLLLNPKERKQVFDQYVKTRAEEERREKKNKIMQAKEDFKKMMEEAKFNPRATFSEFAAKHAKDSRFKAIEKMKDREALFNEFVAAARKKEKEDSKTRGEKIKSDFFELLSNHHLDSQSRWSKVKDKVESDPRYKAVDSSSMREDLFKQYIEKIAKNLDSEKEKELERQARIEASLREREREVQKARSEQTKEIDREREQHKREEAIQNFKALLSDMVRSSDVSWSDTRRTLRKDHRWESGSLLEREEKEKLFNEHIEALTKKKREHFRQLLDETSAITLTSTWKEVKKKQREFEEYIRDKYITAKADFRTLLKETKFITYRSKKLIQESDQHLKDVEKILQNDKRYLVLDCVPEERRKLIVAYVDDLDRRGPPPPPTASEPTRRSTK

SEQ ID NO: 873861 - protein, 1077 aa, Homo sapiens; identical to SEQ ID NO: 873852

SEQ ID NO: 873862 - protein, 466 aa, Homo sapiens
METSVWFYVSFINRYPVDFKQNYDLYIFRGDLIMRQYVFILKVSAFSTWEKELHKIVFDPRYLLLNPKERKQVFDQYVKTRAEEERREKKNKIMQAKEDFKKMMEEAKFNPRATFSEFAAKHAKDSRFKAIEKMKDREALFNEFVAAARKKEKEDSKTRGEKIKSDFFELLSNHHLDSQSRWSKVKDKVESDPRYKAVDSSSMREDLFKQYIEKIAKNLDSEKEKELERQARIEASLREREREVQKARSEQTKEIDREREQHKREEAIQNFKALLSDMVRSSDVSWSDTRRTLRKDHRWESGSLLEREEKEKLFNEHIEALTKKKREHFRQLLDETSAITLTSTWKEVKKIIKEDPRCIKFSSSDRKKQREFEEYIRDKYITAKADFRTLLKETKFITYRSKKLIQESDQHLKDVEKILQNDKRYLVLDCVPEERRKLIVAYVDDLDRRGPPPPPTASEPTRRSTK

SEQ ID NO: 873863 - protein, 184 aa, Homo sapiens
MIHIGNKKYCNGLGQISSLMDLSYLISTCIRMVSKPGKEALWFLMLPLPAGFILRLTRTFRQVRSSDVSWSDTRRTLRKDHRWESGSLLEREEKEKLFNEHIEALTKKKREHFRQLLDETSAITLTSTWKEVKKIIKEDPRCIKFSSSDRKKQREFEEYIRDKYITAKADFRTLLKETKFITYS

SEQ ID NO: 873864 - protein, 120 aa, Homo sapiens
SSVAQQQRFAKRTPTVPQPTLRTHPLTFSASCGVRLSNQAQSWPKNQAEKRGRCHAKLLRGSWGRFSFLIKGRGAPRGVSLVPTLILSRINVYSKRVRSLFALLRDVSQWHNRCSLKKME

SEQ ID NO: 873865 - protein, 112 aa, Homo sapiens
QGNSDREGEMGRWVKVRREADSAGRGNSSLQESRCTGPLRGPCACGIPRGAWGTAGAQPCRVRRVRPPRRTRRCLGEVKGLVDLRWPGYPTGTPRAQAGLCTSKPPTTAPGP

SEQ ID NO: 873866 - protein, 118 aa, Homo sapiens
AAAAQPALSAPRSDSGAHQAGTRARARRAPLLLLSVPGSRSPNAPRRGCARQWSRSELLGFGGRSLLRLAGGPAGKEGESGDTHTRRGARALHTRSRAPPPRRVRSEFGPAAPAPAPA

SEQ ID NO: 873867 - protein, 192 aa, Homo sapiens
HEMTSIGLLLGVSAAKLGTMDMSITRLLSIRIPALLPPTSTELDVPHNVQVAAVVGIGLVYQGTAHRHTAEVLLAEIGRPPGPEMEYCTDRESYSLAAGLALGMVCLGHGSNLIGMSDLNVPERLYQYMVGGHRRFQTGMHREKHKSPSYQIKEGDTINVDVTWPGATLALAMIYLKTNNSASRKPRHMEKF

SEQ ID NO: 873868 - protein, 309 aa, Homo sapiens
MSSPRAVVQLGKAQPAGEELATANQTAQQPSSPAMRRLTVDDFEIGRPLGKGKFGNVYLARLKESHFIVALKVLFKSQIEKEGLEHQLRREIEIQAHLQHPNILRLYNYFHDARRVYLILEYAPRGELYKELQKSEKLDEQRTATIIEELADALTYCHDKKVIHRDIKPENLLLGFRGEVKIADFGWSVHTPSLRRKTMCGTLDYLPPEMIEGRTYDEKVDLWCIGVLCYELLVGYPPFESASHSETYRRILKVDVRFPLSMPLGARDLISRLLRYQPLERLPLAQILKHPWVQAHSRRVLPPCAQMAS

SEQ ID NO: 873869 - protein, 275 aa, Homo sapiens
MRRLTVDDFEIGRPLGKGKFGNVYLARLKESHFIVALKVLFKSQIEKEGLEHQLRREIEIQAHLQHPNILRLYNYFHDARRVYLILEYAPRGELYKELQKSEKLDEQRTATIIEELADALTYCHDKKVIHRDIKPENLLLGFRGEVKIADFGWSVHTPSLRRKTMCGTLDYLPPEMIEGRTYDEKVDLWCIGVLCYELLVGYPPFESASHSETYRRILKVDVRFPLSMPLGARDLISRLLRYQPLERLPLAQILKHPWVQAHSRRVLPPCAQMAS

SEQ ID NO: 873870 - protein, 130 aa, Homo sapiens
EPSAKYNGTAIISLVRGPGILGEVTVFWRIFPPSVGEFAETSGKLTMRDEQSAVIVVIQALNDDIPEEKSFYEFQLTAVSEGGVLSESSSTANITVVASDSPYGRFAFSHEQLRVSEAQRVNITIIRSSG

SEQ ID NO: 873871 - protein, 72 aa, Homo sapiens
RWSQNADISQRDVDTRWNVASKPLGKDCEDARPIKEDDDADMGAKCVESFVASIWRRHVEDSMENQHIGNKN

SEQ ID NO: 873872 - protein, 416 aa, Homo sapiens
MASSSGSSPRPAPDENEFPFGCPPTVCQDPKEPRALCCAGCLSENPRNGEDQICPKCRGEDLQSISPGSRLRTQEKAHPEVAEAGIGCPFAGVGCSFKGSPQSVQEHEVTSQTSHLNLLLGFMKQWKARLGCGLESGPMALEQNLSDLQLQAAVEVAGDLEVDCYRAPCSESQEELALQHFMKEKLLAELEGKLRVFENIVAVLNKEVEASHLALATSIHQSQLDRERILSLEQRVVELQQTLAQKDQALGKLEQSLRLMEEASFDGTFLWKITNVTRRCHESACGRTVSLFSPAFYTAKYGYKLCLRLYLNGDGTGKRTHLSLFIVIMRGEYDALLPWPFRNKVTFMLLDQNNREHAIDAFRPDLSSASFQRPQSETNVASGCPLFFPLSKLQSPKHAYVKDDTMFLKCIVETST

SEQ ID NO: 873873 - protein, 174 aa, Homo sapiens
MASSSGSSPRPAPDENEFPFGCPPTVCQDPKEPRALCCAGCLSENPRNGEDQICPKCRGEDLQSISPGSRLRTQEKAHPEVAEAGIGCPFAGVGCSFKGSPQSVQEHEVTSQTSHLNLLLGFMKQWKARLGCGLESGPMALEQNLSDLQCFLLFPRLTAWQRRLWRQWRLTSSC

SEQ ID NO: 873874 - protein, 474 aa, Homo sapiens
MSIQAPPRLLELAGQSLLRDQALSISAMEELPRVLYLPLFREAFSRRHFQTLTVMVQAWPFTCLPLVSLMKTLHLEPLKALLEGLHMLLTQKDRPRRWKLQVLDLRDVDENFWARWPGAWALSCFPEAMSKRQTAEDCPRTGEHQPLKVFIDICLKEIPQDECLRYLFQWVYQRRGLVHLCCSKLVNYLTPIKYLRKSLKIIYINSIGELEIHNTCWPHLIRKLYCYLKEMKTLCKLVFSRCHHYTSDNELEGWLVTRFTSVFLRLEHLQLLKIKLITFFSGHLEQLIRCLQNPLENLELTCGNLLEEDLKCLSQFPSLGYLKHLNLSYVLLFRISLEPLGALLEKIAASLETLVLEGCQIHYSQLSAILPGLSCCSQLTTFYFGSNCMSIDALKDLLRHTSGLSKLSLETYPAPEESLNSLVRVNWEIFTPLRAELMCTLREFRQPKRIFIGPTPCPSCGSSPSEELELHLCC

SEQ ID NO: 873875 - protein, 185 aa, Homo sapiens
HRSSFPGEQQARQLPQQLCHHPSMAWGLPCHQNTAGANPHLFLGCYSTSSLQGLEYGGQRGDAHGKPGVLHGELEPHDHTSRLERHDLHSQLPTSVQVRHHWWEGALDLAKKRQQQTSINVFTTIKQGSRCDRWMVLGAISLLYNQEEAPDDRPLRARREVRSQHLSWAFPGTAGPGLVCAGDSQ

SEQ ID NO: 873876 - protein, 38 aa, Homo sapiens
MRNDPMILVNFPSLLPATHACSTLCSLEKVLHREDGNK

SEQ ID NO: 873877 - protein, 145 aa, Homo sapiens
LLCLPKQAWAMAGAPPPALLRPCSLISDCCASNQRDSVGVGPSYPGARYNLAGAPFFKPVRKRNIRVGETRFSSEMNPVPQMEMQKSPGLLASLTLGAVDRSCCYSAILAPLLHCKNGLIRYVKTKGMSASQDECVYQKLSSAGL

SEQ ID NO: 873878 - protein, 90 aa, Homo sapiens; identical to SEQ ID NO: 776589

SEQ ID NO: 873879 - protein, 103 aa, Homo sapiens
GSVAQAGMQWAEVGSLQPPPPDLKPSSHLSLSSSWNYSGTTGGQHHTQLIFVIFCRDGVSPCCPGWSQTPELKQSAHLSLSKCWHYRHEPPCLAWEALLTEVM

SEQ ID NO: 873880 - protein, 108 aa, Homo sapiens
MCSLNTIVDAKQMVFLNTVHLPLCQLDLNFDTMCFTYRRRKENIICDCHMTRQLWVFWEKKAVLAVRESAGNVHQRNSSVTLRAEIGKPVPFLYFCSFFSTHSKLPPG

SEQ ID NO: 873881 - protein, 182 aa, Homo sapiens [sequence omitted]

SEQ ID NO: 873882 - protein, 1087 aa, Homo sapiens
EESSLEHPKFKSSGNAVIYSVCQEAVWEAFRTFWDRLPGREEYHYWMNLCEDGVTSIFEMGTNFSESVEHRSLIMKKLTYAKETVSSSELSSPVPVGDTSTLGDTTLSVPHPEVDAYEGASESSLERPEESISNEIENVIEEATKPAGEQIAEFSIHLLGKQYREELQDSSSFHHQHLEEEFISEVENAFTGLPGYKEIRVLEFRSPKENDSGVDVYYAVTFNGEAISNTTWDLISLHSNKVENHGLVELDDKPTVVYTISNFRDYIAETLQQNFLLGNSSLNPDPDSLQLINVRGVLRHQTEDLVWNTQSSSLQATPSSILDNTFQAAWPSADESITSSIPPLDFSSGPPSATGRELWSESPLGDLVSTHKLAFPSKMGLSSSPEVLEVSSLTLHSVTPAVLQTGLPVASEERTSGSHLVEDGLANVEESEDFLSIDSLPSSSFTQPVPKETIPSMEDSDVSLTSSPYLTSSIPFGLDSLTSKVKDQLKVSPFLPDASMEKELIFDGGLGSGSGQKVDLITWPWSETSSEKSAEPLSKPWLEDDDSLLPAEIEDKKLVLVDKMDSTDQISKHSKYEHDDRSTHFPEEEPLSGPAVPIFADTAAESASLTLPKHISEVPGVDDYSVTKAPLILTSVAISASTDKSDQADAILREDMEQITESSNYEWFDSEVSMVKPDMQTLWTILPESERVWTRTSSLEKLSRDILASTPQSADRLWLSVTQSTKLPPTTISTLLEDEVIMGVQDISLELDRIGTDYYQPEQVQEQNGKVGSYVEMSTSVHSTEMVSVAWPTEGGDDLSYTQTSGALVVFFSLRVTNMMFSEDLFNKNSLEYKALEQRFLELLVPYLQSNLTGFQNLEILNFRNGSIVVNSRMKFANSVPPNVNNAVYMILEDFCTTAYNTMNLAIDKYSLDVESGDEANPCKFQACNEFSECLVNPWSGEAKCRCFPGYLSVEERPCQSLCDLQPDFCLNDGKCDIMPGHGAICSGSSRQPDSLSSIENAVKYNPVYESHRAGCEKYEGPYPQHPFYSSASGDVIGGLSREEIRQMYESSELSREEIQERMRVLELYANDPEFAAFVREQQVEEV

SEQ ID NO: 873883 - protein, 1003 aa, Homo sapiens
EESSLEHPKFKSSGNAVIYSVCQEAVWEAFRTFWDRLPGREEYHYWMNLCEDGVTSIFEMGTNFSESVEHRSLIMKKLTYAKETVSSSELSSPVPVGDTSTLGDTTLSVPHPEVDAYEGASESSLERPEESISNEIENVIEEATKPAGEQIAEFSIHLLGKQYREELQDSSSFHHQHLEEEFISEVENAFTGLPGYKEIRVLEFRSPKENDSGVDVYYAVTFNGEAISNTTWDLISLHSNKVENHGLVELDDKPTVVYTISNFRDYIAETLQQNFLLGNSSLNPDPDSLQLINVRGVLRHQTEDLVWNTQSSSLQATPSSILDNTFQAAWPSADESITSSIPPLDFSSGPPSATGRELWSESPLGDLVSTHKLAFPSKMGLSSSPEVLEVSSLTLHSVTPAVLQTGLPVASEERTSGSHLVEDGLANVEESEDFLSIDSLPSSSFTQPVPKETIPSMEDSDVSLTSSPYLTSSIPFGLDSLTSKVKDQLKVSPFLPDASMEKELIFDGGLGSGSGQKVDLITWPWSETSSEKSAEPLSKPWLEDDDSLLPAEIEDKKLVLVDKMDSTDQISKHSKYEHDDRSTHFPEEEPLSGPAVPIFADTAAESASLTLPKHISEVPGVDDYSVTKAPLILTSVAISASTDKSDQADAILREDMEQITESSNYEWFDSEVSMVKPDMQTLWTILPESERVWTRTSSLEKLSRDILASTPQSADRLWLSVTQSTKLPPTTISTLLEDEVIMGVQDISLELDRIGTDYYQPEQVQEQNGKVGSYVEMSTSVHSTEMVSVAWPTEGGDDLSYTQTSGALVVFFSLRVTNMMFSEDLFNKNSLEYKALEQRFLELLVPYLQSNLTGFQNLEILNFRNGSIVVNSRMKFANSVPPNVNNAVYMILEDFCTTAYNTMNLAIDKYSLDVESGDEANPCKFQACNEFSECLVNPWSGEAKCRCFPGYLSVEERPCQSLCDLQPDFCLNDGKCDIMPGHGAICRYVVVTDFDFRGYRYFL

SEQ ID NO: 873884 - protein, 1239 aa, Homo sapiens
MFPLFGKISLGILIFVLIEGDFPSLTAQTYLSIEEIQEPKSAVSFLLPEESTDLSLATKKKQPLDRRETERQWLIRRRRSILFPNGVKICPDESVAEAVANHVKYFKVRVCQEAVWEAFRTFWDRLPGREEYHYWMNLCEDGVTSIFEMGTNFSESVEHRSLIMKKLTYAKETVSSSELSSPVPVGDTSTLGDTTLSVPHPEVDAYEGASESSLERPEESISNEIENVIEEATKPAGEQIAEFSIHLLGKQYREELQDSSSFHHQHLEEEFISEVENAFTGLPGYKEIRVLEFRSPKENDSGVDVYYAVTFNGEAISNTTWDLISLHSNKVENHGLVELDDKPTVVYTISNFRDYIAETLQQNFLLGNSSLNPDPDSLQLINVRGVLRHQTEDLVWNTQSSSLQATPSSILDNTFQAAWPSADESITSSIPPLDFSSGPPSATGRELWSESPLGDLVSTHKLAFPSKMGLSSSPEVLEVSSLTLHSVTPAVLQTGLPVASEERTSGSHLVEDGLANVEESEDFLSIDSLPSSSFTQPVPKETIPSMEDSDVSLTSSPYLTSSIPFGLDSLTSKVKDQLKVSPFLPDASMEKELIFDGGLGSGSGQKVDLITWPWSETSSEKSAEPLSKPWLEDDDSLLPAEIEDKKLVLVDKMDSTDQISKHSKYEHDDRSTHFPEEEPLSGPAVPIFADTAAESASLTLPKHISEVPGVDDYSVTKAPLILTSVAISASTDKSDQADAILREDMEQITESSNYEWFDSEVSMVKPDMQTLWTILPESERVWTRTSSLEKLSRDILASTPQSADRLWLSVTQSTKLPPTTISTLLEDEVIMGVQDISLELDRIGTDYYQPEQVQEQNGKVGSYVEMSTSVHSTEMVSVAWPTEGGDDLSYTQTSGALVVFFSLRVTNMMFSEDLFNKNSLEYKALEQRFLELLVPYLQSNLTGFQNLEILNFRNGSIVVNSRMKFANSVPPNVNNAVYMILEDFCTTAYNTMNLAIDKYSLDVESGDEANPCKFQACNEFSECLVNPWSGEAKCRCFPGYLSVEERPCQSLCDLQPDFCLNDGKCDIMPGHGAICRCRVGENWWYRGKHCEEFVSEPVIIGITIASVVGLLVIFSAIIYFFIRTLQAHHDRSERESPFSGSSRQPDSLSSIENAVKYNPVYESHRAGCEKYEGPYPQHPFYSSASGDVIGGLSREEIRQMYESSELSREEIQERMRVLELYANDPEFAAFVREQQVEEV

SEQ ID NO: 873885 - protein, 70 aa, Homo sapiens
LVVTGPMGYAPDIAFAYSVKSRDRKMVGDVTGAQAYASTAKCLNIWALILGILMTILLIVIPVLIFQAYG

SEQ ID NO: 873886 - protein, 244 aa, Homo sapiens
MGSPRSALSCLLLHLLVLCLQAQEGPGRGPALGRELASLFRAGREPQGVSQQVTVQSSPNFTQHVREQSLVTDQLSRRLIRTYQLYSRTSGKHVQVLANKRINAMAEDGDPFAKLIVETDTFGSRVRVRGAETGLYICMNKKGKLIAKSNGKGKDCVFTEIVLENNYTALQNAKYEGWYMAFTRKGRPRKGSKTRQHQREVHFMKRLPRGHHTTEQSLRFEFLNYPPFTRSLRGSQRTWAPEPR

SEQ ID NO: 873887 - protein, 204 aa, Homo sapiens
MGSPRSALSCLLLHLLVLCLQAQHVREQSLVTDQLSRRLIRTYQLYSRTSGKHVQVLANKRINAMAEDGDPFAKLIVETDTFGSRVRVRGAETGLYICMNKKGKLIAKSNGKGKDCVFTEIVLENNYTALQNAKYEGWYMAFTRKGRPRKGSKTRQHQREVHFMKRLPRGHHTTEQSLRFEFLNYPPFTRSLRGSQRTWAPEPR

SEQ ID NO: 873888 - protein, 215 aa, Homo sapiens
MGSPRSALSCLLLHLLVLCLQAQVTVQSSPNFTQHVREQSLVTDQLSRRLIRTYQLYSRTSGKHVQVLANKRINAMAEDGDPFAKLIVETDTFGSRVRVRGAETGLYICMNKKGKLIAKSNGKGKDCVFTEIVLENNYTALQNAKYEGWYMAFTRKGRPRKGSKTRQHQREVHFMKRLPRGHHTTEQSLRFEFLNYPPFTRSLRGSQRTWAPEPR

SEQ ID NO: 873889 - protein, 233 aa, Homo sapiens
MGSPRSALSCLLLHLLVLCLQAQEGPGRGPALGRELASLFRAGREPQGVSQQHVREQSLVTDQLSRRLIRTYQLYSRTSGKHVQVLANKRINAMAEDGDPFAKLIVETDTFGSRVRVRGAETGLYICMNKKGKLIAKSNGKGKDCVFTEIVLENNYTALQNAKYEGWYMAFTRKGRPRKGSKTRQHQREVHFMKRLPRGHHTTEQSLRFEFLNYPPFTRSLRGSQRTWAPEPR

SEQ ID NO: 873890 - protein, 259 aa, Homo sapiens
RRGEHDVPRDPRSRVVIAAGLPHPHPLRSRPAQRVLPRRPAGRRDPPGSRCPGAARHGQPPLRAELPVTVQSSPNFTQHVREQSLVTDQLSRRLIRTYQLYSRTSGKHVQVLANKRINAMAEDGDPFAKLIVETDTFGSRVRVRGAETGLYICMNKKGKLIAKSNGKGKDCVFTEIVLENNYTALQNAKYEGWYMAFTRKGRPRKGSKTRQHQREVHFMKRLPRGHHTTEQSLRFEFLNYPPFTRSLRGSQRTWAPEPR

SEQ ID NO: 873891 - protein, 111 aa, Homo sapiens
GQQMSHENDPYILHSLIRRVTTVTISCSCNTSCFMFILIKEELGLKQWLMPVILALWEAEAGRSIELRNLRLARQHGETPSLLKKNTKKWPGTVAHTCNPNTLGGRGRRIT

SEQ ID NO: 873892 - protein, 109 aa, Homo sapiens
LRRRVPNKRSTTLRSGEVLLGPTKATQVKEWMALPQLWLRSPLQDDILLGDGHQRQGHGRRCQEEAQRKGYGSTKQESGLLQARKRGLPRNQLYQHIDLGLLASRTLRK

SEQ ID NO: 873893 - protein, 531 aa, Homo sapiens
MKPTSGPEEARRPASDIRVFASNCSMHGLGHVFGPGSLSLRRGMWAAAVVLSVATFLYQVAERVRYYREFHHQTALDERESHRLIFPAVTLCNINPLRRSRLTPNDLHWAGSALLGLDPAEHAAFLRALGRPPAPPGFMPSPTFDMAQLYARAGHSLDDMLLDCRFRGQPCGPENFTTIFTRMGKCYTFNSGADGAELLTTTRGGMGNGLDIMLDVQQEEYLPVWRDNEETPFEVGIRVQIHSQEEPPIIDQLGLGVSPGYQTFVSCQQQQLSFLPPPWGDCSSASLNPNYEPEPSDPLGSPSPSPSPPYTLMGCRLACETRYVARKCGCRMVYMPGDVPVCSPQQYKNCAHPAIDAMLRKDSCACPNPCASTRYAKELSMVRIPSRAAARFLARKLNRSEAYIAENVLALDIFFEALNYETVEQKKAYEMSELLGDIGGQMGLFIGASLLTILEILDYLCEVFRDKVLGYFWNRQHSQRHSSTNLLQEGLGSHRTQVPHLSLGPRPPTPPCAVTKTLSASHRTCYLVTQL

SEQ ID NO: 873894 - protein, 549 aa, Homo sapiens
MKPTSGPEEARRPASDIRVFASNCSMHGLGHVFGPGSLSLRRGMWAAAVVLSVATFLYQVAERVRYYREFHHQTALDERESHRLIFPAVTLCNINPLRRSRLTPNDLHWAGSALLGLDPAEHAAFLRALGRPPAPPGFMPSPTFDMAQLYARAGHSLDDMLLDCRFRGQPCGPENFTTIFTRMGKCYTFNSGADGAELLTTTRGGMGNGLDIMLDVQQEEYLPVWRDNEETPFEVGIRVQIHSQEEPPIIDQLGLGVSPGYQTFVSCQQQQLSFLPPPWGDCSSASLNPNYEPEPSDPLGSPSPSPSPPYTLMGCRLACETRYVARKCGCRMVYMPGDVPVCSPQQYKNCAHPAIDAMLRKDSCACPNPCASTRYAKELSMVRIPSRAAARFLARKLNRSEAYIAENVLALDIFFEALNYETVEQKKAYEMSELLGDIGGQMGLFIGASLLTILEILDYLCEVFRDKVLGYFWNRQHSQRHSSTNLLQEGLGSHRTQVPHLSLGPSTLLCSEDLPPLPVPSPRLSPPPTAPATLSHSSRPAVCVLGAPP

SEQ ID NO: 873895 - protein, 248 aa, Homo sapiens
MKPTSGPEEARRPASDIRVFASNCSMHGLGHVFGPGSLSLRRGMWAAAVVLSVATFLYQVAERVRYYREFHHQTALDERESHRLIFPAVTLCNINPLRRSRLTPNDLHWAGSALLGLDPAEHAAFLRALGRPPAPPGFMPSPTFDMAQLYARAGHSLDDMLLDCRFRGQPCGPENFTTIFTRMGKCYTFNSGADGAELLTTTRGGMGNGLDIMLDVQQEEYLPVWRDNEETPFEVGIRVQIHSQEEPP

SEQ ID NO: 873896 - protein, 557 aa, Homo sapiens
MKPTSGPEEARRPASDIRVFASNCSMHGLGHVFGPGSLSLRRGMWAAAVVLSVATFLYQVAERVRYYREFHHQTALDERESHRLIFPAVTLCNINPLRRSRLTPNDLHWAGSALLGLDPAEHAAFLRALGRPPAPPGFMPSPTFDMAQLYARAGHSLDDMLLDCRFRGQPCGPENFTTIFTRMGKCYTFNSGADGAELLTTTRGGMGNGLDIMLDVQQEEYLPVWRDNEETPFEVGIRVQIHSQEEPPIIDQLGLGVSPGYQTFVSCQQQQVPFRVPPHLLLQAHTTSDPKPSAPQTCLGASPQLASHALREASLTLSPQQLSFLPPPWGDCSSASLNPNYEPEPSDPLGSPSPSPSPPYTLMGCRLACETRYVARKCGCRMVYMPGDVPVCSPQQYKNCAHPAIDAMLRKDSCACPNPCASTRYAKELSMVRIPSRAAARFLARKLNRSEAYIAENVLALDIFFEALNYETVEQKKAYEMSELLGDIGGQMGLFIGASLLTILEILDYLCEVFRDKVLGYFWNRQHSQRHSSTNLVTAPLLEPLPAPRVLGPTPEA

SEQ ID NO: 873897 - protein, 386 aa, Homo sapiens
MKPTSGPEEARRPASDIRVFASNCSMHGLGHVFGPGSLSLRRGMWAAAVVLSVATFLYQVAERVRYYREFHHQTALDERESHRLIFPAVTLCNINPLRRSRLTPNDLHWAGSALLGLDPAEHAAFLRALGRPPAPPGFMPSPTFDMAQLYARAGHSLDDMLLDCRFRGQPCGPENFTTIFTRMGKCYTFNSGADGAELLTTTRGGMGNGLDIMLDVQQEEYLPVWRDNEETPFEVGIRVQIHSQEEPPIIDQLGLGVSPGYQTFVSCQQQQVPFRVPPHLLLQAHTTSDPKPSAPQTCLGASPQLASHALREASLTLSPHSRPRGGPAAASDIRVFASNCSMHGLGTSSGQAALSLRRGMWAAAVVLSVATFLYQVAERVRYYREF

SEQ ID NO: 873898 - protein, 126 aa, Homo sapiens
QSAGSTGVSHRARPLPGFLKGVGEPTAASCQQWAPGGGQPTFEAILVLRENVLALDIFFEALNYETVEQKKAYEMSELLGVCAGPPGLGGCGQAGGCKLKGDPVSTGDIGGQMGLFIGASLLTILE

SEQ ID NO: 873899 - protein, 415 aa, Homo sapiens
MKPTSGPEEARRPASDIRVFASNCSMHGLGHVFGPGSLSLRRGMWAAAVVLSVATFLYQVAERVRYYREFHHQTALDERESHRLIFPAVTLCNINPLRRSRLTPNDLHWAGSALLGLDPAEHAAFLRALGRPPAPPGFMPSPTFDMAQLYARAGHSLDDMLLDCRFRGQPCGPENFTTIFTRMGKCYTFNSGADGAELLTTTRGGMGNGLDIMLDVQQEEYLPVWRDNEETPFEVGIRVQIHSQEEPPIIDQLGLGVSPGYQTFVSCQQQQLSFLPPPWGDCSSASLNPNYEPEPSDPLGSPSPSPSPPYTLMGCRLACETRYVARKCGCRMVYMPGDVPVCSPQQYKNCAHPAIDAMLRKDSCACPNPCASTRYAKELSMVRIPSRAAARFLALEAQPQRGLHRGERAGPGHLL

SEQ ID NO: 873900 - protein, 413 aa, Homo sapiens
DGHHPVCPPQIFTRMGKCYTFNSGADGAELLTTTRGGMGNGLDIMLDVQQEEYLPVWRDNEETPFEVGIRVQIHSQEEPPIIDQLGLGVSPGYQTFVSCQQQQVPFRVPPHLLLQAHTTSDPKPSAPQTCLGASPQLASHALREASLTLSPQQLSFLPPPWGDCSSASLNPNYEPEPSDPLGSPSPSPSPPYTLMGCRLACETRYVARKCGCRMVYMPGDVPVCSPQQYKNCAHPAIDAMLRKDSCACPNPCASTRYAKELSMVRIPSRAAARFLARKLNRSEAYIAENVLALDIFFEALNYETVEQKKAYEMSELLGDIGGQMGLFIGASLLTILEILDYLCEVFRDKVLGYFWNRQHSQRHSSTNLLQEGLGSHRTQVPHLSLGPRPPTPPCAVTKTLSASHRTCYLVTQL

SEQ ID NO: 873901 - protein, 321 aa, Homo sapiens [sequence omitted]

SEQ ID NO: 873902 - protein, 117 aa, Homo sapiens
KQRSGCCWRKDKFSVVSRLLHKYKARCCCYWKRSEKKLLMFKTTWTRLLNYERQFCCCVGKDKNTENRLSPHSLRLRVKETNRSLNPRDNLIEAEAYQFPGVNAVYFSLRCSFAYNT

SEQ ID NO: 873903 - protein, 218 aa, Homo sapiens
GRGRGRGWGRGQDRGVRGGKAQDKERMPVTKLDGLAKDMKIKSLEEIYLFSLPIKESEIIDFFLGASLKDEVLKIMPVRKETRAGQRTRFKAFVAIRDYNGYAGRVKCSKEVAAAIRGAIILTKLSIVTVRRGYWGNKIGKLHTVPCKVTGRCGSVLVPFIPAPRGTGIVSAPVPKKLLMIAGIYDCYTSARGCTATLGNFANATLDAVSNIYSYLIP

SEQ ID NO: 873904 - protein, 117 aa, Homo sapiens
WARESLEAHVAANPAAPVHLPPCLPAFSAELRPGVKEEPSPGAPKKAEEGAFYLASVTPPGPSRLDKTLQRQCLALISPVTPVKVYCCLFIIAVLTTSVIALSIVLSEFPEKIQRPF

SEQ ID NO: 873905 - protein, 115 aa, Homo sapiens [sequence omitted]

SEQ ID NO: 873906 - protein, 104 aa, Homo sapiens
MLMPTINMNIKWSNCRKSEKEKTNKETETESGNENSGYNSDEQKTTDTASLPPKSCESSDPEQRNSSCGPPHQRADQRPPRPASHPQASFNLASPEKVSNTTVV

SEQ ID NO: 873907 - protein, 198 aa, Homo sapiens
MFKVIQRSVGPASLSLLTFKVYAAPKKDSPPKNSVKVDELSLYSVPEGQSKYVEEARSQLEESISQLRHYCEPYTTWCQETYSQTKPKMQSLVQWGLDSYDYLQNAPPGFFPRLGVIGFAGLIGLLLARGSKIKKLVYPPGFMGLAASLYYPQQAIVFAQVSGERLYDWGLRGYIVIEDLWKENFQKPGNVKNSPGTK

SEQ ID NO: 873908 - protein, 105 aa, Homo sapiens
MFKVIQRSVGPASLSLLTFKVYAAPKKDSPPKNSVKVDELSLYSVPEGQSKYVEEARSQLEESIFNRHSRTKPFNLGPGKWSPNFKPKPKNPLVGLVPGKRYSQI

SEQ ID NO: 873909 - protein, 188 aa, Homo sapiens
MFKVIQRSVGPASLSLLTFKVYAAPKKDSPPKNSVKVDELSLYSVPEGQSKYVEEARSQLEESISQLRHYCEPYTTWCQETYSQTKPKMQSLVQWGLDSYDYLQNAPPGFFPRLGVIGFAGLIGLLLARGSKIKKLVYPPGFMGLAASLYYPQQAIVFAQVSGERLYDWGLRGYIVIEDLWKENFQKL

SEQ ID NO: 873910 - protein, 110 aa, Homo sapiens
MQSLVQWGLDSYDYLQNAPPGFFPRLGVIGFAGLIGLLLARGSKIKKLVYPPGFMGLAASLYYPQQAIVFAQVSGERLYDWGLRGYIVIEDLWKENFQKPGNVKNSPGTK

SEQ ID NO: 873911 - protein, 198 aa, Homo sapiens; identical to SEQ ID NO: 873907

SEQ ID NO: 873912 - protein, 114 aa, Homo sapiens
MFKVIQRSVGPASLSLLTFKVYAAPKKDSPPKNSVKVDELSLYSVPEGQSKYVEEARSQLEESISQLRHYCEPYTTWCQTAMTISKMHLLDFFRDLVLLVLLALLDSFWLEVQK

SEQ ID NO: 873913 - protein, 198 aa, Homo sapiens; identical to SEQ ID NO: 873907

SEQ ID NO: 873914 - protein, 110 aa, Homo sapiens; identical to SEQ ID NO: 873910

SEQ ID NO: 873915 - protein, 110 aa, Homo sapiens
RNIAAHDHAPIPLTSKAAFSLPPPAFRACATPVVPGLPSSLRTPSHTRLSLPASRSPEPRRLCSLSCSLSVAPSSSRGKWETLAGASSSRRSEEKERPSRKGRRCGTRGS

SEQ ID NO: 873916 - protein, 103 aa, Homo sapiens
DPFESTVLSSGCSIFSPDGTEMHISDNTAEVTIVPFSVHHMGRYMVSVCLISGDVNLITGLRWFLSGLFTIMTVFPFVIVSEYILYNCESWSHSNVSHAPQNN

SEQ ID NO: 873917 - protein, 77 aa, Homo sapiens
ATAISHNPETKKTRVKLPSGSKKVVSSANRAVVGVVAGGGRTDKPILKACQAYHKYKAKRNWWPRVWDVAMNPMEHP

SEQ ID NO: 873918 - protein, 561 aa, Homo sapiens
MPGPRAACSEPNPCTQVVMNSHSYNGSVGRPLGSGPGALGRDPPDPEAGHPPQPPHSPGLQVVVAKSEPARPSPGSPRGQPQDQDDDEDDEEDEAGRQRASGKPSNVGHRLGHRRALFEKRKRLSDYALIFGMFGIVVMVTETELSWGVYTKESLYSFALKCLISLSTAILLGLVVLYHAREIQLFMVDNGADDWRIAMTCERVFLISLELAVCAIHPVPGHYRFTWTARLAFTYAPSVAEADVDVLLSIPMFLRLYLLGRVMLLHSKIFTDASSRSIGALNKITFNTRFVMKTLMTICPGTVLLVFSISSWIIAAWTVRVCERYHDKQEVTSNFLGAMWLISITFLSIGYGDMVPHTYCGKGVCLLTGIMGAGCTALVVAVVARKLELTKAEKHVHNFMMDTQLTKRVKNAAANVLRETWLIYKHTRLVKKPDQARVRKHQRKFLQAIHQAQKLRSVKIEQGKLNDQANTLTDLAKTQTVMYDLVSELHAQHEELEARLATLESRLDALGASLQALPGLIAQAIRPPPPPLPPRPGPGPQDQAARSSPCRWTPVAPSDCG

SEQ ID NO: 873919 - protein, 80 aa, Homo sapiens
MVDNGADDWRIAMTCERVFLISLELAVCAIHPVPGHYRFTWTARLAFTYAPSVAEADVDVLLSIPMFLRLYLLGRVMLLH

SEQ ID NO: 873920 - protein, 120 aa, Homo sapiens
FSCFSSSSSTSSSSLLPFLSFFSDLFVQESLTRRLNVNKRLKTELLCWRWGGEPEDFFICLSPHPPSWHLKNSAETSFQGLCGQSVHVQACMPVCRWYGEKGDCIVHKNVTCSSIRPLSF

SEQ ID NO: 873921 - protein, 383 aa, Homo sapiens
WGFSARGRGTGKMAAVVENVVKLLGEQYYKDAMEQCHNYNARLCAERSVRLPFLDSQTGVAQSNCYIWMEKRHRGPGLASGQLYSYPARRWRKKRRAHPPEDPRLSFPSIKPDTDQTLKKEGLISQDGSSLEALLRTDPLEKRGAPDPRVDDDSLGEFPVTNSRARKRILEPDDFLDDLDDEDYEEDTPKRRGKGKSKGKGVGSARKKLDASILEDRDKPYACDICGKRYKNRPGLSYHYAHSHLAEEEGEDKEDSQPPTPVSQRSEEQKSKKGPDGLALPNNYCDFCLGDSKINKKTGQPEELVSCSDCGRSGHPSCLQFTPVMMAAVKTYRWQCIECKCCNICGTSENDDQLLFCDDCDRGYHMYCLTPSMSEPPEGKLPR

SEQ ID NO: 873922 - protein, 371 aa, Homo sapiens
MAAVVENVVKLLGEQYYKDAMEQCHNYNARLCAERSVRLPFLDSQTGVAQSNCYIWMEKRHRGPGLASGQLYSYPARRWRKKRRAHPPEDPRLSFPSIKPDTDQTLKKEGLISQDGSSLEALLRTDPLEKRGAPDPRVDDDSLGEFPVTNSRARKRILEPDDFLDDLDDEDYEEDTPKRRGKGKSKGKGVGSARKKLDASILEDRDKPYACDICGKRYKNRPGLSYHYAHSHLAEEEGEDKEDSQPPTPVSQRSEEQKSKKGPDGLALPNNYCDFCLGDSKINKKTGQPEELVSCSDCGRSGHPSCLQFTPVMMAAVKTYRWQCIECKCCNICGTSENDDQLLFCDDCDRGYHMYCLTPSMSEPPEGKLPR

SEQ ID NO: 873923 - protein, 315 aa, Homo sapiens
MDKADTRGPGLASGQLYSYPARRWRKKRRAHPPEDPRLSFPSIKPDTDQTLKKEGLISQDGSSLEALLRTDPLEKRGAPDPRVDDDSLGEFPVTNSRARKRILEPDDFLDDLDDEDYEEDTPKRRGKGKSKGKGVGSARKKLDASILEDRDKPYACDICGKRYKNRPGLSYHYAHSHLAEEEGEDKEDSQPPTPVSQRSEEQKSKKGPDGLALPNNYCDFCLGDSKINKKTGQPEELVSCSDCGRSGHPSCLQFTPVMMAAVKTYRWQCIECKCCNICGTSENDDQLLFCDDCDRGYHMYCLTPSMSEPPEGKLP

SEQ ID NO: 873924 - protein, 383 aa, Homo sapiens
  misc_feature (1)..(1): Xaa can be any naturally occurring amino acid
XDIATRRSGTGKMAAVVENVVKLLGEQYYKDAMEQCHNYNARLCAERSVRLPFLDSQTGVAQSNCYIWMEKRHRGPGLASGQLYSYPARRWRKKRRAHPPEDPRLSFPSIKPDTDQTLKKEGLISQDGSSLEALLRTDPLEKRGAPDPRVDDDSLGEFPVTNSRARKRILEPDDFLDDLDDEDYEEDTPKRRGKGKSKGKGVGSARKKLDASILEDRDKPYACDICGKRYKNRPGLSYHYAHSHLAEEEGEDKEDSQPPTPVSQRSEEQKSKKGPDGLALPNNYCDFCLGDSKINKKTGQPEELVSCSDCGRSGHPSCLQFTPVMMAAVKTYRWQCIECKCCNICGTSENDDQLLFCDDCDRGYHMYCLTPSMSEPPEGKLPR

SEQ ID NO: 873925 - protein, 385 aa, Homo sapiens
MAAVVENVVKLLGEQYYKDAMEQCHNYNARLCAERSVRLPFLDSQTGVAQSNCYIWMEKRHRGPGLASGQLYSYPARRWRKKRRAHPPEDPRLSFPSIKPDTDQTLKKEGLISQDGSSLEALLRTDPLEKRGAPDPRVDDDSLGEFPVTNSRARKRILEPDDFLDDLDDEDYEEDTPKRRGKGKSKGKGVGSARKKLDASILEDRDKPYACDNSFKQKHTSKAPQRVCGKRYKNRPGLSYHYAHSHLAEEEGEDKEDSQPPTPVSQRSEEQKSKKGPDGLALPNNYCDFCLGDSKINKKTGQPEELVSCSDCGRSGHPSCLQFTPVMMAAVKTYRWQCIECKCCNICGTSENDDQLLFCDDCDRGYHMYCLTPSMSEPPEGKLPR

SEQ ID NO: 873926 - protein, 270 aa, Homo sapiens
MGSFQLEDFAAGWIGGAASVIVGHPLDTVKTRLQAGVGYGNTLSCIRVVYRRESMFGFFKGMSFPLASIAVYNSVVFGVFSNTQRFLSQHRCGEPEASPPRTLSDLLLASMVAGVVSVGLGGPVDLIKIRLQMQTQPFRDANLGLKSRAVAPAEQPAYQGPVHCITTIVRNEGLAGLYRGASAMLLRDVPGYCLYFIPYVFLSEWITPEACTGPSPCAVWLAGGMAGVFQRHHCERGAGVPHECGHVPWVRAVAAGYPRGPRSDEPISAR

SEQ ID NO: 873927 - protein, 184 aa, Homo sapiens
MGSFQLEDFAAGWIGGAASVIVGHPLDTVKTRLQAGVGYGNTLSCIRVVYRRESMFGFFKGMSFPLASIAVYNSVVFGVFSNTQRFLSQHRCGEPEASPPRTLSDLLLASMVAGVVSVGLGGPVDLIKIRLQMQTQPFRDGVFQRHHCERGAGVPHECGHVPWVRAVAAGYPRGPRSDEPISAR

SEQ ID NO: 873928 - protein, 157 aa, Homo sapiens
MGSFQLEDFAAGWIGGAASVIVGHPLDTVKTRLQAGVGYGNTLSCIRVVYRRESMFGFFKGMSFPLASIAVYNSVVFGVFSNTQRFLSQHRCGEPEASPPRTLSDLLLASMVAGVVSVGLGGPVDLIKIRLQMQTQPFRDGGEHRMTTVFPGPHLCM

SEQ ID NO: 873929 - protein, 39 aa, Homo sapiens
TTEQVRALEGVFRHHQYLGPLERNWLAREMQLSEVQIKT

SEQ ID NO: 873930 - protein, 184 aa, Homo sapiens
GEERGWGVSPVLGLTQGGVQGSQEHHKQGSRRTDGGSTASLGGEIKGWQGRWPGKNLHGKDFPAPGLGYASMVIVFYCNTYYIMVLAWGFYYLVKSFTTTLPWATCGHTWNTPDCVEIFRHEDCASASLANLTCDQLADRRSPVIEFWENKVLRLSGGLEVPGALNWEVTLCLLACWVLVYFCV

SEQ ID NO: 873931 - protein, 276 aa, Homo sapiens
GCERPTAPTVAVRAPGQKQTDTAPAVDSDPARMPPTQAESVIRSIIREIGQECAAHGEIVSETLIAFMVKAVVLDPSNGFNMDRTLMKSDVQNLVKLCMTRLLDTKNPSLDTIKMQVYFDMNYTNRVEFLEEHHRVLESRLGSVTREITDNRACAKEELESLYRKIISYVLLRSGLGSPTDIKTVREVTAALQSVFPQAELGTFLTLSKKDKERQLKELTMIVTGIRLFNRDCGKGGEGIDDLPAVLHVAIPGTMQHIDYQLETCPEPRYTATQHP

SEQ ID NO: 873932 - protein, 127 aa, Homo sapiens
GCERPTAPTVAVRAPGQKQTDTAPAVDSDPARMPPTQAESVIRSIIREIGQECAAHGEIVSETLIAFMVKAVVLDPSNGFNMDRTLMKSDVQNLVKLCMTRLLDTKNPSLDTIKMQVYFDMNYTNRA

SEQ ID NO: 873933 - protein, 298 aa, Homo sapiens
GCERPTAPTVAVRAPGQKQTDTAPAVDSDPARMPPTQAESVIRSIIREIGQECAAHGEIVSETLIAFMVKAVVLDPSNGFNMDRTLMKSDVQNLVKLCMTRLLDTKNPSLDTIKMQVYFDMNYTNRVEFLEEHHRVLESRLGSVTREITDNRACAKEELESLYRKIISYVLLRSGLGSPTDIKTVREVTAALQSVFPQAELGTFLTLSKKDKERQLKELTMIVTGIRLFNRDCGKGGEGIDDFRYNYWCSRSGNDDKTVRSPSGTTKNDHKIKDSGPNITSLSYLHCTFYSVDQLARR

SEQ ID NO: 873934 - protein, 134 aa, Homo sapiens
PSLLNCLQFLSCKLTFALLCSYREMCNLFVKHSNKAYLGFLTCVFSLRPSLVQSGLNTVTEQRDLFFQWCTVSWVQLAGAGVVDGKRIYRQGVVAHACNPSTLGGQGGQITGGQEFVTSLAKVVKPHLYQKYKN

SEQ ID NO: 873935 - protein, 44 aa, Homo sapiens
RHRHAKGYQQRLRPEAEMPGMRIWKINTIELSTVAFFFFLGLRK

SEQ ID NO: 873936 - protein, 120 aa, Homo sapiens
RALRGEAGPNPCVGFVVGPARRCGRPPGMANWVFCNRCFQPPHRTSCFSLTNCGHVYCDACLGKGKKNECLICKAPCRTVLLSKHTDADIQAFFMSIDSLCKKYSRETSQVSCEGCGLVP

SEQ ID NO: 873937 - protein, 132 aa, Homo sapiens
TRPLLLPRLFFLLLSPWPRPRRSSDPLAPPRPLDAQLPHLPWPHAVATCCLKTPGETFRASVLACHVVNQISLIARSTPLLSVRLRNHLQAMAGDVPASHREDYAGEPHGQAGLWLQQLWGLHVPALALLQQ

SEQ ID NO: 873938 - protein, 480 aa, Homo sapiens
GPCGRGAEGGTTTGREHGAGKPLGARRRAMEQRPRGCAAVAAALLLVLLGARAQGGTRSPRCDCAGDFHKKIGLFCCRGCPAGHYLKAPCTEPCGNSTCLVCPQDTFLAWENHHNSECARCQACDEQASQVALENCSAVADTRCGCKPGWFVECQVSQCVSSSPFYCQPCLDCGALHRHTRLLCSRRDTDCGTCLPGFYEHGDGCVSCPTSTLGSCPERCAAVCGWRQKWWCAGNASGRTGMDRGEAGEEGGNHPNTHQLLSVFWVQVLLAGLVVPLLLGATLTYTYRHCWPHKPLVTADEAGMEALTPPPATHLSPLDSAHTLLAPPDSSEKICTVQLVGNSWTPGYPETQEALCPQVTWSWDQLPSRALGPAAAPTLSPESPAGSPAMMLQPGPQLYDVMDAVPARRWKEFVRTLGLREAEIEAVEVEIGRFRDQQYEMLKRWRQQQPAGLGAVYAALERMGLDGCVEDLRSRLQRGP

SEQ ID NO: 873939 - protein, 453 aa, Homo sapiens
GPCGRGAEGGTTTGREHGAGKPLGARRRAMEQRPRGCAAVAAALLLVLLGARAQGGTRSPRCDCAGDFHKKIGLFCCRGCPAGHYLKAPCTEPCGNSTCLVCPQDTFLAWENHHNSECARCQACDEQASQVALENCSAVADTRCGCKPGWFVECQVSQCVSSSPFYCQPCLDCGALHRHTRLLCSRRDTDCGTCLPGFYEHGDGCVSCPTPPTVPCRSTLGSCPERCAAVCGWRQMFWVQVLLAGLVVPLLLGATLTYTYRHCWPHKPLVTADEAGMEALTPPPATHLSPLDSAHTLLAPPDSSEKICTVQLVGNSWTPGYPETQEALCPQVTWSWDQLPSRALGPAAAPTLSPESPAGSPAMMLQPGPQLYDVMDAVPARRWKEFVRTLGLREAEIEAVEVEIGRFRDQQYEMLKRWRQQQPAGLGAVYAALERMGLDGCVEDLRSRLQRGP

SEQ ID NO: 873940 - protein, 227 aa, Homo sapiens
MAMAACPAPLFWVQVLLAGLVVPLLLGATLTYTYRHCWPHKPLVTADEAGMEALTPPPATHLSPLDSAHTLLAPPDSSEKICTVQLVGNSWTPGYPETQEALCPQVTWSWDQLPSRALGPAAAPTLSPESPAGSPAMMLQPGPQLYDVMDAVPARRWKEFVRTLGLREAEIEAVEVEIGRFRDQQYEMLKRWRQQQPAGLGAVYAALERMGLDGCVEDLRSRLQRGP

SEQ ID NO: 873941 - protein, 410 aa, Homo sapiens
GPCGRGAEGGTTTGREHGAGKPLGARRRAMEQRPRGCAAVAAALLLVLLGARAQGGTRSPRCDCAGDFHKKIGLFCCRGCPAGHYLKAPCTEPCGNSTCLVCPQDTFLAWENHHNSECARCQACDEQASQVALENCSAVADTRCGCKPGWFVECQVSQCVSSSPFYCQPCLDCGALHRHTRLLCSRRDTDCGTCLPGFYEHGDGCVSCPTSTLGSCPERCAAVCGWRQTDEAGMEALTPPPATHLSPLDSAHTLLAPPDSSEKICTVQLVGNSWTPGYPETQEALCPQVTWSWDQLPSRALGPAAAPTLSPESPAGSPAMMLQPGPQLYDVMDAVPARRWKEFVRTLGLREAEIEAVEVEIGRFRDQQYEMLKRWRQQQPAGLGAVYAALERMGLDGCVEDLRSRLQRGP

SEQ ID NO: 873942 - protein, 401 aa, Homo sapiens
GPCGRGAEGGTTTGREHGAGKPLGARRRAMEQRPRGCAAVAAALLLVLLGARAQGGTRSPRCDCAGDFHKKIGLFCCRGCPAASQVALENCSAVADTRCGCKPGWFVECQVSQCVSSSPFYCQPCLDCGALHRHTRLLCSRRDTDCGTCLPGFYEHGDGCVSCPTSTLGSCPERCAAVCGWRQMFWVQVLLAGLVVPLLLGATLTYTYRHCWPHKPLVTADEAGMEALTPPPATHLSPLDSAHTLLAPPDSSEKICTVQLVGNSWTPGYPETQEALCPQVTWSWDQLPSRALGPAAAPTLSPESPAGSPAMMLQPGPQLYDVMDAVPARRWKEFVRTLGLREAEIEAVEVEIGRFRDQQYEMLKRWRQQQPAGLGAVYAALERMGLDGCVEDLRSRLQRGP

SEQ ID NO: 873943 - protein, 210 aa, Homo sapiens
GPCGRGAEGGTTTGREHGAGKPLGARRRAMEQRPRGCAAVAAALLLVLLGARAQGGTRSPRCDCAGDFHKKIGLFCCRGCPAGHYLKAPCTEPCGNSTCLVCPQDTFLAWENHHNSECARCQACDEQASQVALENCSAVADTRCGCKPGWFVECQVSQCVSSSPFYCQPCLDCGALHRHTRLLCSRRDTDCGTCLPGFYEHGDGCVSCPT

SEQ ID NO: 873944 - protein, 405 aa, Homo sapiens
MALLLVLLGARAQGGTRSPRCDCAGDFHKKIGLFCCRGCPAGHYLKAPCTEPCGNSTCLVCPQDTFLAWENHHNSECARCQACDEQASQVALENCSAVADTRCGCKPGWFVECQVSQCVSSSPFYCQPCLDCGALHRHTRLLCSRRDTDCGTCLPGFYEHGDGCVSCPTSTLGSCPERCAAVCGWRQMFWVQVLLAGLVVPLLLGATLTYTYRHCWPHKPLVTADEAGMEALTPPPATHLSPLDSAHTLLAPPDSSEKICTVQLVGNSWTPGYPETQEALCPQVTWSWDQLPSRALGPAAAPTLSPESPAGSPAMMLQPGPQLYDVMDAVPARRWKEFVRTLGLREAEIEAVEVEIGRFRDQQYEMLKRWRQQQPAGLGAVYAALERMGLDGCVEDLRSRLQRGP

SEQ ID NO: 873945 - protein, 128 aa, Homo sapiens
MVLGPVAQQSSWPRCCAHTLARVPSRLASHDAAAGPAALRRDGRGPSAALEGVRAHAGAARGRDRSRGGGDRPLPRPAVRDAQALAPAAARGPRSRLRGPGAHGAGRLRGRLAQPPAARPVTRRPLAT

SEQ ID NO: 873946 - protein, 264 aa, Homo sapiens
GPCGRGAEGGTTTGREHGAGKPLGARRRAMEQRPRGCAAVAAALLLVLLGARAQGGTRSPRCDCAGDFHKKIGLFCCRGCPAADEAGMEALTPPPATHLSPLDSAHTLLAPPDSSEKICTVQLVGNSWTPGYPETQEALCPQVTWSWDQLPSRALGPAAAPTLSPESPAGSPAMMLQPGPQLYDVMDAVPARRWKEFVRTLGLREAEIEAVEVEIGRFRDQQYEMLKRWRQQQPAGLGAVYAALERMGLDGCVEDLRSRLQRGP

SEQ ID NO: 873947 - protein, 446 aa, Homo sapiens
GPCGRGAEGGTTTGREHGAGKPLGARRRAMEQRPRGCAAVAAALLLVLLGARAQGGTRSPRCDCAGDFHKKIGLFCCRGCPAGHYLKAPCTEPCGNSTCLVCPQDTFLAWENHHNSECARCQACDEQASQVALENCSAVADTRCGCKPGWFVECQVSQCVSSSPFYCQPCLDCGALHRHTRLLCSRRDTDCGTCLPGFYEHGDGCVSCPTSTLGSCPERCAAVCGWRQMFWVQVLLAGLVVPLLLGATLTYTYRHCWPHKPLVTADEAGMEALTPPPATHLSPLDSAHTLLAPPDSSEKICTVQLVGNSWTPGYPETQEALCPQVTWSWDQLPSRALGPAAAPTLSPESPAGSPAMMLQPGPQLYDVMDAVPARRWKEFVRTLGLREAEIEAVEVEIGRFRDQQYEMLKRWRQQQPAGLGAVYAALERMGLDGCVEDLRSRLQRGP

SEQ ID NO: 873948 - protein, 487 aa, Homo sapiens
GPCGRGAEGGTTTGREHGAGKPLGARRRAMEQRPRGCAAVAAALLLVLLGARAQGGTRSPRCDCAGDFHKKIGLFCCRGCPAGHYLKAPCTEPCGNSTCLVCPQDTFLAWENHHNSECARCQACDEQASQVALENCSAVADTRCGCKPGWFVECQVSQCVSSSPFYCQPCLDCGALHRHTRLLCSRRDTDCGTCLPGFYEHGDGCVSCPTPPPSLAGAPWGAVQSAVPLSVAGGRSRWCAGNASGRTGMDRGEAGEEGGNHPNTHQLLSVFWVQVLLAGLVVPLLLGATLTYTYRHCWPHKPLVTADEAGMEALTPPPATHLSPLDSAHTLLAPPDSSEKICTVQLVGNSWTPGYPETQEALCPQVTWSWDQLPSRALGPAAAPTLSPESPAGSPAMMLQPGPQLYDVMDAVPARRWKEFVRTLGLREAEIEAVEVEIGRFRDQQYEMLKRWRQQQPAGLGAVYAALERMGLDGCVEDLRSRLQRGP

SEQ ID NO: 873949 - protein, 176 aa, Homo sapiens
SAGCAVAAALLLVLLGARAQGGTRSPRCDCAGDFHKKIGLFCCRGCPAGHYLKAPCTEPCGNSTCLVCPQDTFLAWENHHNSECARCQACDEQASQVALENCSAVADTRCGCKPGWFVECQVSQCVSSSPFYCQPCLDCGALHRHTRLLCSRRDTDCGTCLPGFYEHGDGCVSCPT

SEQ ID NO: 873950 - protein, 191 aa, Homo sapiens
MAMAACPAPPDEAGMEALTPPPATHLSPLDSAHTLLAPPDSSEKICTVQLVGNSWTPGYPETQEALCPQVTWSWDQLPSRALGPAAAPTLSPESPAGSPAMMLQPGPQLYDVMDAVPARRWKEFVRTLGLREAEIEAVEVEIGRFRDQQYEMLKRWRQQQPAGLGAVYAALERMGLDGCVEDLRSRLQRGP

SEQ ID NO: 873951 - protein, 218 aa, Homo sapiens [sequence omitted]

SEQ ID NO: 873952 - protein, 191 aa, Homo sapiens; identical to SEQ ID NO: 873950

SEQ ID NO: 873953 - protein, 412 aa, Homo sapiens
SAGCAVAAALLLVLLGARAQGGTRSPRCDCAGDFHKKIGLFCCRGCPAGHYLKAPCTEPCGNSTCLVCPQDTFLAWENHHNSECARCQACDEQASQVALENCSAVADTRCGCKPGWFVECQVSQCVSSSPFYCQPCLDCGALHRHTRLLCSRRDTDCGTCLPGFYEHGDGCVSCPTSTLGSCPERCAAVCGWRQMFWVQVLLAGLVVPLLLGATLTYTYRHCWPHKPLVTADEAGMEALTPPPATHLSPLDSAHTLLAPPDSSEKICTVQLVGNSWTPGYPETQEALCPQVTWSWDQLPSRALGPAAAPTLSPESPAGSPAMMLQPGPQLYDVMDAVPARRWKEFVRTLGLREAEIEAVEVEIGRFRDQQYEMLKRWRQQQPAGLGAVYAALERMGLDGCVEDLRSRLQRGP

SEQ ID NO: 873954 - protein, 217 aa, Homo sapiens
MVQKYQSPVRVYKYPFELIMAAYERRFPTCPLIPMFVGSDTVNEFKSEDGAIHVIAKALQAGCRCTQTAEEDCRSSDYVHFVQKNSLNSRERTLHIEAYNETFSNRVIINEHCCYTVQPENEDWNCIEQSAQFSILNLSLVFESTVAKNCNETDITATSTTGKEIIRNTTIAKRTKKAYTFVPRRRAAYQSRPSSKESQHPPEHSRLKGRRIQKMAQ

SEQ ID NO: 873955 - protein, 150 aa, Homo sapiens
MNTLQGPVSFKDVAVDFTQEEWQQLDPDEKIAYGDVMLENYSHLVSVGYDYHQAKHHHGVEVKEVEQGEEPWIMEGEFPCQHSPGSSAGAGSGEFHVYRHLRRREYQRRTTWMPWVRSKNGCRVSEKMEKNKLCRGADRSAEEAQKLKEK

SEQ ID NO: 873956 - protein, 122 aa, Homo sapiens
SPLGIRPLRKTERTRSFRPKLFGIHSFSTDFLKTVFLLPRGPCSQSSQDGGGPLPRRWWAASKMAEATSKMVASLMFSDLGFLASRIPRNGILGHAVSVIALLETMGHRREPWNPVTSVQLD

SEQ ID NO: 873957 - protein, 104 aa, Homo sapiens
LDTPTAPPPPPPALALKFLCVVRLKGIPSCLRLRRLPARVWSASNSGWSGCCAGQRPAVRRKMCSKVFKGHEEVGHPSESLRLQISVPYTIVDCEKTCCSRHEG

SEQ ID NO: 873958 - protein, 160 aa, Homo sapiens
MTTQEDTTGLHQKTSLWTMSRPGAKKVMNSYFIAGCGPAVCYYAVSWLRQGFSINLTSFGRIPWPHAGVGTCPSPQSWISPFLQSHREHHYAKTSSHSQPSPQSLALCLAYSRCSINICQMTECISLASGCHQALREPGRSEESFWIPATPYISNIFSES

SEQ ID NO: 873959 - protein, 661 aa, Homo sapiens
MRPQILLLLALLTLGLAAQHQDKVPCKMVDKKVSCQVLGLLQVPSVLPPDTETLDLSGNQLRSILASPLGFYTALRHLDLSTNEISFLQPGAFQALTHLEHLSLAHNRLAMATALSAGGLGPLPRVTSLDLSGNSLYSGLLERLLGEAPSLHTLSLAENSLTRLTRHTFRDMPALEQLDLHSNVLMDIEDGAFEGLPRLTHLNLSRNSLTCISDFSLQQLRVLDLSCNSIEAFQTASQPQAEFQLTWLDLRENKLLHFPDLAALPRLIYLNLSNNLIRLPTGPPQDSKGIHAPSEGWSALPLSAPSGNASGRPLSQLLNLDLSYNEIELIPDSFLEHLTSLCFLNLSRNCLRTFEARRLGSLPCLMLLDLSHNALETLELGARALGSLRTLLLQGNALRDLPPYTFANLASLQRLNLQGNRVSPCGGPDEPGPSGCVAFSGITSLRSLSLVDNEIELLRAGAFLHTPLTELDLSSNPGLEVATGALGGLEASLEVLALQGNGLMVLQVDLPCFICLKRLNLAENRLSHLPAWTQAVSLEVLDLRNSFSLLPGSAMGGLETSLRRLYLQGNPLSCCGNGWLAAQLHQGRVDVDATQDLICRFSSQEEVSLSHVRPEDCEKGGLKNINLIIILTFILVSAILLTTLAACCCVRRQKFNQQYKA

SEQ ID NO: 873960 - protein, 661 aa, Homo sapiens; identical to SEQ ID NO: 873959

SEQ ID NO: 873961 - protein, 102 aa, Homo sapiens
MSCLGRMDVLGPTQDLVLLSSSSYLCLAHSLAHDVGSVMCEKVKMPLSPPHFTEENTKAQRKLRESQWAEPGLGPGGVWSTQADPVLVGITPTGATARNTPP

SEQ ID NO: 873962 - protein, 661 aa, Homo sapiens; identical to SEQ ID NO: 873959

SEQ ID NO: 873963 - protein, 661 aa, Homo sapiens; identical to SEQ ID NO: 873959

SEQ ID NO: 873964 - protein, 129 aa, Homo sapiens [sequence omitted]

SEQ ID NO: 873965 - protein, 134 aa, Homo sapiens
LNKVISELNGKNIEDAIAKPHPDDPHPSYHGVMSCLGRMDVLGPTQDLVLLSSSSYLCLAHSLAHDVGSVMCEKVKMPLSPPHFTEENTKAQRKLRESQWAEPGLGPGGVWSTQADPVLVGITPTGATARNTPP

SEQ ID NO: 873966 - protein, 359 aa, Homo sapiens
MSMNNSKQLVSPAAALLSNTTCQTENRLSVFFSVIFMTVGILSNSLAIAILMKAYQRFRQKSKASFLLLASGLVITDFFGHLINGAIAVFVYASDKEWIRFDQSNVLCSIFGICMVFSGLCPLLLGSVMAIERCIGVTKPIFHSTKITSKHVKMMLSGVCLFAVFIALLPILGHRDYKIQASRTWCFYNTEDIKDWEDRFYLLLFSFLGLLALGVSLLCNAITGITLLRVKFKSQQHRQGRSHHLEMVIQLLAIMCVSCICWSPFLVTMANIGINGNHSLETCETTLFALRMATWNQILDPWVYILLRKAVLKNLYKLASQCCGVHVISLHIWELSSIKNSLKVAAISESPVAEKSAST

SEQ ID NO: 873967 - protein, 116 aa, Homo sapiens
MAETSALPTGFGELEVLAVGMVLLVEDPGAADSLPPTGAELGSCGQWDQPECPRCSHIQPSPALALRLGRLPGSRLPGLCDSVGQHLQQCSHRMGALSPLLHPPKCCHRSHHFEWR

SEQ ID NO: 873968 - protein, 253 aa, Homo sapiens
MAETSALPTGFGELEVLAVGMVLLVEALSGLSLNTLTIFSFCKTPELRTPCHLLVLSLALADSGISLNALVAATSSLLRRWPYGSDGCQAHGFQGFVTALASICSSAAIAWGRYHHYCTRSQLAWNSAVSLVLFVWLSSAFWAALPLLGWGHYDYEPLGTCCTLDYSKGDRNFTSFLFTMSFFNFAMPLFITITSYSLMEQKLGKSGHLQVPALIAKMVPTINAINYALGNEMVCRGIWQCLSPQKREKDRTK

SEQ ID NO: 873969 - protein, 81 aa, Homo sapiens
RMAETSALPTGFGELEVLAVGMVLLVEGEPGRTWGAAGAQWVLRTQATSVELARRGEVPKPSWVSGPIGCLPLCARTRGVF

SEQ ID NO: 873970 - protein, 291 aa, Homo sapiens
MAETSALPTGFGELEVLAVGMVLLVEALSGLSLNTLTIFSFCKTPELRTPCHLLVLSLALADSGISLNALVAATSSLLRRWPYGSDGCQAHGFQGFVTALASICSSAAIAWGRYHHYCTRSQLAWNSAVSLVLFVWLSSAFWAALPLLGWGHYDYEPLGTCCTLDYSKGDRNFTSFLFTMSFFNFAMPLFITITSYSLMEQKLGKSGHLQVNTTLPARTLLLGWGPYAILYLYAVIADVTSISPKLQMVPALIAKMVPTINAINYALGNEMVCRGIWQCLSPQKREKDRTK

SEQ ID NO: 873971 - protein, 109 aa, Homo sapiens
MAETSALPTGFGELEVLAVGMVLLVEDPGAADSLPPTGAELGSCGQWDQPECPRCSHIQPSPVPAPSPVHRLWGPAWGLTPGPWAARPRAFLLLTENWPRAEGGQAKMG

SEQ ID NO: 873972 - protein, 275 aa, Homo sapiens
MAETSALPTGFGELEVLAVGMVLLVEALSGLSLNTLTIFSFCKTPELRTPCHLLVLSLALADSGISLNALVAATSSLLRRWPYGSDGCQAHGFQGFVTALASICSSAAIAWGRYHHYCTRSQLAWNSAVSLVLFVWLSSAFWAALPLLGWGHYDYEPLGTCCTLDYSKGDRNFTSFLFTMSFFNFAMPLFITITSYSLMEQKLGKSGHLQVNTTLPARTLLLGWGPYAILYLYAVIADVTSISPKLQMVQILLVPKTRPLSIFVLCLISSHFLDL

SEQ ID NO: 873973 - protein, 313 aa, Homo sapiens
MALLVDRVRGHWRIAAGLLFNLLVSICIVFLNKWIYVYHGFPNMSLTLVHFVVTWLGLYICQKLDIFAPKSLPPSRLLLLALSFCGFVVFTNLSLQNNTIGTYQLAKAMTTPVIIAIQTFCYQKTFSTRIQLTLIPITLGVILNSYYDVKFNFLGMVFAALGVLVTSLYQVWVGAKQHELQVNSMQLLYYQAPMSSAMLLVAVPFFEPVFGEGGIFGPWSVSALLMVLLSGVIAFMVNLSIYWIIGNTSPVTYNMFGHFKFCITLFGGYVLFKDPLSINQALGILCTLFGILAYTHFKLSEQEGSRSKLAQRP

SEQ ID NO: 873974 - protein, 280 aa, Homo sapiens
MALLVDRVRGHWRIAAGLLFNLLVSICIVFLNKWIYVYHGFPNMSLTLVHFVVTWLGLYICQKLDIFAPKSLPPSRLLLLALSFCGFVVFTNLSLQNNTIGTYQLAKAMTTPVIIAIQTFCYQKTFSTRIQLTLIPITLGVILNSYYDVKFNFLGMVFAALGVLVTSLYQVWVGAKQHELQVNSMQLLYYQAPMSSAMLLVAVPFFEPVFGEGGIFGPWSVSALLMVLLSGVIAFMVNLSIYWIIGNTSPVTQEMKSLAGCTVAHACNPSTLGGQGQRIT

SEQ ID NO: 873975 - protein, 305 aa, Homo sapiens
MALLVDRVRGHWRIAAGLLFNLLVSICIVFLNKWIYVYHGFPNMSLTLVHFVVTWLGLYICQKLDIFAPKSLPPSRLLLLALSFCGFVVFTNLSLQNNTIGTYQLAKAMTTPVIIAIQTFCYQKTFSTRIQLTLIPITLGVILNSYYDVKFNFLGMVFAALGVLVTSLYQVWVGAKQHELQVNSMQLLYYQAPMSSAMLLVAVPFFEPVFGEGGIFGPWSVSALSPGLECSCAFLAHCNLHLLGLSDSHASGSQVAGIEGMCHHAQLIFVFFVETRFHHDGQAGLKFPASSDPPPQLPKVLGLQA

SEQ ID NO: 873976 - protein, 313 aa, Homo sapiens; identical to SEQ ID NO: 873973

SEQ ID NO: 873977 - protein, 305 aa, Homo sapiens; identical to SEQ ID NO: 873975

SEQ ID NO: 873978 - protein, 474 aa, Homo sapiens
MQLNKDTVCKPCLAGYFSDAFSSTDKCRPWTNCTFLGKRVEHHGTEKSDAVCSSSLPARKPPNEPHVYLPGLIILLLFASVALVAAIIFGVCYRKKGKALTANLWHWINEACGRLSGDKESSGDSCVSTHTANFGQQGACEGVLLLTLEEKTFPEDMCYPDQGGVCQGTCVGGGPYAQGEDARMLSLVSKTEIEEDSFRQMPTEDEYMDRPSQPTDQLLFLTEPGSKSTPPFSEPLEVGENDSLSQCFTGTQSTVGSESCNCTEPLCRTDWTPMSSENYLQKEVDSGHCPHWAASPSPNWADVCTGCRNPPGEDCEPLVGSPKRGPLPQCAYGMGLPPEEEASRTEARDQPEDGADGRLPSSARAGAGSGSSPGGQSPASGNVTGNSNSTFISSGQVMNFKGDIIVVYVSQTSQEGAAAAAEPMGRPVQEETLARRDSFAGNGPRFPDPCGGPEGLREPEKASRPVQEQGGAKA

SEQ ID NO: 873979 - protein, 83 aa, Homo sapiens
ARRQRAAKGGDCHFCYPRPTFLILRFDLPGFVFQLRKIKESLLPYFSFSSNTEPHVYLPGLIILLLFASVALVAAIIFGVCYR

SEQ ID NO: 873980 - protein, 616 aa, Homo sapiens
MAPRARRRRPLFALLLLCALLARLQVALQIAPPCTSEKHYEHLGRCCNKCEPGKYMSSKCTTTSDSVCLPCGPDEYLDSWNEEDKCLLHKVCDTGKALVAVVAGNSTTPRRCACTAGYHWSQDCECCRRNTECAPGLGAQHPLQLNKDTVCKPCLAGYFSDAFSSTDKCRPWTNCTFLGKRVEHHGTEKSDAVCSSSLPARKPPNEPHVYLPGLIILLLFASVALVAAIIFGVCYRKKGKALTANLWHWINEACGRLSGDKESSGDSCVSTHTANFGQQGACEGVLLLTLEEKTFPEDMCYPDQGGVCQGTCVGGGPYAQGEDARMLSLVSKTEIEEDSFRQMPTEDEYMDRPSQPTDQLLFLTEPGSKSTPPFSEPLEVGENDSLSQCFTGTQSTVGSESCNCTEPLCRTDWTPMSSENYLQKEVDSGHCPHWAASPSPNWADVCTGCRNPPGEDCEPLVGSPKRGPLPQCAYGMGLPPEEEASRTEARDQPEDGADGRLPSSARAGAGSGSSPGGQSPASGNVTGNSNSTFISSGQVMNFKGDIIVVYVSQTSQEGAAAAAEPMGRPVQEETLARRDSFAGNGPRFPDPCGGPEGLREPEKASRPVQEQGGAKA

SEQ ID NO: 873981 - protein, 598 aa, Homo sapiens
PQVVLPEVWLSISAAPVKATVHGARTLSSFWGGEGKYMSSKCTTTSDSVCLPCGPDEYLDSWNEEDKCLLHKVCDTGKALVAVVAGNSTTPRRCACTAGYHWSQDCECCRRNTECAPGLGAQHPLQLNKDTVCKPCLAGYFSDAFSSTDKCRPWTNCTFLGKRVEHHGTEKSDAVCSSSLPARKPPNEPHVYLPGLIILLLFASVALVAAIIFGVCYRKKGKALTANLWHWINEACGRLSGDKESSGDSCVSTHTANFGQQGACEGVLLLTLEEKTFPEDMCYPDQGGVCQGTCVGGGPYAQGEDARMLSLVSKTEIEEDSFRQMPTEDEYMDRPSQPTDQLLFLTEPGSKSTPPFSEPLEVGENDSLSQCFTGTQSTVGSESCNCTEPLCRTDWTPMSSENYLQKEVDSGHCPHWAASPSPNWADVCTGCRNPPGEDCEPLVGSPKRGPLPQCAYGMGLPPEEEASRTEARDQPEDGADGRLPSSARAGAGSGSSPGGQSPASGNVTGNSNSTFISSGQVMNFKGDIIVVYVSQTSQEGAAAAAEPMGRPVQEETLARRDSFAGNGPRFPDPCGGPEGLREPEKASRPVQEQGGAKA

SEQ ID NO: 873982 - protein, 90 aa, Homo sapiens
PKVDMVNEEIGKQQKVAVIHQMKEDQSKIPEGIQVDSDGLITITTPNKLATLSVRAMPLPEEVTQILEENSDLIRSMEQLTSSLNEGENT

SEQ ID NO: 873983 - protein, 109 aa, Homo sapiens
MNTLQGPVSFKDVAVDFTQEEWRQLDPDEKIAYGDVMLENYSHLVSVGYDYHQAKHHHGVEVKEVEQGEEPWIMEGEFPCQHSPVQNLLRPSNLLIGSQSIRFALGQWY

SEQ ID NO: 873984 - protein, 109 aa, Homo sapiens; identical to SEQ ID NO: 873983

SEQ ID NO: 873985 - protein, 109 aa, Homo sapiens; identical to SEQ ID NO: 873983

SEQ ID NO: 873986 - protein, 109 aa, Homo sapiens; identical to SEQ ID NO: 873983

SEQ ID NO: 873987 - protein, 162 aa, Homo sapiens
ASLDHGLQPERLGGSRVSQGSVGGGEAGAAGVGTWRLLKRTRAGGRCARHPCHVAEEPGARGPWQGAGRTQATPTSGSHPVAGEGPRPLEGPTWRVVQRGVGHPQIRGKLGSTLSFPRVEVTTIISGEPVPLRKETLREIRWRGSGFRGAPSPSLKRWSPGK

SEQ ID NO: 873988 - protein, 648 aa, Homo sapiens
FGKLTPCAKMKLLLQAPLHQRARVGVETGAEAVVRPPFQVLVFLPSAWGRPLTRPLYCRALLYGFPSRTVKAGGRGQHAFSASRPALSHSLAALSLPCRPAGRGNRRALGGRSGGGGSSGSGSLCGCIGGSGKMAARAGFQSVAPSGGAGASGGAGAAAALGPGGTPGPPVRMGPAPGQGLYRSPMPGAAYPRPGMLPGSRMTPQGPSMGPPGYGGNPSVRPGLAQSGMDQSRKRPAPQQIQQVQQQAVQNRNHNAKKKKMADKILPQRIRELVPESQAYMDLLAFERKLDQTIMRKRLDIQEALKRPIKQKRKLRIFISNTFNPAKSDAEDGEGTVASWELRVEGRLLEDSALSKYDATKQKRKFSSFFKSLVIELDKDLYGPDNHLVEWHRTATTQETDGFQVKRPGDVNVRCTVLLMLDYQPPQFKLDPRLARLLGIHTQTRPVIIQALWQYIKTHKLQDPHEREFVICDKYLQQIFESQRMKFSEIPQRLHALLMPPEPIIINHVISVDPNDQKKTACYDIDVEVDDTLKTQMNSFLLSTASQQEIATLDNKIHETIETINQLKTQREFMLSFARDPQGFINDWLQSQCRDLKTMTDVVGNPEEERRAEFYFQPWAQEAVCRYFYSKVQQRRQELEQALGIRNT

SEQ ID NO: 873989 - protein, 648 aa, Homo sapiens; identical to SEQ ID NO: 873988

SEQ ID NO: 873990 - protein, 350 aa, Homo sapiens
ESPSHTGSLHTGQKRKLRIFISNTFNPAKSDAEDGEGTVASWELRVEGRLLEDSALSKYDATKQKRKFSSFFKSLVIELDKDLYGPDNHLVEWHRTATTQETDGFQVKRPGDVNVRCTVLLMLDYQPPQFKLDPRLARLLGIHTQTRPVIIQALWQYIKTHKLQDPHEREFVICDKYLQQIFESQRMKFSEIPQRLHALLMPPEPIIINHVISVDPNDQKKTACYDIDVEVDDTLKTQMNSFLLSTASQQEIATLDNKIHETIETINQLKTQREFMLSFARDPQGFINDWLQSQCRDLKTMTDVVGNPEEERRAEFYFQPWAQEAVCRYFYSKVQQRRQELEQALGIRNT

SEQ ID NO: 873991 - protein, 648 aa, Homo sapiens; identical to SEQ ID NO: 873988

SEQ ID NO: 873992 - protein, 648 aa, Homo sapiens; identical to SEQ ID NO: 873988

SEQ ID NO: 873993 - protein, 648 aa, Homo sapiens; identical to SEQ ID NO: 873988

SEQ ID NO: 873994 - protein, 648 aa, Homo sapiens; identical to SEQ ID NO: 873988

SEQ ID NO: 873995 - protein, 638 aa, Homo sapiens
FGKLTPCAKMKLLLQAPLHQRARVGVETGAEAVVRPPFQVLVFLPSAWGRPLTRPLYCRALLYGFPSRTVKAGGRGQHAFSASRPALSHSLAALSLPCRPAGRGNRRALGGRSGGGGSSGSGSLCGCIGGSGKMAARAGFQSVAPSGGAGASGGAGAAAALGPGGTPGPPVRMGPAPGQGLYRSPMPGAAYPRPGMLPGSRMTPQGPSMGPPGYGGNPSVRPGLAQSGMDQSRKRPAPQQIQQVQQQAVQNRNHNAKKKKMADKILPQRIRELVPESQAYMDLLAFERKLDQTIMRKRLDIQEALKRPIKQKRKLRIFISNTFNPAKSDAEDGEGTVASWELRVEGRLLEDSALSKYDATKQKRKFSSFFKSLVIELDKDLYGPDNHLVEWHRTATTQETDGFQVKRPGDVNVRCTVLLMLDYQPPQFKLDPRLARLLGIHTQTRPVIIQALWQYIKTHKLQDPHEREFVICDKYLQQIFESQRMKFSEIPQRLHALLMPPEPIIINHVISVDPNDQKKTACYDIDVEVDDTLKTQMNSFLLSTASQQEIATLDNKIHETIETINQLKTQREFMLSFARDPQGFINDWLQSQCRDLKTMTDVVGNPEEERRAEFYFQPWAQEAVCRYFYSKLNNTTKQ

SEQ ID NO: 873996 - protein, 550 aa, Homo sapiens
FGKLTPCAKMKLLLQAPLHQRARVGVETGAEAVVRPPFQVLVFLPSAWGRPLTRPLYCRALLYGFPSRTVKAGGRGQHAFSASRPALSHSLAALSLPCRPAGRGNRRALGGRSGGGGSSGSGSLCGCIGGSGKMAARAGFQSVAPSGGAGASGGAGAAAALGPGGTPGPPVRMGPAPGQGLYRSPMPGAAYPRPGMLPGSRMTPQGPSMGPPGYGGNPSVRPGLAQSGMDQSRKRPAPQQIQQVQQQAVQNRNHNAKKKKMADKILPQRIRELVPESQAYMDLLAFERKLDQTIMRKRLDIQEALKRPIKQKRKLRIFISNTFNPAKSDAEDGEGTVASWELRVEGRLLEDSALSKYDATKQKRKFSSFFKSLVIELDKDLYGPDNHLVEWHRTATTQETDGFQVKRPGDVNVRCTVLLMLDYQPPQFKLDPRLARLLGIHTQTRPVIIQALWQYIKTHKLQDPHEREFVICDKYLQQIFESQRMKFSEIPQRLHALLMPPEPIIINHVISVDPNDQKKTACYDIDVEVDDTLKTQNFLPVFPFLPFSLP

SEQ ID NO: 873997 - protein, 607 aa, Homo sapiens
FGKLTPCAKMKLLLQAPLHQRARVGVETGAEAVVRPPFQVLVFLPSAWGRPLTRPLYCRALLYGFPSRTVKAGGRGQHAFSASRPALSHSLAALSLPCRPAGRGNRRALGGRSGGGGSSGSGSLCGCIGGSGKMAARAGFQSVAPSGGAGASGGAGAAAALGPGGTPGPPVRMGPAPGQGLYRSPMPGAAYPRPGMLPGSRMTPQGPSMGPPGYGGNPSVRPGLAQSGMDQSRKRPAPQQIQQVQQQAVQNRNHNAKKKKMADKILPQRIRELVPESQAYMDLLAFERKLDQTIMRKRLDIQEALKRPIKQKRKLRIFISNTFNPAKSDAEDGEGTVASWELRVEGRLLEDSALSKYDATKQKRKFSSFFKSLVIELDKDLYGPDNHLVEWHRTATTQETDGFQVKRPGDVNVRCTVLLMLDYQPPQFKLDPRLARLLGIHTQTRPVIIQALWQYIKTHKLQDPHEREFVICDKYLQQIFESQRMKFSEIPQRLHALLMPPEPIIINHVISVDPNDQKKTACYDIDVEVDDTLKTQMNSFLLSTASQQEIATLDNKTMTDVVGNPEEERRAEFYFQPWAQEAVCRYFYSKVQQRRQELEQALGIRNT

SEQ ID NO: 873998 - protein, 607 aa, Homo sapiens
FGKLTPCAKMKLLLQAPLHQRARVGVETGAEAVVRPPFQVLVFLPSAWGRPLTRPLYCRALLYGFPSRTVKAGGRGQHAFSASRPALSHSLAALSLPCRPAGRGNRRALGGRSGGGGSSGSGSLCGCIGGSGKMAARAGFQSVAPSGGAGASGGAGAAAALGPGGTPGPPVRMGPAPGQGLYRSPMPGAAYPRPGMLPGSRMTPQGPSMGPPGYGGNPSVRPGLAQSGMDQSRKRPAPQQIQQVQQQAVQNRNHNAKKKKMADKILPQRIRELVPESQAYMDLLAFERKLDQTIMRKRLDIQEALKRPIKSALSKYDATKQKRKFSSFFKSLVIELDKDLYGPDNHLVEWHRTATTQETDGFQVKRPGDVNVRCTVLLMLDYQPPQFKLDPRLARLLGIHTQTRPVIIQALWQYIKTHKLQDPHEREFVICDKYLQQIFESQRMKFSEIPQRLHALLMPPEPIIINHVISVDPNDQKKTACYDIDVEVDDTLKTQMNSFLLSTASQQEIATLDNKIHETIETINQLKTQREFMLSFARDPQGFINDWLQSQCRDLKTMTDVVGNPEEERRAEFYFQPWAQEAVCRYFYSKVQQRRQELEQALGIRNT

SEQ ID NO: 873999 - protein, 568 aa, Homo sapiens
FGKLTPCAKMKLLLQAPLHQRARVGVETGAEAVVRPPFQVLVFLPSAWGRPLTRPLYCRALLYGFPSRTVKAGGRGQHAFSASRPALSHSLAALSLPCRPAGRGNRRALGGRSGGGGSSGSGSLCGCIGGSGKMAARAGFQSVAPSGGAGASGGAGAAAALGPGGTPGPPVRMGPAPGQGLYRSPMPGAAYPRPGMLPGSRMTPQGPSMGPPGYGGNPSVRPGLAQSGMDQSRKRPAPQQIQQVQQQAVQNRNHNAKKKKMADKILPQRIRELVPESQAYMDLLAFERKLDQTIMRKRLDIQEALKRPIKWHRTATTQETDGFQVKRPGDVNVRCTVLLMLDYQPPQFKLDPRLARLLGIHTQTRPVIIQALWQYIKTHKLQDPHEREFVICDKYLQQIFESQRMKFSEIPQRLHALLMPPEPIIINHVISVDPNDQKKTACYDIDVEVDDTLKTQMNSFLLSTASQQEIATLDNKIHETIETINQLKTQREFMLSFARDPQGFINDWLQSQCRDLKTMTDVVGNPEEERRAEFYFQPWAQEAVCRYFYSKVQQRRQELEQALGIRNT

SEQ ID NO: 874000 - protein, 183 aa, Homo sapiens
RLRSSRGVVGRGNIFESQRMKFSEIPQRLHALLMPPEPIIINHVISVDPNDQKKTACYDIDVEVDDTLKTQMNSFLLSTASQQEIATLDNKIHETIETINQLKTQREFMLSFARDPQGFINDWLQSQCRDLKTMTDVVGNPEEERRAEFYFQPWAQEAVCRYFYSKVQQRRQELEQALGIRNT

SEQ ID NO: 874001 - protein, 556 aa, Homo sapiens
FGKLTPCAKMKLLLQAPLHQRARVGVETGAEAVVRPPFQVLVFLPSAWGRPLTRPLYCRALLYGFPSRTVKAGGRGQHAFSASRPALSHSLAALSLPCRPAGRGNRRALGGRSGGGGSSGSGSLCGCIGGSGKMAARAGFQSVAPSGGAGASGGAGAAAALGPGGTPGPPVRMGPAPGQGLYRSPMPGAAYPRPGMLPGSRMTPQGPSMGPPGYGGNPSVRPGLAQSGMDQSRKRPAPQQIQQVQQQAVQNRNHNAKKKKMADKILPQRIRELVPESQAYMDLLAFERKLDQTIMRKRLDIQEALKRPIKQKRKLRIFISNTFNPAKSDAEDGEGTVASWELRVEGRLLEDSALSKYDATKQKRKFSSFFKSLVIELDKDLYGPDNHLVEWHRTATTQETDGFQVKRPGDVNVRCTVLLMLDYQPPQFKLDPRLARLLGIHTQTRPVIIQALWQYIKTHKLQDPHEREFVICDKYLQQIFESQRMKFSEIPQRLHALLMPPEPIIINHVISVDPNDQKKTACYDIDVEVDDTLKTQMNSFLLSTASQLENSAELGL

SEQ ID NO: 874002 - protein, 550 aa, Homo sapiens; identical to SEQ ID NO: 873996

SEQ ID NO: 874003 - protein, 113 aa, Homo sapiens
NSPASASWIARITGLHHHARQIFVFLVETGFHHVGQAGLELLTLSDPPTLASQSAGITGMSHREAGAIKDHLKRMQGEANNQEQISKRETESHQKSVRKPGIQGELDSKYNNT

SEQ ID NO: 874004 - protein, 268 aa, Homo sapiens
MCGISHGLRCLSVIVLRELVAWFIKLFFIFSIQDNSFEQFIINYCNEKLQQIFIELTLKEEQEEYIREDIEWTHIDYFNNAIICDLIENNTNGILAMLDEECLRPGTVTDETFLEKLNQVCATHQHFESRMSKCSRFLNDTSLPHSCFRIQHYAGKVLYQVEGFVDKNNDLLYRDLSQAMWKASHALIKSLFPEGNPAKINLKRPPTAGSQFKASVATLMKNLQTKNPNYIRWYFWHMKLSQFKCESTPKEYHFSLCFNLSVAQAEGN

SEQ ID NO: 874005 - protein, 696 aa, Homo sapiens
MGVLDIYGFEIFEDNSFEQFIINYCNEKLQQIFIELTLKEEQEEYIREDIEWTHIDYFNNAIICDLIENNTNGILAMLDEECLRPGTVTDETFLEKLNQVCATHQHFESRMSKCSRFLNDTSLPHSCFRIQHYAGKVLYQVEGFVDKNNDLLYRDLSQAMWKASHALIKSLFPEGNPAKINLKRPPTAGSQFKASVATLMKNLQTKNPNYIRCIKPNDKKAAHIFNEALVCHQIRYLGLLENVRVRRAGYAFRQAYEPCLERYKMLCKQTWPHWKGPARSGVEVLFNELEIPVEEYSFGRSKIFIRNPRTLFKLEDLRKQRLEDLATLIQKIYRGWKCRTHFLLMKKSQIVIAAWYRRYAQQKRYQQTKSSALVIQSYIRGWKARKILRELKHQKRCKEAVTTIAAYWHGTQVRREYRKFFRANAGKKIYEFTLQRIVQKYFLEMKNKMPSLSPIDKNWPSRPYLFLDSTHKELKRIFHLWRCKKYRDQFTDQQKLIYEEKLEASELFKDKKALYPSSVGRPFQGAYLEINKNPKYKKLKDAIEEKIIIAEVVNKINRANGKSTSRIFLLTNNNLLLADQKSGQIKSEVPLVDVTKVSMSSQNDGFFAVHLKEGSEAASKGDFLFSSDHLIEMATKLYRTTLSQTKQKLNIEISDEFLVQFRQDKVCVKFIQGNQKNGSVPTCKRKNNRLLEVAVP

SEQ ID NO: 874006 - protein, 678 aa, Homo sapiens
MGVLDIYGFEIFEDNSFEQFIINYCNEKLQQIFIELTLKEEQEEYIREDIEWTHIDYFNNAIICDLIENNTNGILAMLDEECLRPGTVTDETFLECSRFLNDTSLPHSCFRIQHYAGKVLYQVEGFVDKNNDLLYRDLSQAMWKASHALIKSLFPEGNPAKINLKRPPTAGSQFKASVATLMKNLQTKNPNYIRCIKPNDKKAAHIFNEALVCHQIRYLGLLENVRVRRAGYAFRQAYEPCLERYKMLCKQTWPHWKGPARSGVEVLFNELEIPVEEYSFGRSKIFIRNPRTLFKLEDLRKQRLEDLATLIQKIYRGWKCRTHFLLMKKSQIVIAAWYRRYAQQKRYQQTKSSALVIQSYIRGWKARKILRELKHQKRCKEAVTTIAAYWHGTQVRREYRKFFRANAGKKIYEFTLQRIVQKYFLEMKNKMPSLSPIDKNWPSRPYLFLDSTHKELKRIFHLWRCKKYRDQFTDQQKLIYEEKLEASELFKDKKALYPSSVGRPFQGAYLEINKNPKYKKLKDAIEEKIIIAEVVNKINRANGKSTSRIFLLTNNNLLLADQKSGQIKSEVPLVDVTKVSMSSQNDGFFAVHLKEGSEAASKGDFLFSSDHLIEMATKLYRTTLSQTKQKLNIEISDEFLVQFRQDKVCVKFIQGNQKNGSVPTCKRKNNRLLEVAVP

SEQ ID NO: 874007 - protein, 946 aa, Homo sapiens
KNRGQYACHVLCGSWLWKRSKVNQVRTALQSNPVLEAFGNAKTVRNDNSSRFGKYMDIEFDFKGDPLGGVISNYLLEKSRVVKQPRGERNFHVFYQLLSGASEELLNKLKLERDFSRYNYLSLDSAKVNGVDDAANFRTVRNAMQIVGFMDHEAESVLAVVAAVLKLGNIEFKPESRVNGLDESKIKDKNELKEICELTGIDQSVLERAFSFRTVEAKQEKVSTTLNVAQAYYARDALAKNLYSRLFSWLVNRINESIKAQTKVRKKVMGVLDIYGFEIFEDNSFEQFIINYCNEKLQQIFIELTLKEEQEEYIREDIEWTHIDYFNNAIICDLIENNTNGILAMLDEECLRPGTVTDETFLEKLNQVCATHQHFESRMSKCSRFLNDTSLPHSCFRIQHYAGKVLYQVEGFVDKNNDLLYRDLSQAMWKASHALIKSLFPEGNPAKINLKNLQTKNPNYIRCIKPNDKKAAHIFNEALVCHQIRYLGLLENVRVRRAGYAFRQAYEPCLERYKMLCKQTWPHWKGPARSGVEVLFNELEIPVEEYSFGRSKIFIRNPRTLFKLEDLRKQRLEDLATLIQKIYRGWKCRTHFLLMKKSQIVIAAWYRRYAQQKRYQQTKSSALVIQSYIRGWKARKILRELKHQKRCKEAVTTIAAYWHGTQVRREYRKFFRANAGKKIYEFTLQRIVQKYFLEMKNKMPSLSPIDKNWPSRPYLFLDSTHKELKRIFHLWRCKKYRDQFTDQQKLIYEEKLEASELFKDKKALYPSSVGRPFQGAYLEINKNPKYKKLKDAIEEKIIIAEVVNKINRANGKSTSRIFLLTNNNLLLADQKSGQIKSEVPLVDVTKVSMSSQNDGFFAVHLKEGSEAASKGDFLFSSDHLIEMATKLYRTTLSQTKQKLNIEISDEFLVQFRQDKVCVKFIQGNQKNGSVPTCKRKNNRLLEVAVP

SEQ ID NO: 874008 - protein, 993 aa, Homo sapiens
KNRGQYACHVLCGSWLWKRSKVNQVRTALQSNPVLEAFGNAKTVRNDNSSRFGKYMDIEFDFKGDPLGGVISNYLLEKSRVVKQPRGERNFHVFYQLLSGASEELLNKLKLERDFSRYNYLSLDSAKVNGVDDAANFRTVRNAMQIVGFMDHEAESVLAVVAAVLKLGNIEFKPESRVNGLDESKIKDKNELKEICELTGIDQSVLERAFSFRTVEAKQEKVSTTLNVAQAYYARDALAKNLYSRLFSWLVNRINESIKAQTKVRKKVMGVLDIYGFEIFEDNSFEQFIINYCNEKLQQIFIELTLKEEQEEYIREDIEWTHIDYFNNAIICDLIENNTNGILAMLDEECLRPGTVTDETFLEKLNQVCATHQHFESRMSKCSRFLNDTSLPHSCFRIQHYAGKVLYQVEGFVDKNNDLLYRDLSQAMWKASHALIKSLFPEGNPAKINLKRPPTAGSQFKASVATLMKNLQTKNPNYIRCIKPNDKKAAHIFNEALVCHQIRYLGLLENVRVRRAGYAFRQAYEPCLERYKMLCKQTWPHWKGPARSGVEVLFNELEIPVEEYSFGRSKIFIRNPRTLFKLEDLRKQRLEDLATLIQKIYRGWKCRTHFLLMKKSQIVIAAWYRRYAQQKRYQQTKSSALVIQSYIRGWKARKILRELKHQKRCKEAVTTIAAYWHGTQARRELKRLKEEARRKHAVAVIWAYWLGLKVRREYRKFFRANAGKKIYEFTLQRIVQKYFLEMKNKMPSLSPIDKNWPSRPYLFLDSTHKELKRIFHLWRCKKYRDQFTDQQKLIYEEKLEASELFKDKKALYPSSVGRPFQGAYLEINKNPKYKKLKDAIEEKIIIAEVVNKINRANGKSTSRIFLLTNNNLLLADQKSGQIKSEVPLVDVTKVSMSSQNDGFFAVHLKEGSEAASKGDFLFSSDHLIEMATKLYRTTLSQTKQKLNIEISDEFLVQFRQDKVCVKFIQGNQKNGSVPTCKRKNNRLLEVAVP

SEQ ID NO: 874009 - protein, 964 aa, Homo sapiens
KNRGQYACHVLCGSWLWKRSKVNQVRTALQSNPVLEAFGNAKTVRNDNSSRFGKYMDIEFDFKGDPLGGVISNYLLEKSRVVKQPRGERNFHVFYQLLSGASEELLNKLKLERDFSRYNYLSLDSAKVNGVDDAANFRTVRNAMQIVGFMDHEAESVLAVVAAVLKLGNIEFKPESRVNGLDESKIKDKNELKEICELTGIDQSVLERAFSFRTVEAKQEKVSTTLNVAQAYYARDALAKNLYSRLFSWLVNRINESIKAQTKVRKKVMGVLDIYGFEIFEDNSFEQFIINYCNEKLQQIFIELTLKEEQEEYIREDIEWTHIDYFNNAIICDLIENNTNGILAMLDEECLRPGTVTDETFLEKLNQVCATHQHFESRMSKCSRFLNDTSLPHSCFRIQHYAGKVLYQVEGFVDKNNDLLYRDLSQAMWKASHALIKSLFPEGNPAKINLKRPPTAGSQFKASVATLMKNLQTKNPNYIRCIKPNDKKAAHIFNEALVCHQIRYLGLLENVRVRRAGYAFRQAYEPCLERYKMLCKQTWPHWKGPARSGVEVLFNELEIPVEEYSFGRSKIFIRNPRTLFKLEDLRKQRLEDLATLIQKIYRGWKCRTHFLLMKKSQIVIAAWYRRYAQQKRYQQTKSSALVIQSYIRGWKARKILRELKHQKRCKEAVTTIAAYWHGTQVRREYRKFFRANAGKKIYEFTLQRIVQKYFLEMKNKMPSLSPIDKNWPSRPYLFLDSTHKELKRIFHLWRCKKYRDQFTDQQKLIYEEKLEASELFKDKKALYPSSVGRPFQGAYLEINKNPKYKKLKDAIEEKIIIAEVVNKINRANGKSTSRIFLLTNNNLLLADQKSGQIKSEVPLVDVTKVSMSSQNDGFFAVHLKEGSEAASKGDFLFSSDHLIEMATKLYRTTLSQTKQKLNIEISDEFLVQFRQDKVCVKFIQGNQKNGSVPTCKRKNNRLLEVAVP

SEQ ID NO: 874010 - protein, 233 aa, Homo sapiens
VRSKISVWVRRSKQNVACQCKKYRDQFTDQQKLIYEEKLEASELFKDKKALYPSSVGRPFQGAYLEINKNPKYKKLKDAIEEKIIIAEVVNKINRANGKSTSRIFLLTNNNLLLADQKSGQIKSEVPLVDVTKVSMSSQNDGFFAVHLKEGSEAASKGDFLFSSDHLIEMATKLYRTTLSQTKQKLNIEISDEFLVQFRQDKVCVKFIQGNQKNGSVPTCKRKNNRLLEVAVP

SEQ ID NO: 874011 - protein, 964 aa, Homo sapiens; identical to SEQ ID NO: 874009

SEQ ID NO: 874012 - protein, 941 aa, Homo sapiens
KNRGQYACHVLCGSWLWKRSKVNQVRTALQSNPVLEAFGNAKTVRNDNSSRFGKYMDIEFDFKGDPLGGVISNYLLEKSRVVKQPRGERNFHVFYQLLSGASEELLNKLKLERDFSRYNYLSLDSAKVNGVDDAANFRTVRNAMQIVGFMDHEAESVLAVVAAVLKLGNIEFKPESRVNGLDESKIKDKNELKEICELTGIDQSVLERAFSFRTVEAKQEKVSTTLNVAQAYYARDALAKNLYSRLFSWLVNRINESIKAQTKVRKKVMGVLDIYGFEIFEDNSFEQFIINYCNEKLQQIFIELTLKEEQEEYIREDIEWTHIDYFNNAIICDLIENNTNGILAMLDEECLRPGTVTDETFLEKLNQVCATHQHFESRMSKCSRFLNDTSLPHSCFRIQHYAGKVLYQVEGFVDKNNDLLYRDLSQAMWKASHALIKSLFPEGNPAKINLKRPPTAGSQFKASVATLMKNLQTKNPNYIRCIKPNDKKAAHIFNEALVCHQIRYLGLLENVRVRRAGYAFRQAYEPCLERYKMLCKQTWPHWKGPARSGVEVLFNELEIPVEEYSFGRSKIFIRNPRTLFKLEDLRKQRLEDLATLIQKIYRGWKCRTHFLLMKKSQIVIAAWYRRYAQQKRYQQTKSSALVIQSYIRGWKARKILRELKHQKRCKEAVTTIAAYWHGTQVRREYRKFFRANAGKKIYEFTLQRIVQKYFLEMKNKMPSLSPIDKNWPSRPYLFLDSTHKELKRIFHLWRCKKYRDQFTDQQKLIYEEKLEASELFKDKKALYPSSVGRPFQGAYLEINKNPKYKKLKDAIEEKIIIAEVVNKINRANGKSTSRIFLLTNNNLLLADQKSGQIKSEVPLVDVTKVSMSSQNDGFFAVHLKEGSEAASKGDFLFSSDHLIEMATKLYRTTLSQTKQKLNIEISDEYVHVLFENPFSLSAFLF

SEQ ID NO: 874013 - protein, 908 aa, Homo sapiens
KNRGQYACHVLCGSWLWKRSKVNQVRTALQSNPVLEAFGNAKTVRNDNSSRFGKYMDIEFDFKGDPLGGVISNYLLEKSRVVKQPRGERNFHVFYQLLSGASEELLNKLKLERDFSRYNYLSLDSAKVNGVDDAANFRTVRNAMQIVGFMDHEAESVLAVVAAVLKLGNIEFKPESRVNGLDESKIKDKNELKEICELTGIDQSVLERAFSFRTVEAKQEKVSTTLNVAQAYYARDALAKNLYSRLFSWLVNRINESIKAQTKVRKKVMGVLDIYGFEIFEDNSFEQFIINYCNEKLQQIFIELTLKEEQEEYIREDIEWTHIDYFNNAIICDLIENNTNGILAMLDEECLRPGTVTDETFLEKLNQVCATHQHFESRMSKCSRFLNDTSLPHSCFRIQHYAGKVLYQVEGFVDKNNDLLYRDLSQAMWKASHALIKSLFPEGNPAKINLKRPPTAGSQFKASVATLMKNLQTKNPNYIRCIKPNDKKAAHIFNEALVCHQIRYLGLLENVRVRRAGYAFRQAYEPCLERYKMLCKQTWPHWKGPARSGVEVLFNELEIPVEEYSFGRSKIFIRNPRTLFKLEDLRKQRLEDLATLIQKIYRGWKCRTHFLLMKKSQIVIAAWYRRYAQQKRYQQTKSSALVIQSYIRGWKARKILRELKHQKRCKEAVTTIAAYWHGTQVRREYRKFFRANAGKKIYEFTLQRIVQKYFLEMKNKMPSLSPIDKNWPSRPYLFLDSTHKELKRIFHLWRCKKYRDQFTDQQKLIYEEKLEASELFKDKKALYPSSVGRPFQGAYLEINKNPKYKKLKDAIEEKIIIAEVVNKINRANGKSTSRIFLLTNNNLLLADQKSGQIKSEVPLVDVTKVSMSSQNDGFFAVHLKEVPGTVQTGQSMCEVYSGKPEKWECPNM

SEQ ID NO: 874014 - protein, 937 aa, Homo sapiens
KNRGQYACHVLCGSWLWKRSKVNQVRTALQSNPVLEAFGNAKTVRNDNSSRFGKYMDIEFDFKGDPLGGVISNYLLEKSRVVKQPRGERNFHVFYQLLSGASEELLNKLKLERDFSRYNYLSLDSAKVNGVDDAANFRTVRNAMQIVGFMDHEAESVLAVVAAVLKLGNIEFKPESRVNGLDESKIKDKNELKEICELTGIDQSVLERAFSFRTVEAKQEKVSTTLNVAQAYYARDALAKNLYSRLFSWLVNRINESIKAQTKVRKKVMGVLDIYGFEIFEDNSFEQFIINYCNEKLQQIFIELTLKEEQEEYIREDIEWTHIDYFNNAIICDLIENNTNGILAMLDEECLRPGTVTDETFLEKLNQVCATHQHFESRMSKCSRFLNDTSLPHSCFRIQHYAGKVLYQVEGFVDKNNDLLYRDLSQAMWKASHALIKSLFPEGNPAKINLKRPPTAGSQFKASVATLMKNLQTKNPNYIRCIKPNDKKAAHIFNEALVCHQIRYLGLLENVRVRRAGYAFRQAYEPCLERYKMLCKQTWPHWKGPARSGVEVLFNELEIPVEEYSFGRSKIFIRNPRTLFKLEDLRKQRLEDLATLIQKIYRGWKCRTHFLLMKKSQIVIAAWYRRYAQQKRYQQTKSSALVIQSYIRGWKARKILRELKHQKRCKEAVTTIAAYWHGTQVRREYRKFFRANAGKKIYEFTLQRIVQKYFLEMKNKMPSLSPIDKNWPSRPYLFLDSTHKELKRIFHLWRCKKYRDQFTDQQKLIYEEKLEASELFKDKKALYPSSVGRPFQGAYLEINKNPKYKKLKDAIEEKIIIAEVVNKINRANGKSTSRIFLLTNNNLLLADQKSGQIKSEVPLVDVTKVSMSSQNDGFFAVHLKEGSEAASKGDFLFSSDHLIEMVANPRIGDHFNKQFSQGKSLQLIIQFIFRAKLMGSY

SEQ ID NO: 874015 - protein, 167 aa, Homo sapiens
GLATISISTINLPSTLIVFTILILLTILEMVANPAVGRPFQGAYLEINKNPKYKKLKDAIEEKIIIAEVVNKINRANGKSTSRIFLLTNNNLLLADQKSGQIKSEVPLVDVTKVSMSSQNDGFFAVHLKEGSEAASKGDFLFSSDHLIEMVANPRIGDHFKLFNWQY

SEQ ID NO: 874016 - protein, 867 aa, Homo sapiens
KNRGQYACHVLCGSWLWKRSKVNQVRTALQSNPVLEAFGNAKTVRNDNSSRFGKYMDIEFDFKGDPLGGVISNYLLEKSRVVKQPRGERNFHVFYQLLSGASEELLNKLKLERDFSRYNYLSLDSAKVNGVDDAANFRTVRNAMQIVGFMDHEAESVLAVVAAVLKLGNIEFKPESRVNGLDESKIKDKNELKEICELTGIDQSVLERAFSFRTVEAKQEKVSTTLNVAQAYYARDALAKNLYSRLFSWLVNRINESIKAQTKVRKKVMGVLDIYGFEIFEDNSFEQFIINYCNEKLQQIFIELTLKEEQEEYIREDIEWTHIDYFNNAIICDLIENNTNGILAMLDEECLRPGTVTDETFLEKLNQVCATHQHFESRMSKCSRFLNDTSLPHSCFRIQHYAGKVLYQVEGFVDKNNDLLYRDLSQAMWKASHALIKSLFPEGNPAKINLKRPPTAGSQFKASVATLMKNLQTKNPNYIRCIKPNDKKAAHIFNEALVCHQIRYLGLLENVRVRRAGYAFRQAYEPCLERYKMLCKQTWPHWKGPARSGVEVLFNELEIPVEEYSFGRSKIFIRNPRTLFKLEDLRKQRLEDLATLIQKIYRGWKCRTHFLLMKKSQIVIAAWYRRYAQQKRYQQTKSSALVIQSYIRGWKARKILRELKHQKRCKEAVTTIAAYWHGTQVRREYRKFFRANAGKKIYEFTLQRIVQKYFLEMKNKMPSLSPIDKNWPSRPYLFLDSTHKELKRIFHLWRCKKYRDQFTDQQKLIYEEKLEASELFKDKKALYPSSVGRPFQGAYLEINKNPKYKKLKDAIEEKIIIAEVVNKINRANGKCRREPPRPACSVEFKLVHIEVRIEFIQRFSCLIVSSP

SEQ ID NO: 874017 - protein, 857 aa, Homo sapiens
KNRGQYACHVLCGSWLWKRSKVNQVRTALQSNPVLEAFGNAKTVRNDNSSRFGKYMDIEFDFKGDPLGGVISNYLLEKSRVVKQPRGERNFHVFYQLLSGASEELLNKLKLERDFSRYNYLSLDSAKVNGVDDAANFRTVRNAMQIVGFMDHEAESVLAVVAAVLKLGNIEFKPESRVNGLDESKIKDKNELKEICELTGIDQSVLERAFSFRTVEAKQEKVSTTLNVAQAYYARDALAKNLYSRLFSWLVNRINESIKAQTKVRKKVMGVLDIYGFEIFEDNSFEQFIINYCNEKLQQIFIELTLKEEQEEYIREDIEWTHIDYFNNAIICDLIENNTNGILAMLDEECLRPGTVTDETFLEKLNQVCATHQHFESRMSKCSRFLNDTSLPHSCFRIQHYAGKVLYQVEGFVDKNNDLLYRDLSQAMWKASHALIKSLFPEGNPAKINLKRPPTAGSQFKASVATLMKNLQTKNPNYIRCIKPNDKKAAHIFNEALVCHQIRYLGLLENVRVRRAGYAFRQAYEPCLERYKMLCKQTWPHWKGPARSGVEVLFNELEIPVEEYSFGRSKIFIRNPRTLFKLEDLRKQRLEDLATLIQKIYRGWKCRTHFLLMKKSQIVIAAWYRRYAQQKRYQQTKSSALVIQSYIRGWKARKILRELKHQKRCKEAVTTIAAYWHGTQVRREYRKFFRANAGKKIYEFTLQRIVQKYFLEMKNKMPSLSPIDKNWPSRPYLFLDSTHKELKRIFHLWRCKKYRDQFTDQQKLIYEEKLEASELFKDKKALYPSSVGRPFQGAYLEINKNPKYKKLKDAIEEKIIIAEVCRREPPRPACSVEFKLVHIEVRIEFIQRFSCLIVSSP

SEQ ID NO: 874018 - protein, 520 aa, Homo sapiens
KNRGQYACHVLCGSWLWKRSKVNQVRTALQSNPVLEAFGNAKTVRNDNSSRFGKYMDIEFDFKGDPLGGVISNYLLEKSRVVKQPRGERNFHVFYQLLSGASEELLNKLKLERDFSRYNYLSLDSAKVNGVDDAANFRTVRNAMQIVGFMDHEAESVLAVVAAVLKLGNIEFKPESRVNGLDESKIKDKNELKEICELTGIDQSVLERAFSFRTVEAKQEKVSTTLNVAQAYYARDALAKNLYSRLFSWLVNRINESIKAQTKVRKKVMGVLDIYGFEIFEDNSFEQFIINYCNEKLQQIFIELTLKEEQEEYIREDIEWTHIDYFNNAIICDLIENNTNGILAMLDEECLRPGTVTDETFLEKLNQVCATHQHFESRMSKCSRFLNDTSLPHSCFRIQHYAGKVLYQVEGFVDKNNDLLYRDLSQAMWKASHALIKSLFPEGNPAKINLKRPPTAGSQFKASVATLMKNLQTKNPNYIRCINPMIAFGGPSMLRQANALSRLMTWLEGSNAWKPWLIVA

SEQ ID NO: 874019 - protein, 269 aa, Homo sapiens
KNRGQYACHVLCGSWLWKRSKVNQVRTALQSNPVLEAFGNAKTVRNDNSSRFGKYMDIEFDFKGDPLGGVISNYLLEKSRVVKQPRGERNFHVFYQLLSGASEELLNKLKLERDFSRYNYLSLDSAKVNGVDDAANFRTVRNAMQIVGFMDHEAESVLAVVAAVLKLGNIEFKPESRVNGLDESKIKDKNELKEICELTGIDQSVLERAFSFRTVEAKQEKVSTTLNVAQAYYARDALAKNLYSRLFSWLVNRINESIKVLNFYEQNQL

SEQ ID NO: 874020 - protein, 269 aa, Homo sapiens; identical to SEQ ID NO: 874019

SEQ ID NO: 874021 - protein, 964 aa, Homo sapiens; identical to SEQ ID NO: 874009

SEQ ID NO: 874022 - protein, 964 aa, Homo sapiens; identical to SEQ ID NO: 874009

SEQ ID NO: 874023 - protein, 716 aa, Homo sapiens
MCGISHGLRCLSVIVLRELVAWFIKLFFIFSIQDNSFEQFIINYCNEKLQQIFIELTLKEEQEEYIREDIEWTHIDYFNNAIICDLIENNTNGILAMLDEECLRPGTVTDETFLEKLNQVCATHQHFESRMSKCSRFLNDTSLPHSCFRIQHYAGKVLYQVEGFVDKNNDLLYRDLSQAMWKASHALIKSLFPEGNPAKINLKRPPTAGSQFKASVATLMKNLQTKNPNYIRCIKPNDKKAAHIFNEALVCHQIRYLGLLENVRVRRAGYAFRQAYEPCLERYKMLCKQTWPHWKGPARSGVEVLFNELEIPVEEYSFGRSKIFIRNPRTLFKLEDLRKQRLEDLATLIQKIYRGWKCRTHFLLMKKSQIVIAAWYRRYAQQKRYQQTKSSALVIQSYIRGWKARKILRELKHQKRCKEAVTTIAAYWHGTQVRREYRKFFRANAGKKIYEFTLQRIVQKYFLEMKNKMPSLSPIDKNWPSRPYLFLDSTHKELKRIFHLWRCKKYRDQFTDQQKLIYEEKLEASELFKDKKALYPSSVGRPFQGAYLEINKNPKYKKLKDAIEEKIIIAEVVNKINRANGKSTSRIFLLTNNNLLLADQKSGQIKSEVPLVDVTKVSMSSQNDGFFAVHLKEGSEAASKGDFLFSSDHLIEMATKLYRTTLSQTKQKLNIEISDEFLVQFRQDKVCVKFIQGNQKNGSVPTCKRKNNRLLEVAVP

SEQ ID NO: 874024 - protein, 964 aa, Homo sapiens; identical to SEQ ID NO: 874009

SEQ ID NO: 874025 - protein, 381 aa, Homo sapiens
MKKSQIVIAAWYRRYAQQKRYQQTKSSALVIQSYIRGWKARKILRELKHQKRCKEAVTTIAAYWHGTQARRELKRLKEEARRKHAVAVIWAYWLGLKVRREYRKFFRANAGKKIYEFTLQRIVQKYFLEMKNKMPSLSPIDKNWPSRPYLFLDSTHKELKRIFHLWRCKKYRDQFTDQQKLIYEEKLEASELFKDKKALYPSSVGRPFQGAYLEINKNPKYKKLKDAIEEKIIIAEVVNKINRANGKSTSRIFLLTNNNLLLADQKSGQIKSEVPLVDVTKVSMSSQNDGFFAVHLKEGSEAASKGDFLFSSDHLIEMATKLYRTTLSQTKQKLNIEISDEFLVQFRQDKVCVKFIQGNQKNGSVPTCKRKNNRLLEVAVP

SEQ ID NO: 874026 - protein, 218 aa, Homo sapiens
MISLCKKYRDQFTDQQKLIYEEKLEASELFKDKKALYPSSVGRPFQGAYLEINKNPKYKKLKDAIEEKIIIAEVVNKINRANGKSTSRIFLLTNNNLLLADQKSGQIKSEVPLVDVTKVSMSSQNDGFFAVHLKEGSEAASKGDFLFSSDHLIEMATKLYRTTLSQTKQKLNIEISDEFLVQFRQDKVCVKFIQGNQKNGSVPTCKRKNNRLLEVAVP

SEQ ID NO: 874027 - protein, 944 aa, Homo sapiens
KNRGQYACHVLCGSWLWKRSKVNQVRTALQSNPVLEAFGNAKTVRNDNSSRFGKYMDIEFDFKGDPLGGVISNYLLEKSRVVKQPRGERNFHVFYQLLSGASEELLNKLKLERDFSRYNYLSLDSAKVNGVDDAANFRTVRNAMQIVGFMDHEAESVLAVVAAVLKLGNIEFKPESRVNGLDESKIKDKNELKEICELTGIDQSVLERAFSFRTVEAKQEKVSTTLNVAQAYYARDALAKNLYSRLFSWLVNRINESIKAQTKVRKKVMGVLDIYGFEIFEDNSFEQFIINYCNEKLQQIFIELTLKEEQEEYIREDIEWTHIDYFNNAIICDLIENNTNGILAMLDEECLRPGTVTDETFLEKLNQVCATHQHFESRMSKCSRFLNDTSLPHSCFRIQHYAGKVLYQVEGFVDKNNDLLYRDLSQAMWKASHALIKSLFPEGNPAKINLKRPPTAGSQFKASVATLMKNLQTKNPNYIRCIKPNDKKAAHIFNEALVCHQIRYLGLLENVRVRRAGYAFRQAYEPCLERYKMLCKQTWPHWKGPARSGVEVLFNELEIPVEEYSFGRSKIFIRNPRTLFKLEDLRKQRLEDLATLIQKIYRGWKCRTHFLLMKKSQIVIAAWYRRYAQQKRYQQTKSSALVIQSYIRGWKARKILRELKHQKRCKEAVTTIAAYWHGTQVRREYRKFFRANAGKKIYEFTLQRIVQKYFLEMKNKMPSLSPIDKNWPSRPYLFLDSTHKELKRIFHLWRCKKYRDQFTDQQKLIYEEKLEASELFKDKKALYPSSVGRPFQGAYLEINKNPKYKKLKDAIEEKIIIAEVVNKINRANGKSTSRIFLLTNNNLLLADQKSGQIKSEVPLVDVTKVSMSSQNDGFFAVHLKEGSEAASKGDFLFSSDHLIEMATKLYRTTLSQTKQKLNIEISDEFLVQFRQDKVCVNIIRNPVV

SEQ ID NO: 874028 - protein, 954 aa, Homo sapiens
KNRGQYACHVLCGSWLWKRSKVNQVRTALQSNPVLEAFGNAKTVRNDNSSRFGKYMDIEFDFKGDPLGGVISNYLLEKSRVVKQPRGERNFHVFYQLLSGASEELLNKLKLERDFSRYNYLSLDSAKVNGVDDAANFRTVRNAMQIVGFMDHEAESVLAVVAAVLKLGNIEFKPESRVNGLDESKIKDKNELKEICELTGIDQSVLERAFSFRTVEAKQEKVSTTLNVAQAYYARDALAKNLYSRLFSWLVNRINESIKAQTKVRKKVMGVLDIYGFEIFEDNSFEQFIINYCNEKLQQIFIELTLKEEQEEYIREDIEWTHIDYFNNAIICDLIENNTNGILAMLDEECLRPGTVTDETFLEKLNQVCATHQHFESRMSKCSRFLNDTSLPHSCFRIQHYAGKVLYQVEGFVDKNNDLLYRDLSQAMWKASHALIKSLFPEGNPAKINLKRPPTAGSQFKASVATLMKNLQTKNPNYIRCIKPNDKKAAHIFNEALVCHQIRYLGLLENVRVRRAGYAFRQAYEPCLERYKMLCKQTWPHWKGPARSGVEVLFNELEIPVEEYSFGRSKIFIRNPRTLFKLEDLRKQRLEDLATLIQKIYRGWKCRTHFLLMKKSQIVIAAWYRRYAQQKRYQQTKSSALVIQSYIRGWKARKILRELKHQKRCKEAVTTIAAYWHGTQVRREYRKFFRANAGKKIYEFTLQRIVQKYFLEMKNKMPSLSPIDKNWPSRPYLFLDSTHKELKRIFHLWRCKKYRDQFTDQQKLIYEEKLEASELFKDKKALYPSSVGRPFQGAYLEINKNPKYKKLKDAIEEKIIIAEVVNKINRANGKSTSRIFLLTNNNLLLADQKSGQIKSEVPLVDVTKVSMSSQNDGFFAVHLKEGSEAASKGDFLFSSDHLIEMVANPRIGDHFKLFNWQYLEPYCSDLILNTILYLLSEELVFTLFHNFINECKMM

SEQ ID NO: 874029 - protein, 98 aa, Homo sapiens
WGLEGALQAMNVGKEGSEAASKGDFLFSSDHLIEMATKLYRTTLSQTKQKLNIEISDEFLVQFRQDKVCVKFIQGNQKNGSVPTCKRKNNRLLEVAVP

SEQ ID NO: 874030 - protein, 269 aa, Homo sapiens; identical to SEQ ID NO: 874019

SEQ ID NO: 874031 - protein, 684 aa, Homo sapiens
KNRGQYACHVLCGSWLWKRSKVNQVRTALQSNPVLEAFGNAKTVRNDNSSRFGKYMDIEFDFKGDPLGGVISNYLLEKSRVVKQPRGERNFHVFYQLLSGASEELLNKLKLERDFSRYNYLSLDSAKVNGVDDAANFRTVRNAMQIVGFMDHEAESVLAVVAAVLKLGNIEFKPESRVNGLDESKIKDKNELKEICELTGIDQSVLERAFSFRTVEAKQEKVSTTLNVAQAYYARDALAKNLYSRLFSWLVNRINESIKAQTKVRKKVMGVLDIYGFEIFEDNSFEQFIINYCNEKLQQIFIELTLKEEQEEYIREDIEWTHIDYFNNAIICDLIENNTNGILAMLDEECLRPGTVTDETFLEKLNQVCATHQHFESRMSKCSRFLNDTSLPHSCFRIQHYAGKVLYQVEGFVDKNNDLLYRDLSQAMWKASHALIKSLFPEGNPAKINLKRPPTAGSQFKASVATLMKNLQTKNPNYIRCIKPNDKKAAHIFNEALVCHQIRYLGLLENVRVRRAGYAFRQAYEPCLERYKMLCKQTWPHWKGPARSGVEVLFNELEIPVEEYSFGRSKIFIRNPRTLFKLEDLRKQRLEDLATLIQKIYRGWKCRTHFLLMKKSQIVIAAWYRRYAQQKRYQQTKSSALVIQSYIRGWKARKILRELKHQKRCKEAVTTIAAYWHGTQHEGN

SEQ ID NO: 874032 - protein, 501 aa, Homo sapiens
  misc_feature (476)..(476): Xaa can be any naturally occurring amino acid
  misc_feature (484)..(484): Xaa can be any naturally occurring amino acid
  misc_feature (486)..(486): Xaa can be any naturally occurring amino acid
  misc_feature (491)..(491): Xaa can be any naturally occurring amino acid
  misc_feature (493)..(493): Xaa can be any naturally occurring amino acid
GKIEDSTLVMSYVAAGCGKGAKLIKKEQLLQSNPVLEAFGNAKTVRNDNSSRFGKYMDIEFDFKGDPLGGVISNYLLEKSRVVKQPRGERNFHVFYQLLSGASEELLNKLKLERDFSRYNYLSLDSAKVNGVDDAANFRTVRNAMQIVGFMDHEAESVLAVVAAVLKLGNIEFKPESRVNGLDESKIKDKNELKEICELTGIDQSVLERAFSFRTVEAKQEKVSTTLNVAQAYYARDALAKNLYSRLFSWLVNRINESIKAQTKVRKKVMGVLDIYGFEIFEDNSFEQFIINYCNEKLQQIFIELTLKEEQEEYIREDIEWTHIDYFNNAIICDLIENNTNGILAMLDEECLRPGTVTDETFLEKLNQVCATHQHFESRMSKCSRFLNDTSLPHSCFRIQHYAGKVLYQVEGFVDKNNDLLYRDLSQAMWKASHALIKSLFPEGNPAKINLKRPPTAGSQFKASVATLMSRHISTXSSVHSGPXLXRTSIXGXYASAAMTC

SEQ ID NO: 874033 - protein, 269 aa, Homo sapiens; identical to SEQ ID NO: 874019

SEQ ID NO: 874034 - protein, 84 aa, Homo sapiens
FIKKRNLFLTVLQAGKPKVEGLPLVTYGEDLVLFPNTARNHAKRKMLQHSLAVDQAAHREQVHSWGLTPPFREAWLHLHSLVAS

SEQ ID NO: 874035 - protein, 2989 aa, Homo sapiens
WFSGGAGPRCGPGPWPPPMRGAVPARGEPQQDCCVKTELLGEETPMAADEGSAEKQAGEAHMAADGETNGSCENSDASSHANAAKHTQDSARVNPQDGTNTLTRIAENGVSERDSEAAKQNHVTADDFVQTSVIGSNGYILNKPALQAQPLRTTSTLASSLPGHAAKTLPGGAGKGRTPSAFPQTPAAPPATLGEGSADTEDRKLPAPGADVKVHRARKTMPKSVVGLHAASKDPREVREARDHKEPKEEINKNISDFGRQQLLPPFPSLHQSLPQNQCYMATTKSQTAAAVSRKKKRRMGTYSLVPKKKTKVLKQRTVIEMFKSITHSTVGSKGEKDLGASSLHVNGESLEMDSDEDDSEELEEDDGHGAEQAAAFPTEDSRTSKESMSEADRAQKMDGESEEEQESVDTGEEEEGGDESDLSSESSIKKKFLKRKGKTDSPWIKPARKRRRRSRKKPSGALGSESYKSSAGSAEQTAPGDSTGYMEVSLDSLDLRVKGILSSQAEGLANGPDVLETDGLQEVPLCSCRMETPKSREITTLANNQCMATESVDHELGRCTNSVVKYELMRPSNKAPLLVLCEDHRGRMVKHQCCPGCGYFCTAGNFMECQPESSISHRFHKDCASRVNNASYCPHCGEESSKAKEVTIAKADTTSTVTPVPGQEKGSALEGRADTTTGSAAGPPLSEDDKLQGAASHVPEGFDPTGPAGLGRPTPGLSQGPGKETLESALIALDSEKPKKLRFHPKQLYFSARQGELQKVLLMLVDGIDPNFKMEHQNKRSPLHAAAEAGHVDICHMLVQAGANIDTCSEDQRTPLMEAAENNHLEAVKYLIKAGALVDPKDAEGSTCLHLAAKKGHYEVVQYLLSNGQMDVNCQDDGGWTPMIWATEYKHVDLVKLLLSKGSDINIRDNEENICLHWAAFSGCVDIAEILLAAKCDLHAVNIHGDSPLHIAARENRYDCVVLFLSRDSDVTLKNKEGETPLQCASLNSQVWSALQMSKALQDSAPDRPSPVERIVSRDIARGYERIPIPCVNAVDSEPCPSNYKYVSQNCVTSPMNIDRNITHLQYCVCIDDCSSSNCMCGQLSMRCWYDKDGRLLPEFNMAEPPLIFECNHACSCWRNCRNRVVQNGLRARLQLYRTRDMGWGVRSLQDIPPGTFVCEYVGELISDSEADVREEDSYLFDLDNKISSAEQLKTDRCLIASPEEAPWIITDAELRVTLMVEGENVQKQMNPQVWNSGEDSGLSYGSGNSWTEQWFQAGDDFAPGGRLQGLETVWVVTTEGVLWHLVGSGRDVVKHCTVHRTALPNRVPGPYMLMVLGLRGHCWTRGAGEAALESVACEEKREPLRECSVQQHPPIQPRGLAEGWERRWTCRRPHKPVKELGLGGKGERRGQNCALERPLWTQRGGWGEARAAWCCGCLLEWQARPLWAAVREGVIRELEEAGQGNGLDLMGEEKLVTFGMQQTVLMPCHQHHARAGWALTLTECPMNNYVTKSAVCCRKQLTGAGGVGSKKNLPRLLEVKKGRFMRESRKIRCKKAMGNHQERRWQQELKACWGFYRMGLVPERAMCSADNAQVAGSYRVFLSAEDLVITGRRKIVICLHGRAVFLDHEERQTHSFSALSVAFPWSHQSDSFPSLGLRSMDTMKGGRACDRKLSQGGFSDEGQSCPGQAWGDRRTFTFKVLFEHGFNESSQCFEIDNLVSVVYKTFAPPEQHPLYVVIITNYILTHWATSRTYNYCNRQLSLEIARHLQRRCLHAPSSPPGKQPEPLEKGQVLTCQTSQLIPGSQPLFRQWIPILKIGSCPETARECDFLLGQPLSPCPLLTLTCEASPLLATGFTPQGTVLCYHPLLLPPGPSVAACLIFPTGIREPGSVAASPIISTGCRGGTPRLSHPQHRLQMGNPSTLPPSAQAADGEPLDSPTLSTGCRGGTPRLSHPQHRLQTGNPSTLPPSAQAADGEPLDSPTLSTGCSGECLDFLVMLVFSLGLPAHPPPSTPFLPLPAVRELEGFCFTVSWLPLFSRLLRAIPSFPHLLGPEKVPHCSKCFQTLVKLLTLPSRDFSSAPAEAINQFLQLLSCAAPFSLFRLSTLPLPVGLCWDLALAIGLAGRWDSSWGEHLLPGETGDFRNISSTVDVLTFMGQEDLCTSRGSRGLEGPHRYIFGTQIFPRGPLLSTFAELTHRWPFTLVKCLFTSVVEALQSHTELGNSSQDVGMGNQPAVLSLLVWLLPTPSFSGACIIPPATALCSTEIFSQVITHEAPTVCQGPPDLPANQDSSLCTLWVVGRTVPDPLLMPLMLVQVFQDADGIKVEGFGEILLDDEELSVVARACNPSTLRGQGGQITGTQEFEASLGNMVKHRLNKNKQTKISLAWWCVPVVLATWEAGMGGLLESRRWRLQWAEIMPLYCSLGDGNEALSKKEEKILLDDEDYDIVVIIRDEAWRKLRNLEELQNVSSSNFQRGREGTKVDWEGPRSLNNLRKVQESCQGVLEPKKCGLSTNAETDSEHKAEAIGHDIPKLEAYEAHFQGNCNCLKYSNVLCVFFLKERLKVNELIIHPKKQNQPKTRGIKRSTNEIETNMHWRQSNQNWFFGNTNQNGNPLGRWGRGSINKQFKGGPGAVADTCNPSSFGRLRWEDHLSPGVGDQPGQHSKTLSLEENLKTSWTWWHAPVIPATREAEVGGWLEPGRLRLQELRFYHCSPVWVTEQDHVSINKLINKEINKVDTAIDDNIDLKDNMNNFRPIHFKKNITALTLTQEEIENPNSLITLKEIESVIKITNKTSGPVSEFTELSKYKFPIEMLSELIYKASITWISKPDENSAVHSCKKSRQVIGKPDLNVYAKMIMFDLPQEMTGWFNFRKSVYVSHSLNTYEGEKLGHFNAEKAFDRIYHLFVEKLLEIKTRGELCDLMNWYLLNKKKKNRPGAVAHACNPSTVGGQGGQITLRSVVQDQHGKTPSLLKVQKLARCGGTRLESQLLRRLRQENCLNLGGGGGCSELR

SEQ ID NO: 874036 - protein, 3015 aa, Homo sapiens
LELKMLYFSRSHFPRPCGGQVSAGSGLTLLLLLLPALWRGWLEGDGQQAVPARGEPQQDCCVKTELLGEETPMAADEGSAEKQAGEAHMAADGETNGSCENSDASSHANAAKHTQDSARVNPQDGTNTLTRIAENGVSERDSEAAKQNHVTADDFVQTSVIGSNGYILNKPALQAQPLRTTSTLASSLPGHAAKTLPGGAGKGRTPSAFPQTPAAPPATLGEGSADTEDRKLPAPGADVKVHRARKTMPKSVVGLHAASKDPREVREARDHKEPKEEINKNISDFGRQQLLPPFPSLHQSLPQNQCYMATTKSQTAAAVSRKKKRRMGTYSLVPKKKTKVLKQRTVIEMFKSITHSTVGSKGEKDLGASSLHVNGESLEMDSDEDDSEELEEDDGHGAEQAAAFPTEDSRTSKESMSEADRAQKMDGESEEEQESVDTGEEEEGGDESDLSSESSIKKKFLKRKGKTDSPWIKPARKRRRRSRKKPSGALGSESYKSSAGSAEQTAPGDSTGYMEVSLDSLDLRVKGILSSQAEGLANGPDVLETDGLQEVPLCSCRMETPKSREITTLANNQCMATESVDHELGRCTNSVVKYELMRPSNKAPLLVLCEDHRGRMVKHQCCPGCGYFCTAGNFMECQPESSISHRFHKDCASRVNNASYCPHCGEESSKAKEVTIAKADTTSTVTPVPGQEKGSALEGRADTTTGSAAGPPLSEDDKLQGAASHVPEGFDPTGPAGLGRPTPGLSQGPGKETLESALIALDSEKPKKLRFHPKQLYFSARQGELQKVLLMLVDGIDPNFKMEHQNKRSPLHAAAEAGHVDICHMLVQAGANIDTCSEDQRTPLMEAAENNHLEAVKYLIKAGALVDPKDAEGSTCLHLAAKKGHYEVVQYLLSNGQMDVNCQDDGGWTPMIWATEYKHVDLVKLLLSKGSDINIRDNEENICLHWAAFSGCVDIAEILLAAKCDLHAVNIHGDSPLHIAARENRYDCVVLFLSRDSDVTLKNKEGETPLQCASLNSQVWSALQMSKALQDSAPDRPSPVERIVSRDIARGYERIPIPCVNAVDSEPCPSNYKYVSQNCVTSPMNIDRNITHLQYCVCIDDCSSSNCMCGQLSMRCWYDKDGRLLPEFNMAEPPLIFECNHACSCWRNCRNRVVQNGLRARLQLYRTRDMGWGVRSLQDIPPGTFVCEYVGELISDSEADVREEDSYLFDLDNKISSAEQLKLTLPDRIPKEAPWIITDAELRVTLMVEGENVQKQMNPQVWNSGEDSGLSYGSGNSWTEQWFQAGDDFAPGGRLQGLETVWVVTTEGVLWHLVGSGRDVVKHCTVHRTALPNRVPGPYMLMVLGLRGHCWTRGAGEAALESVACEEKREPLRECSVQQHPPIQPRGLAEGWERRWTCRRPHKPVKELGLGGKGERRGQNCALERPLWTQRGGWGEARAAWCCGCLLEWQARPLWAAVREGVIRELEEAGQGNGLDLMGEEKLVTFGMQQTVLMPCHQHHARAGWALTLTECPMNNYVTKSAVCCRYQLTGAGGVGSKKNLPRLLEVKKGRFMRESRKIRCKKAMGNHQERRWQQELKACWGFYRMGLVPERAMCSADNAQVAGSYRVFLSAEDLVITGRRKIVICLHGRAVCPGHEERQTHSFSALSVAFPWSHQSDSFPSLGLRSMDTMKGGRACDRKLSQGGFSDEGQSCPGQAWGDRRTFTFKVLFEHGFNESSQCFEIDNLVSVVYKTFAPPEQHPLYVVIITNYILTHWATSRTYNYCNRQLSLEIARHLQRRCLHAPSSPPGKQPEPLEKGQVLTCQTSQLIPGSQPLFRQWIPILKIGSCPETARECDFLLGQPLSPCPLLTLTCEASPLLATGFTPQGTVLCYHPLLLPPGPSVAACLIFPTGIREPGSVAASPIISTGCRGGTPRLSHPQHRLQMGNPSTLPPSAQAADGEPLDSPTLSTGCRGGTPRLSHPQHRLQTGNPSTLPPSAQAADGEPLDSPTLSTGCSGECLDFLVMLVFSLGLPAHPPPSTPFLPLPAVRELEGFCFTVSWLPLFSRLLRAIPSFPHLLGPEKVPHCSKCFQTLGKLLTLPSRDFSSAPAEAINQFLQLLSCAAPFSLFRLSTLPLPVGLCWDLALAIGLAGRWDSSWGEHLLPGETGDFRNISSTVDVLTFMGQEDLCTSRGSRGLEGPHRYIFGTQIFPRGPLLSTFAELTHRWPFTLVKCLFTSVVEALQSHTELGNSSQDVGMGNQPAVLSLLVWLLPTPSFSGACIIPPATALCSTEIFSQVITHEAPTVCQGPPDLPANQDSSLCTLWVVGRTVPDPLLMPLMLVQVFQDADGIKVEGFGEILLDDEELSVVARACNPSTLRGQGGQITGTQEFEASLGNMVKHRLNKNKQTKISLAWWCVPVVLATWEAGMGGLLESRRWRLQWAEIMPLYCSLGDGNEALSKKEEKILLDDEDYDIVVIIRDEAWRKLRNLEELQNVSSSNFQRGREGTKVDWEGPRSLNNLRKVQESCQGVLEPKKCGLSTNAETDSEQQELRPLVMTFPELEAYEAHFQGNCNCLKYSNVLCVFFLKERLKVNELIIHPKKQNQPKTRGIKRSTNEIETNMHWRQSNQNWFFGNTNQNGNPLGRWGRGSINKQFKGGPGAVADTCNPSSFGRLRWEDHLSPGVGDQPGQHSKTLSLEENLKTSWTWWHAPVIPATREAEVGGWLEPGRLRLQELRFYHCSPVWVTEQDHVSINKEINKEINKVDTAIDDNIDLKDNMNNFRPIHFKKNITALTLTQEEIENPNSLITLKEIESVIKITNKTSGPVSESTELSKYKFPIEMLSNSFTRLAEPGYPNLMRIVQCTAAKSLDKLLVNQICIVRKDDYVGFTPGMTGWFNFRKSVYVSHSLNTYEGEKLGHFNAEKAFDRIYHLFVEKLLEIKTRGELCDLMNWYLLNKKKKNRPGAVAHACNPSTVGGQGGQITLRSVVQDQHGKTPSLLKVQKLARCGGTRLESQLLRRLRQENCLNLGGGGGCSELR

SEQ ID NO: 874037 - protein, 2943 aa, Homo sapiens
MAADEGSAEKQAGEAHMAADGETNGSCENSDASSHANAAKHTQDSARVNPQDGTNTLTRIAENGVSERDSEAAKQNHVTADDFVQTSVIGSNGYILNKPALQAQPLRTTSTLASSLPGHAAKTLPGGAGKGRTPSAFPQTPAAPPATLGEGSADTEDRKLPAPGADVKVHRARKTMPKSVVGLHAASKDPREVREARDHKEPKEEINKNISDFGRQQLLPPFPSLHQSLPQNQCYMATTKSQTAAAVSRKKKRRMGTYSLVPKKKTKVLKQRTVIEMFKSITHSTVGSKGEKDLGASSLHVNGESLEMDSDEDDSEELEEDDGHGAEQAAAFPTEDSRTSKESMSEADRAQKMDGESEEEQESVDTGEEEEGGDESDLSSESSIKKKFLKRKGKTDSPWIKPARKRRRRSRKKPSGALGSESYKSSAGSAEQTAPGDSTGYMEVSLDSLDLRVKGILSSQAEGLANGPDVLETDGLQEVPLCSCRMETPKSREITTLANNQCMATESVDHELGRCTNSVVKYELMRPSNKAPLLVLCEDHRGRMVKHQCCPGCGYFCTAGNFMECQPESSISHRFHKDCASRVNNASYCPHCGEESSKAKEVTIAKADTTSTVTPVPGQEKGSALEGRADTTTGSAAGPPLSEDDKLQGAASHVPEGFDPTGPAGLGRPTPGLSQGPGKETLESALIALDSEKPKKLRFHPKQLYFSARQGELQKVLLMLVDGIDPNFKMEHQNKRSPLHAAAEAGHVDICHMLVQAGANIDTCSEDQRTPLMEAAENNHLEAVKYLIKAGALVDPKDAEGSTCLHLAAKKGHYEVVQYLLSNGQMDVNCQDDGGWTPMIWATEYKHVDLVKLLLSKGSDINIRDNEENICLHWAAFSGCVDIAEILLAAKCDLHAVNIHGDSPLHIAARENRYDCVVLFLSRDSDVTLKNKEGETPLQCASLNSQVWSALQMSKALQDSAPDRPSPVERIVSRDIARGYERIPIPCVNAVDSEPCPSNYKYVSQNCVTSPMNIDRNITHLQYCVCIDDCSSSNCMCGQLSMRCWYDKDGRLLPEFNMAEPPLIFECNHACSCWRNCRNRVVQNGLRARLQLYRTRDMGWGVRSLQDIPPGTFVCEYVGELISDSEADVREEDSYLFDLDNKISSAEQLKLTLPDRIPKEAPWIITDAELRVTLMVEGENVQKQMNPQVWNSGEDSGLSYGSGNSWTEQWFQAGDDFAPGGRLQGLETVWVVTTEGVLWHLVGSGRDVVKHCTVHRTALPNRVPGPYMLMVLGLRGHCWTRGAGEAALESVACEEKREPLRECSVQQHPPIQPRGLAEGWERRWTCRRPHKPVKELGLGGKGERRGQNCALERPLWTQRGGWGEARAAWCCGCLLEWQARPLWAAVREGVIRELEEAGQGNGLDLMGEEKLVTFGMQQTVLMPCHQHHARAGWALTLTECPMNNYVTKSAVCCRKQLTGAGGVGSKKNLPRLLEVKKGRFMRESRKIRCKKAMGNHQERRWQQELKACWGFYRMGLVPERAMCSADNAQVAGSYRVFLSAEDLVITGRRKIVICLHGRAVFLDHEERQTHSFSALSVAFPWSHQSDSFPSLGLRSMDTMKGGRACDRKLSQGGFSDEGQSCPGQAWGDRRTFTFKVLFEHGFNESSQCFEIDNLVSVVYKTFAPPEQHPLYVVIITNYILTHWATSRTYNYCNRQLSLEIARHLQRRCLHAPSSPPGKQPEPLEKGQVLTCQTSQLIPGSQPLFRQWIPILKIGSCPETARECDFLLGQPLSPCPLLTLTCEASPLLATGFTPQGTVLCYHPLLLPPGPSVAACLIFPTGIREPGSVAASPIISTGCRGGTPRLSHPQHRLQMGNPSTLPPSAQAADGEPLDSPTLSTGCRGGTPRLSHPQHRLQTGNPSTLPPSAQAADGEPLDSPTLSTGCSGECLDFLVMLVFSLGLPAHPPPSTPFLPLPAVRELEGFCFTVSWLPLFSRLLRAIPSFPHLLGPEKVPHCSKCFQTLVKLLTLPSRDFSSAPAEAINQFLQLLSCAAPFSLFRLSTLPLPVGLCWDLALAIGLAGRWDSSWGEHLLPGETGDFRNISSTVDVLTFMGQEDLCTSRGSRGLEGPHRYIFGTQIFPRGPLLSTFAELTHRWPFTLVKCLFTSVVEALQSHTELGNSSQDVGMGNQPAVLSLLVWLLPTPSFSGACIIPPATALCSTEIFSQVITHEAPTVCQGPPDLPANQDSSLCTLWVVGRTVPDPLLMPLMLVQVFQDADGIKVEGFGEILLDDEELSVVARACNPSTLRGQGGQITGTQEFEASLGNMVKHRLNKNKQTKISLAWWCVPVVLATWEAGMGGLLESRRWRLQWAEIMPLYCSLGDGNEALSKKEEKILLDDEDYDIVVIIRDEAWRKLRNLEELQNVSSSNFQRGREGTKVDWEGPRSLNNLRKVQESCQGVLEPKKCGLSTNAETDSEQQELRPLVMTFPELEAYEAHFQGNCNCLKYSNVLCVFFLKERLKVNYLIIHPKKQNQPKTRGIKRSTNEIETNMHWRQSNQNWFFGNTNQNGNPLGRWGRGSINKQFKGGPGAVADTCNPSSFGRLRWEDHLSPGVGDQPGQHSKTLSLEENLKTSWTWWHAPVIPATREAEVGGWLEPGRLRLQELRFYHCSPVWVTEQDHVSINKEINKEINKVDTAIDDNIDLKDNMNNFRPIHFKKNITALTLTQEEIENPNSLITLKEIESVIKITNKTSGPVSESTELSKYKFPIEMLSNSFTRLAEPGYPNLMRIVQCTAAKSLDKLLVNQICIVRKDDYVGFTPGMTGWFNFRKSVYVSHSLNTYEGEKLGHFNAEKAFDRIYHLFVEKLLEIKTRGELCDLMNWYLLNKKKKNRPGAVAHACNPSTVGGQGGQITLRSVVQDQHGKTPSLLKVQKLARCGGTRLESQLLRRLRQENCLNLGGGGGCSELR

SEQ ID NO: 874038 - protein, 2924 aa, Homo sapiens
PAPPDGVGSADTEDRKLPAPGADVKVHRARKTMPKSVVGLHAASKDPREDSEAAKQNHVTADDFVQTSVIGSNGYILNKPALQAQPLRTTSTLASSLPGHAAKTLPGGAGKGRTPSAFPQTPAAPPATLGEGSADTEDRKLPAPGADVKVHRARKTMPKSVVGLHAASKDPREVREARDHKEPKEEINKNISDFGRQQLLPPFPSLHQSLPQNQCYMATTKSQTAAAVSRKKKRRMGTYSLVPKKKTKVLKQRTVIEMFKSITHSTVGSKGEKDLGASSLHVNGESLEMDSDEDDSEELEEDDGHGAEQAAAFPTEDSRTSKESMSEADRAQKMDGESEEEQESVDTGEEEEGGDESDLSSESSIKKKFLKRKGKTDSPWIKPARKRRRRSRKKPSGALGSESYKSSAGSAEQTAPGDSTGYMEVSLDSLDLRVKGILSSQAEGLANGPDVLETDGLQEVPLCSCRMETPKSREITTLANNQCMATESVDHELGRCTNSVVKYELMRPSNKAPLLVLCEDHRGRMVKHQCCPGCGYFCTAGNFMECQPESSISHRFHKDCASRVNNASYCPHCGEESSKAKEVTIAKADTTSTVTPVPGQEKGSALEGRADTTTGSAAGPPLSEDDKLQGAASHVPEGFDPTGPAGLGRPTPGLSQGPGKETLESALIALDSEKPKKLRFHPKQLYFSARQGELQKVLLMLVDGIDPNFKMEHQNKRSPLHAAAEAGHVDICHMLVQAGANIDTCSEDQRTPLMEAAENNHLEAVKYLIKAGALVDPKDAEGSTCLHLAAKKGHYEVVQYLLSNGQMDVNCQDDGGWTPMIWATEYKHVDLVKLLLSKGSDINIRDNEENICLHWAAFSGCVDIAEILLAAKCDLHAVNIHGDSPLHIAARENRYDCVVLFLSRDSDVTLKNKEGETPLQCASLNSQVWSALQMSKALQDSAPDRPSPVERIVSRDIARGYERIPIPCVNAVDSEPCPSNYKYVSQNCVTSPMNIDRNITHLQYCVCIDDCSSSNCMCGQLSMRCWYDKDGRLLPEFNMAEPPLIFECNHACSCWRNCRNRVVQNGLRARLQLYRTRDMGWGVRSLQDIPPGTFVCEYVGELISDSEADVREEDSYLFDLDNKISSAEQLKLTLPDRIPKEAPWIITDAELRVTLMVEGENVQKQMNPQVWNSGEDSGLSYGSGNSWTEQWFQAGDDFAPGGRLQGLETVWVVTTEGVLWHLVGSGRDVVKHCTVHRTALPNRVPGPYMLMVLGLRGHCWTRGAGEAALESVACEEKREPLRECSVQQHPPIQPRGLAEGWERRWTCRRPHKPVKELGLGGKGERRGQNCALERPLWTQRGGWGEARAAWCCGCLLEWQARPLWAAVREGVIRELEEAGQGNGLDLMGEEKLVTFGMQQTVLMPCHQHHARAGWALTLTECPMNNYVTKSAVCCRKQLTGAGGVGSKKNLPRLLEVKKGRFMRESRKIRCKKAMGNHQERRWQQELKACWGFYRMGLVPERAMCSADNAQVAGSYRVFLSAEDLVITGRRKIVICLHGRAVVLDHEERQTHSFSALSVAFPWSHQSDSFPSLGLRSMDTMKGGRACDRKLSQGGFSDEGQSCPGQAWGDRRTFTFKVLFEHGFNESSQCFEIDNLVSVVYKTFAPPEQHPLYVVIITNYILTHWATSRTYNYCNGSCLFKLQGTYSEGACMLPLSPREAARAPGKGQVLTCQTSQLIPGSQPLFRQWIPILKIGSCPETARECDFLLGQPLSPCPLLTLTCEASPLLATGFTPQGTVLCYHPLLLPPGPSVAACLIFPTGIREPGSVAASPIISTGCRGGTPRLSHPQHRLQMGNPSTLPPSAQAADGEPLDSPTLSTGCRGGTPRLSHPQHRLQTGNPSTLPPSAQAADGEPLDSPTLSTGCSGECLDFLVMLVFSLGLPAHPPPSTPFLPLPAVRELEGFCFTVSWLPLFSRLLRAIPSFPHLLGPEKVPHCSKCFQTLVKLLTLPSRDFSSAPAEAINQFLQLLSCAAPFSLFRLSTLPLPVGLCWDLALAIGLAGRWDSSWGEHLLPGETGDFRNISSTVDVLTFMGQEDLCTSRGSRGLEGPHRYIFGTQIFPRGPLLSTFAELTHRWPFTLVKCLFTSVVEALQSHTELGNSSQDVGMGNQPAVLSLLVWLLPTPSFSGACIIPPATALCSTEIFSQVITHEAPTVCQGPPDLPANQDSSLCTLWVVGRTVPDPLLMPLMLVQVFQDADGIKVEGFGEILLDDEELSVVARACNPSTLRGQGGQITGTQEFEASLGNMVKHRLNKNKQTKISLAWWCVPVVLATWEAGMGGLLESRRWRLQWAEIMPLYCSLGDGNEALSKKEEKILLDDEDYDIVVIIRDEAWRKLRNLEELQNVSSSNFQRGREGTKVDWEGPRSLNNLRKVQESCQGVLEPKKCGLSTNAETDSEQQELRPLVMTFPELEAYEAHFQGNCNCLKYSNVLCVFFLKERLKVNELIIHPKKQNQPKTRGIKRSTNEIETNMHWRQSNQNWFFGNTNQNGNPLGRWGRGSINKQFKGGPGAVADTCNPSSFGRLRWEDHLSPGVGDQPGQHSKTLSLEENLKTSWTWWHAPVIPATREAEVGGWLEPGRLRLQELRFYHCSPVWVTEQDHVSINKEINKEINKVDTAIDDNIDLKDNMNNFRPIHFKKNITALTLTQEEIENPNSLITLKEIESVIKITNKTSGPVSESTELSKYKFPIEMLSELIYKASITWISKPDENSAVHSCKKSRQVIGKPDLNVYAKMIMFDLPQEMTGWFNFRKSVYVSHSLNTYEGEKLGHFNAEKAFDRIYHLFVEKLLEIKTRGELCDLMNWYLLNKKKKNRPGAVAHACNPSTVGGQGGQITLRSVVQDQHGKTPSLLKVQKLARCGGTRLESQLLRRLRQENCLNLGGGGGCSELR

SEQ ID NO: 874039 - protein, 1535 aa, Homo sapiens
WFSGGAGPRCGPGPWPPPMRGAVPARGEPQQDCCVKTELLGEETPMAADEGSAEKQAGEAHMAADGETNGSCENSDASSHANAAKHTQDSARVNPQDGTNTLTRIAENGVSERDSEAAKQNHVTADDFVQTSVIGSNGYILNKPALQAQPLRTTSTLASSLPGHAAKTLPGGAGKGRTPSAFPQTPAAPPATLGEGSADTEDRKLPAPGADVKVHRARKTMPKSVVGLHAASKDPREVREARDHKEPKEEINKNISDFGRQQLLPPFPSLHQSLPQNQCYMATTKSQTAAAVSRKKKRRMGTYSLVPKKKTKVLKQRTVIEMFKSITHSTVGSKGEKDLGASSLHVNGESLEMDSDEDDSEELEEDDGHGAEQAAAFPTEDSRTSKESMSEADRAQKMDGESEEEQESVDTGEEEEGGDESDLSSESSIKKKFLKRKGKTDSPWIKPARKRRRRSRKKPSGALGSESYKSSAGSAEQTAPGDSTGYMEVSLDSLDLRVKGILSSQAEGLANGPDVLETDGLQEVPLCSCRMETPKSREITTLANNQCMATESVDHELGRCTNSVVKYELMRPSNKAPLLVLCEDHRGRMVKHQCCPGCGYFCTAGNFMECQPESSISHRFHKDCASRVNNASYCPHCGEESSKAKEVTIAKADTTSTVTPVPGQEKGSALEGRADTTTGSAAGPPLSEDDKLQGAASHVPEGFDPTGPAGLGRPTPGLSQGPGKETLESALIALDSEKPKKLRFHPKQLYFSARQGELQKVLLMLVDGIDPNFKMEHQNKRSPLHAAAEAGHVDICHMLVQAGANIDTCSEDQRTPLMEAAENNHLEAVKYLIKAGALVDPKDAEGSTCLHLAAKKGHYEVVQYLLSNGQMDVNCQDDGGWTPMIWATEYKHVDLVKLLLSKGSDINIRDNEENICLHWAAFSGCVDIAEILLAAKCDLHAVNIHGDSPLHIAARENRYDCVVLFLSRDSDVTLKNKEGETPLQCASLNSQVWSALQMSKALQDSAPDRPSPVERIVSRDIARGYERIPIPCVNAVDSEPCPSNYKYVSQNCVTSPMNIDRNITHLQYCVCIDDCSSSNCMCGQLSMRCWYDKDGRLLPEFNMAEPPLIFECNHACSCWRNCRNRVVQNGLRARLQLYRTRDMGWGVRSLQDIPPGTFVCEYVGELISDSEADVREEDSYLFDLDNKDGEVYCIDARFYGNVSRFINHHCEPNLVPVRVFMAHQDLRFPRIAFFSTRLIEAGEQLGFDYGERFWDIKGKLFSCRCGSPKCRHSSAALAQRQASAAQEAQEDGLPDTSSAAAAAPYETPPASGALGSQGPPRRRLEDEEERFRTQPKGSFGAAAAGFLEGSEVRLQPLRAGVDASQPPSQTCGLTAGPVPRLERTLWSARQRRWESALASPSEFLMLICRCKFLVSSSDLRGPRCTTGLLCSPVRPRLFCVAPPKPPLARAAPFALPTACVAGAESQGRTEGTVSCQARRGQETDPTTNFGENVGLLFKGILYLVLYIKPLTDVSFRGSGLVGAAPAGSVDAGTFC

SEQ ID NO: 874040 - protein, 2942 aa, Homo sapiens
WFSGGAGPRCGPGPWPPPMRGAVPARGEPQQDCCVKTELLGEETPMAADEGSAEKQAGEAHMAADGETNGSCENSDASSHANAAKHTQDSARVNPQDGTNTLTRIAENGVSERDSEAAKQNHVTADDFVQTSVIGSNGYILNKPALQAQPLRTTSTLASSLPGHAAKTLPGGAGKGRTPSAFPQTPAAPPATLGEGSADTEDRKLPAPGADVKVHRARKTMPKSVVGLHAASKDPREVREARDHKEPKEEINKNISDFGRQQLLPPFPSLHQSLPQNQCYMATTKSQTAAAVSRKKKRRMGTYSLVPKKKTKVLKQRTVIEMFKSITHSTVGSKGEKDLGASSLHVNGESLEMDSDEDDSEELEEDDGHGAEQAAAFPTEDSRTSKESMSEADRAQKMDGESEEEQESVDTGEEEEGGDESDLSSESSIKKKFLKRKGKTDSPWIKPARKRRRRSRKKPSGALGSESYKSSAGSAEQTAPGDSTGYMEVSLDSLDLRVKGILSSQAEGLANGPDVLETDGLQEVPLCSCRMETPKSREITTLANNQCMATESVDHEGNFMECQPESSISHRFHKDCASRVNNASYCPHCGEESSKAKEVTIAKADTTSTVTPVPGQEKGSALEGRADTTTGSAAGPPLSEDDKLQGAASHVPEGFDPTGPAGLGRPTPGLSQGPGKETLESALIALDSEKPKKLRFHPKQLYFSARQGELQKVLLMLVDGIDPNFKMEHQNKRSPLHAAAEAGHVDICHMLVQAGANIDTCSEDQRTPLMEAAENNHLEAVKYLIKAGALVDPKDAEGSTCLHLAAKKGHYEVVQYLLSNGQMDVNCQDDGGWTPMIWATEYKHVDLVKLLLSKGSDINIRDNEENICLHWAAFSGCVDIAEILLAAKCDLHAVNIHGDSPLHIAARENRYDCVVLFLSRDSDVTLKNKEGETPLQCASLNSQVWSALQMSKALQDSAPDRPSPVERIVSRDIARGYERIPIPCVNAVDSEPCPSNYKYVSQNCVTSPMNIDRNITHLQYCVCIDDCSSSNCMCGQLSMRCWYDKDGRLLPEFNMAEPPLIFECNHACSCWRNCRNRVVQNGLRARLQLYRTRDMGWGVRSLQDIPPGTFVCEYVGELISDSEADVREEDSYLFDLDNKISSAEQLKLTLPDRIPKEAPWIITDAELRVTLMVEGENVQKQMNPQVWNSGEDSGLSYGSGNSWTEQWFQAGDDFAPGGRLQGLETVWVVTTEGVLWHLVGSGRDVVKHCTVHRTALPNRVPGPYMLMVLGLRGHCWTRGAGEAALESVACEEKREPLRECSVQQHPPIQPRGLAEGWERRWTCRRPHKPVKELGLGGKGERRGQNCALERPLWTQRGGWGEARAAWCCGCLLEWQARPLWAAVREGVIRELEEAGQGNGLDLMGEEKLVTFGMQQTVLMPCHQHHARAGWALTLTECPMNNYVTKSAVCCRKQLTGAGGVGSKKNLPRLLEVKKGRFMRESRKIRCKKAMGNHQERRWQQELKACWGFYRMGLVPERAMCSADNAQVAGSYTRFSISRGSGDNWAEEDCDLSAREGRVSWTMKKGRLSSFSALSVAFPWSHQSDSFPSLGLRSMDTMKEAEPVTGTLSQGGFSDEGQSCPGQAWGDRRTFTFKVLFEHGFNESSQCFEIDNLVSVVYKTFAPPEQHPLYVVIITNYILTHWATSRTYNYCNRQLSLEIARHLQRRCLHAPSSPPGKQPEPLEKGQVLTCQTSQLIPGSQPLFRQWIPILKIGSCPETARECDFLLGQPLSPCPLLTLTCEASPLLATGFTPQGTVLCYHPLLLPPGPSVAACLIFPTGIREPGSVAASPIISTGCRGGTPRLSHPQHRLQMGNPSTLPPSAQAADGEPLDSPTLSTGCRGGTPRLSHPQHRLQTGNPSTLPPSAQAADGEPLDSPTLSTGCSGECLDFLVMLVFSLGLPAHPPPSTPFLPLPAVRELEGFCFTVSWLPLFSRLLRAIPSFPHLLGPEKVPHCSKCFQTLGKLLTLPSRDFSSAPAEAINQFLQLLSCAAPFSLFRLSTLPLPVGLCWDLALAIGLAGRWDSSWGEHLLPGETGDFRNISSTVDVLTFMGQEDLCTSRGSRGLEGPHRYIFGTQIFPRGPLLSTFAELTHRWPFTLVKCLFTSVVEALQSHTELGNSSQDVGMGNQPAVLSLLVWLLPTPSFSGACIIPPATALCSTEIFSQVITHEAPTVCQGPPDLPANQDSSLCTLWVVGRTVPDPLLMPLMLVQVFQDADGIKVEGFGEILLDDEELSVVARACNPSTLRGQGGQITGTQEFEASLGNMVKHRLNKNKQTKISLAWWCVPVVLATWEAGMGGLLESRRWRLQWAEIMPLYCSLGDGNEALSKKEEKILLDDEDYDIVVIIRDEAWRKLRNLEELQNVSSSNFQRGREGTKVDWEGPRSLNNLRKVQESCQGVLEPKKCGLSTNAETDSEHKKLRPLVMTFPELEAYEAHFQGNCNCLKYSNVLCVFFLKERLKVNELIIHPKKQNQPKTRGIKRSTNEIETNMHWRQSNQNWFFGNTNQNGNPLGRWGRGSINKQFKGGPGAVADTCNPSSFGRLRWEDHLSPGVGDQPGQHSKTLSLEENLKTSWTWWHAPVIPATREAEVGGWLEPGRLRLQELRFYHCSPVWVTEQDHVSINKEINKEINKVDTAIDDNIDLKDNMNNFRPIHFKKNITALTLTQEEIENPNSLITLKEIESVIKITNKTSGPVSEFTELSKYKFPIEMLSELIYKASITWISKPDENSAVHSCKKSRQVIGKPDLNVYAKMIMFDLPQEMTGWFNFRKSVYVSHSLNTYEGEKLGHFNAEKAFDRIYHLFVEKLLEIKTRGELCDLMNWYLLNKKKKNRPGAVAHACNPSTVGGQGGQITLRSVVQDQHGKTPSLLKVQKLARCGGTRLESQLLRRLRQENCLNLGGGGGCSELR

SEQ ID NO: 874041 - protein, 815 aa, Homo sapiens
WFSGGAGPRCGPGPWPPPMRGAVPARGEPQQDCCVKTELLGEETPMAADEGSAEKQAGEAHMAADGETNGSCENSDASSHANAAKHTQDSARVNPQDGTNTLTRIAENGVSERDSEAAKQNHVTADDFVQTSVIGSNGYILNKPALQAQPLRTTSTLASSLPGHAAKTLPGGAGKGRTPSAFPQTPAAPPATLGEGSADTEDRKLPAPGADVKVHRARKTMPKSVVGLHAASKDPREVREARDHKEPKEEINKNISDFGRQQLLPPFPSLHQSLPQNQCYMATTKSQTAAAVSRKKKRRMGTYSLVPKKKTKVLKQRTVIEMFKSITHSTVGSKGEKDLGASSLHVNGESLEMDSDEDDSEELEEDDGHGAEQAAAFPTEDSRTSKESMSEADRAQKMDGESEEEQESVDTGEEEEGGDESDLSSESSIKKKFLKRKGKTDSPWIKPARKRRRRSRKKPSGALGSESYKSSAGSAEQTAPGDSTGYMEVSLDSLDLRVKGILSSQAEGLANGPDVLETDGLQEVPLCSCRMETPKSREITTLANNQCMATESVDHELGRCTNSVVKYELMRPSNKAPLLVLCEDHRGRMVKHQCCPGCGYFCTAGNFMECQPESSISHRFHKDCASRVNNASYCPHCGEESSKAKEVTIAKADTTSTVTPVPGQEKGSALEGRADTTTGSAAGPPLSEDDKLQGAASHVPEGFDPTGPAGLGRPTPGLSQGPGKETLESALIALDSEKPKKLRFHPKQLYFSARQGELQKVLLMLVDGIDPNFKMEHQNKRSPLHAAAEAGHVDICHMLVQFCRLGSPRSRGCLW

SEQ ID NO: 874042 - protein, 433 aa, Homo sapiens
  misc_feature (424)..(424): Xaa can be any naturally occurring amino acid
WFSGGAGPRCGPGPWPPPMRGAVPARGEPQQDCCVKTELLGEETPMAADEGSAEKQAGEAHMAADGETNGSCENSDASSHANAAKHTQDSARVNPQDGTNTLTRIAENGVSERDSEAAKQNHVTADDFVQTSVIGSNGYILNKPALQAQPLRTTSTLASSLPGHAAKTLPGGAGKGRTPSAFPQTPAAPPATLGEGSADTEDRKLPAPGADVKVHRARKTMPKSVVGLHAASKDPREVREARDHKEPKEEINKNISDFGRQQLLPPFPSLHQSLPQNQCYMATTKSQTAAAVSRKKKRRMGTYSLVPKKKTKVLKQRTVIEMFKSITHSTVGSKGEKDLGASSLHVNGESLEMDSDEDDSEELEEDDGHGAEQAAAFPTEDSRTSKESMSEADRAQKMDGESEEEQESVDTGEEEEGGDESDLXLVLLFFLLI

SEQ ID NO: 874043 - protein, 93 aa, Homo sapiens
MECQPESSISHRFHKDCASRVNNASYCPHCGEESSKAKEVTIAKADTTSTVTPVPGQEKGSALEGRADTTTGRYLAQALAGLSSRPPEKVSVV

SEQ ID NO: 874044 - protein, 858 aa, Homo sapiens
GSREGRGHAAGPGHGRRRCAGPGHGRRRCRETPMAADEGSAEKQAGEAHMAADGETNGSCENSDASSHANAAKHTQDSARVNPQDGTNTLTRIAENGVSERDSEAAKQNHVTADDFVQTSVIGSNGYILNKPALQAQPLRTTSTLASSLPGHAAKTLPGGAGKGRTPSAFPQTPAAPPATLGEGSADTEDRKLPAPGADVKVHRARKTMPKSVVGLHAASKDPREVREARDHKEPKEEINKNISDFGRQQLLPPFPSLHQSLPQNQCYMATTKSQTACLPFVLAAAVSRKKKRRMGTYSLVPKKKTKVLKQRTVIEMFKSITHSTVGSKGEKDLGASSLHVNGESLEMDSDEDDSEELEEDDGHGAEQAAAFPTEDSRTSKESMSEADRAQKMDGESEEEQESVDTGEEEEGGDESDLSSESSIKKKFLKRKGKTDSPWIKPARKRRRRSRKKPSGALGSESYKSSAGSAEQTAPGDSTGYMEVSLDSLDLRVKGILSSQAEGLANGPDVLETDGLQEVPLCSCRMETPKSREITTLANNQCMATESVDHELGRCTNSVVKYELMRPSNKAPLLVLCEDHRGRMVKHQCCPGCGYFCTAGNFMECQPESSISHRFHKDCASRVNNASYCPHCGEESSKAKEVTIAKADTTSTVTPVPGQEKGSALEGRADTTTGSAAGPPLSEDDKLQGAASHVPEGFDPTGPAGLGRPTPGLSQGPGKETLESALIALDSEKPKKLRFHPKQLYFSARQGELQKVLLMLVDGIDPNFKMEHQNKRSPLHAAAEAGHVDICHMLVQAGANIDTCSEDQRTPLMEAAENNHLEAVKYLIKAGALVDPKIQKTSKVYTESQETQRSQTIL

SEQ ID NO: 874045 - protein, 2995 aa, Homo sapiens
WFSGGAGPRCGPGPWPPPMRGAVPARGEPQQDCCVKTELLGEETPMAADEGSAEKQAGEAHMAADGETNGSCENSDASSHANAAKHTQDSARVNPQDGTNTLTRIAENGVSERDSEAAKQNHVTADDFVQTSVIGSNGYILNKPALQAQPLRTTSTLASSLPGHAAKTLPGGAGKGRTPSAFPQTPAAPPATLGEGSADTEDRKLPAPGADVKVHRARKTMPKSVVGLHAASKDPREVREARDHKEPKEEINKNISDFGRQQLLPPFPSLHQSLPQNQCYMATTKSQTACLPFVLAAAVSRKKKRRMGTYSLVPKKKTKVLKQRTVIEMFKSITHSTVGSKGEKDLGASSLHVNGESLEMDSDEDDSEELEEDDGHGAEQAAAFPTEDSRTSKESMSEADRAQKMDGESEEEQESVDTGEEEEGGDESDLSSESSIKKKFLKRKGKTDSPWIKPARKRRRRSRKKPSGALGSESYKSSAGSAEQTAPGDSTGYMEVSLDSLDLRVKGILSSQAEGLANGPDVLETDGLQEVPLCSCRMETPKSREITTLANNQCMATESVDHELGRCTNSVVKYELMRPSNKAPLLVLCEDHRGRMVKHQCCPGCGYFCTAGNFMECQPESSISHRFHKDCASRVNNASYCPHCGEESSKAKEVTIAKADTTSTVTPVPGQEKGSALEGRADTTTGSAAGPPLSEDDKLQGAASHVPEGFDPTGPAGLGRPTPGLSQGPGKETLESALIALDSEKPKKLRFHPKQLYFSARQGELQKVLLMLVDGIDPNFKMEHQNKRSPLHAAAEAGHVDICHMLVQAGANIDTCSEDQRTPLMEAAENNHLEAVKYLIKAGALVDPKDAEGSTCLHLAAKKGHYEVVQYLLSNGQMDVNCQDDGGWTPMIWATEYKHVDLVKLLLSKGSDINIRDNEENICLHWAAFSGCVDIAEILLAAKCDLHAVNIHGDSPLHIAARENRYDCVVLFLSRDSDVTLKNKEGETPLQCASLNSQVWSALQMSKALQDSAPDRPSPVERIVSRDIARGYERIPIPCVNAVDSEPCPSNYKYVSQNCVTSPMNIDRNITHLQYCVCIDDCSSSNCMCGQLSMRCWYDKDGRLLPEFNMAEPPLIFECNHACSCWRNCRNRVVQNGLRARLQLYRTRDMGWGVRSLQDIPPGTFVCEYVGELISDSEADVREEDSYLFDLDNKISSAEQLKLTLPDRIPKEAPWIITDAELRVTLMVEGENVQKQMNPQVWNSGEDSGLSYGSGNSWTEQWFQAGDDFAPGGRLQGLETVWVVTTEGVLWHLVGSGRDVVKHCTVHRTALPNRVPGPYMLMVLGLRGHCWTRGAGEAALESVACEEKREPLRECSVQQHPPIQPRGLAEGWERRWTCRRPHKPVKELGLGGKGERRGQNCALERPLWTQRGGWGEARAAWCCGCLLEWQARPLWAAVREGVIRELEEAGQGNGLDLMGEEKLVTFGMQQTVLMPCHQHHARAGWALTLTECPMNNYVTKSAVCCRYQLTGAGGVGSKKNLPRLLEVKKGRFMRESRKIRCKKAMGNHQERRWQQELKACWGFYRMGLVPERAMCSADNAQVAGSYRVFLSAEDLVITGRRKIVICLHGRAVCPGHEERQTHSFSALSVAFPWSHQSDSFPSLGLRSMDTMKGGRACDRKLSQGGFSDEGQSCPGQAWGDRRTFTFKVLFEHGFNESSQCFEIDNLVSVVYKTFAPPEQHPLYVVIITNYILTHWATSRTYNYCNRQLSLEIARHLQRRCLHAPSSPPGKQPEPLEKGQVLTCQTSQLIPGSQPLFRQWIPILKIGSCPETARECDFLLGQPLSPCPLLTLTCEASPLLATGFTPQGTVLCYHPLLLPPGPSVAACLIFPTGIREPGSVAASPIISTGCRGGTPRLSHPQHRLQMGNPSTLPPSAQAADGEPLDSPTLSTGCRGGTPRLSHPQHRLQTGNPSTLPPSAQAADGEPLDSPTLSTGCSGECLDFLVMLVFSLGLPAHPPPSTPFLPLPAVRELEGFCFTVSWLPLFSRLLRAIPSFPHLLGPEKVPHCSKCFQTLGKLLTLPSRDFSSAPAEAINQFLQLLSCAAPFSLFRLSTLPLPVGLCWDLALAIGLAGRWDSSWGEHLLPGETGDFRNISSTVDVLTFMGQEDLCTSRGSRGLEGPHRYIFGTQIFPRGPLLSTFAELTHRWPFTLVKCLFTSVVEALQSHTELGNSSQDVGMGNQPAVLSLLVWLLPTPSFSGACIIPPATALCSTEIFSQVITHEAPTVCQGPPDLPANQDSSLCTLWVVGRTVPDPLLMPLMLVQVFQDADGIKVEGFGEILLDDEELSVVARACNPSTLRGQGGQITGTQEFEASLGNMVKHRLNKNKQTKISLAWWCVPVVLATWEAGMGGLLESRRWRLQWAEIMPLYCSLGDGNEALSKKEEKILLDDEDYDIVVIIRDEAWRKLRNLEELQNVSSSNFQRGREGTKVDWEGPRSLNNLRKVQESCQGVLEPKKCGLSTNAETDSEQQELRPLVMTFPELEAYEAHFQGNCNCLKYSNVLCVFFLKERLKVNELIIHPKKQNQPKTRGIKRSTNEIETNMHWRQSNQNWFFGNTNQNGNPLGRWGRGSINKQFKGGPGAVADTCNPSSFGRLRWEDHLSPGVGDQPGQHSKTLSLEENLKTSWTWWHAPVIPATREAEVGGWLEPGRLRLQELRFYHCSPVWVTEQDHVSINKEINKEINKVDTAIDDNIDLKDNMNNFRPIHFKKNITALTLTQEEIENPNSLITLKEIESVIKITNKTSGPVSESTELSKYKFPIEMLSNSFTRLAEPGYPNLMRIVQCTAAKSLDKLLVNQICIVRKDDYVGFTPGMTGWFNFRKSVYVSHSLNTYEGEKLGHFNAEKAFDRIYHLFVEKLLEIKTRGELCDLMNWYLLNKKKKNRPGAVAHACNPSTVGGQGGQITLRSVVQDQHGKTPSLLKVQKLARCGGTRLESQLLRRLRQENCLNLGGGGGCSELR

SEQ ID NO: 874046 - protein, 2975 aa, Homo sapiens
GSREGRGHAAGPGHGRRRCAGPGHGRRRCRETPMAADEGSAEKQAGEAHMAADGETNGSCENSDASSHANAAKHTQDSARVNPQDGTNTLTRIAENGVSERDSEAAKQNHVTADDFVQTSVIGSNGYILNKPALQAQPLRTTSTLASSLPGHAAKTLPGGAGKGRTPSAFPQTPAAPPATLGEGSADTEDRKLPAPGADVKVHRARKTMPKSVVGLHAASKDPREVREARDHKEPKEEINKNISDFGRQQLLPPFPSLHQSLPQNQCYMATTKSQTAAAVSRKKKRRMGTYSLVPKKKTKVLKQRTVIEMFKSITHSTVGSKGEKDLGASSLHVNGESLEMDSDEDDSEELEEDDGHGAEQAAAFPTEDSRTSKESMSEADRAQKMDGESEEEQESVDTGEEEEGGDESDLSSESSIKKKFLKRKGKTDSPWIKPARKRRRRSRKKPSGALGSESYKSSAGSAEQTAPGDSTGYMEVSLDSLDLRVKGILSSQAEGLANGPDVLETDGLQEVPLCSCRMETPKSREITTLANNQCMATESVDHELGRCTNSVVKYELMRPSNKAPLLVLCEDHRGRMVKHQCCPGCGYFCTAGNFMECQPESSISHRFHKDCASRVNNASYCPHCGEESSKAKEVTIAKADTTSTVTPVPGQEKGSALEGRADTTTGSAAGPPLSEDDKLQGAASHVPEGFDPTGPAGLGRPTPGLSQGPGKETLESALIALDSEKPKKLRFHPKQLYFSARQGELQKVLLMLVDGIDPNFKMEHQNKRSPLHAAAEAGHVDICHMLVQAGANIDTCSEDQRTPLMEAAENNHLEAVKYLIKAGALVDPKDAEGSTCLHLAAKKGHYEVVQYLLSNGQMDVNCQDDGGWTPMIWATEYKHVDLVKLLLSKGSDINIRDNEENICLHWAAFSGCVDIAEILLAAKCDLHAVNIHGDSPLHIAARENRYDCVVLFLSRDSDVTLKNKEGETPLQCASLNSQVWSALQMSKALQDSAPDRPSPVERIVSRDIARGYERIPIPCVNAVDSEPCPSNYKYVSQNCVTSPMNIDRNITHLQYCVCIDDCSSSNCMCGQLSMRCWYDKDGRLLPEFNMAEPPLIFECNHACSCWRNCRNRVVQNGLRARLQLYRTRDMGWGVRSLQDIPPGTFVCEYVGELISDSEADVREEDSYLFDLDNKISSALQLKLTLPDRIPKEAPWIITDAELRVTLMVEGENVQKQMNPQVWNSGEDSGLSYGSGNSWTEQWFQAGDDFAPGGRLQGLETVWVVTTEGVLWHLVGSGRDVVKHCTVHRTALPNRVPGPYMLMVLGLEATDGLVELARRPWSLWPVREAGTSEGVQQFSSIHPSSHEAWQRGGRGGGPAVDPTSLSRSWDLECKGERRGQNCALERPLWTQRGGWGEARAAWCCGCLLEWQARPLWAAVREGVIRELEEAGQGNGLDLMGEEKLVTFGMQQTVLMPCHQHHARAGWALTLTECPMNNYVTKSAVCCRKQLTGAGGVGSKKNLPRLLEVKKGRFMRESRKIRCKKAMGNHQERRWQQELKACWGFYRMGLVPERAMCSADNAQVAGSYRVFLSAEDLVITGRRKIVICLHGRAVVLDHEERQTHSFSALSVAFPWSHQSDSFPSLGLRSMDTMKGGRACDRKLSQGGFSDEGQSCPGQAWGDRRTFTFKVLFEHGFNESSQCFEIDNLVSVVYKTFAPPEQHPLYVVIITNYILTHWATSRTYNYCNRQLSLEIARHLQRRCLHAPSSPPGKQPEPLEKGQVLTCQTSQLIPGSQPLFRQWIPILKIGSCPETARECDFLLGQPLSPCPLLTLTCEASPLLATGFTPQGTVLCYHPLLLPPGPSVAACLIFPTGIREPGSVAASPIISTGCRGGTPRLSHPQHRLQMGNPSTLPPSAQAADGEPLDSPTLSTGCRGGTPRLSHPQHRLQTGNPSTLPPSAQAADGEPLDSPTLSTGCSGECLDFLVMLVFSLGLPAHPPPSTPFLPLPAVRELEGFCFTVSWLPLFSRLLRAIPSFPHLLGPEKVPHCSKCFQTLVKLLTLPSRDFSSAPAEAINQFLQLLSCAAPFSLFRLSTLPLPVGLCWDLALAIGLAGRWDSSWGEHLLPGETGDFRNISSTVDVLTFMGQEDLCTSRGSRGLEGPHRYIFGTQIFPRGPLLSTFAELTHRWPFTLVKCLFTSVVEALQSHTELGNSSQDVGMGNQPAVLSLLVWLLPTPSFSGACIIPPATALCSTEIFSQVITHEAPTVCQGPPDLPANQDSSLCTLWVVGRTVPDPLLMPLMLVQVFQDADGIKVEGFGEILLDDEELSVVARACNPSTLRGQGGQITGTQEFEASLGNMVKHRLNKNKQTKISLAWWCVPVVLATWEAGMGGLLESRRWRLQWAEIMPLYCSLGDGNEALSKKEEKILLDDEDYDIVVIIRDEAWRKLRNLEELQNVSSSNFQRGREGTKVDWECPRSLNNLRKVQESCQGVLEPKKCGLSTNAETDSEHKAEAIGHDIPKLEAYEAHFQGNCNCLKYSNVLCVFFLKERLKVNELIIHPKKQNQPKTRGIKRSTNEIETNMHWRQSNQNWFFGNTNQNGNPLGRWGRGSINKQFKGGPGAVADTCNPSSFGRLRWEDHLSPGVGDQPGQHSKTLSLEENLKTSWTWWHAPVIPATREAEVGGWLEPGRLRLQELRFYHCSPVWVTEQDHVSINKEINKEINKVDTAIDDNIDLKDNMNNFRPIHFKKNITALTLTQEEIENPNSLITLKEIESVIKITNKTSGPVSESTELSKYKFPIEMLSNSFTRLAEPGYPNLMRIVQCTAAKSLDKLLVNQICIVRKDDYVGFTPGMTGWFNFRKSVYVSHSLNTYEGEKLGHFNAEKAFDRIYHLFVEKLLEIKTRGELCDLMNWYLLNKKKKNRPGAVAHACNPSTVGGQGGQITLRSVVQDQHGKTPSLLKVQKLARCGGTRLESQLLRRLRQENCLNLGGGGGCSELR

SEQ ID NO: 874047 - protein, 2962 aa, Homo sapiens
WFSGGAGPRCGPGPWPPPMRGAVPARGEPQQDCCVKTELLGEETPMAADEGSAEKQAGEAHMAADGETNGSCENSDASSHANAAKHTQDSARVNPQDGTNTLTRIAENGVSERDSEAAKQNHVTADDFVQTSVIGSNGYILNKPALQAQPLRTTSTLASSLPGHAAKTLPGGAGKGRTPSAFPQTPAAPPATLGEGSADTEDRKLPAPGADVKVHRARKTMPKSVVGLHAASKDPREVREARDHKEPKEEINKNISDFGRQQLLPPFPSLHQSLPQNQCYMATTKSQTAAAVSRKKKRRMGTYSLVPKKKTKVLKQRTVIEMFKSITHSTVGSKGEKDLGASSLHVNGESLEMDSDEDDSEELEEDDGHGAEQAAAFPTEDSRTSKESMSEADRAQKSSESSIKKKFLKRKGKTDSPWIKPARKRRRRSRKKPSGALGSESYKSSAGSAEQTAPGDSTGYMEVSLDSLDLRVKGILSSQAEGLANGPDVLETDGLQEVPLCSCRMETPKSREITTLANNQCMATESVDHELGRCTNSVVKYELMRPSNKAPLLVLCEDHRGRMVKHQCCPGCGYFCTAGNFMECQPESSISHRFHKDCASRVNNASYCPHCGEESSKAKEVTIAKADTTSTVTPVPGQEKGSALEGRADTTTGSAAGPPLSEDDKLQGAASHVPEGFDPTGPAGLGRPTPGLSQGPGKETLESALIALDSEKPKKLRFHPKQLYFSARQGELQKVLLMLVDGIDPNFKMEHQNKRSPLHAAAEAGHVDICHMLVQAGANIDTCSEDQRTPLMEAAENNHLEAVKYLIKAGALVDPKDAEGSTCLHLAAKKGHYEVVQYLLSNGQMDVNCQDDGGWTPMIWATEYKHVDLVKLLLSKGSDINIRDNEENICLHWAAFSGCVDIAEILLAAKCDLHAVNIHGDSPLHIAARENRYDCVVLFLSRDSDVTLKNKEGETPLQCASLNSQVWSALQMSKALQDSAPDRPSPVERIVSRDIARGYERIPIPCVNAVDSEPCPSNYKYVSQNCVTSPMNIDRNITHLQYCVCIDDCSSSNCMCGQLSMRCWYDKDGRLLPEFNMAEPPLIFECNHACSCWRNCRNRVVQNGLRARLQLYRTRDMGWGVRSLQDIPPGTFVCEYVGELISDSEADVREEDSYLFDLDNKISSAEQLKLTLPDRIPKEAPWIITDAELRVTLMVEGENVQKQMNPQVWNSGEDSGLSYGSGNSWTEQWFQAGDDFAPGGRLQGLETVWVVTTEGVLWHLVGSGRDVVKHCTVHRTALPNRVPGPYMLMVLGLRGHCWTRGAGEAALESVACEEKREPLRECSVQQHPPIQPRGLAEGWERRWTCRRPHKPVKELGLGGKGERRGQNCALERPLWTQRGGWGEARAAWCCGCLLEWQARPLWAAVREGVIRELEEAGQGNGLDLMGEEKLVTFGMQQTVLMPCHQHHARAGWALTLTECPMNNYVTKSAVCCRKQLTGAGGVGSKKNLPRLLEVKKGRFMRESRKIRCKKAMGNHQERRWQQELKACWGFYRMGLVPERAMCSADNAQVAGSYRVFLSAEDLVITGRRKIVICLHGRAVCLDHEERQTHSFSALSVAFPWSHQSDSFPSLGLRSMDTMKGGRACDRKLSQGGFSDEGQSCPGQAWGDRRTFTFKVLFEHGFNESSQCFEIDNLVSVVYKTFAPPEQHPLYVVIITNYILTHWATSRTYNYCNRQLSLEIARHLQRRCLHAPSSPPGKQPEPLEKGQVLTCQTSQLIPGSQPLFRQWIPILKIGSCPETARECDFLLGQPLSPCPLLTLTCEASPLLATGFTPQGTVLCYHPLLLPPGPSVAACLIFPTGIREPGSVAASPIISTGCRGGTPRLSHPQHRLQMGNPSTLPPSAQAADGEPLDSPTLSTGCRGGTPRLSHPQHRLQTGNPSTLPPSAQAADGEPLDSPTLSTGCSGECLDFLVMLVFSLGLPAHPPPSTPFLPLPAVRELEGFCFTVSWLPLFSRLLRAIPSFPHLLGPEKVPHCSKCFQTLVKLLTLPSRDFSSAPAEAINQFLQLLSCAAPFSLFRLSTLPLPVGLCWDLALAIGLAGRWDSSWGEHLLPGETGDFRNISSTVDVLTFMGQEDLCTSRGSRGLEGPHRYIFGTQIFPRGPLLSTFAELTHRWPFTLVKCLFTSVVEALQSHTELGNSSQDVGMGNQPAVLSLLVWLLPTPSFSGACIIPPATALCSTEIFSQVITHEAPTVCQGPPDLPANQDSSLCTLWVVGRTVPDPLLMPLMLVQVFQDADGIKVEGFGEILLDDEELSVVARACNPSTLRGQGGQITGTQEFEASLGNMVKHRLNKNKQTKISLAWWCVPVVLATWEAGMGGLLESRRWRLQWAEIMPLYCSLGDGNEALSKKEEKILLDDEDYDIVVIIRDEAWRKLRNLEELQNVSSSNFQRGREGTKVDWEGPRSLNNLRKVQESCQGVLEPKKCGLSTNAETDSEQQELRPLVMTFPELEAYEAHFQGNCNCLKYSNVLCVFFLKERLKVNELIIHPKKQNQPKTRGIKRSTNEIETNMHWRQSNQNWFFGNTNQNGNPLGRWGRGSINKQFKGGPGAVADTCNPSSFGRLRWEDHLSPGVGDQPGQHSKTLSLEENLKTSWTWWHAPVIPATREAEVGGWLEPGRLRLQELRFYHCSPVWVTEQDHVSINKEINKEINKVDTAIDDNIDLKDNMNNFRPIHFKKNITALTLTQEEIENPNSLITLKEIESVIKITNKTSGPVSESTELSKYKFPIEMLSNSFTRLAEPGYPNLMRIVQCTAAKSLDKLLVNQICIVRKDDYVGFTPGMTGWFNFRKSVYVSHSLNTYEGEKLGHFNAEKAFDRIYHLFVEKLLEIKTRGELCDLMNWYLLNKKKKNRPGAVAHACNPSTVGGQGGQITLRSVVQDQHGKTPSLLKVQKLARCGGTRLESQLLRRLRQENCLNLGGGGGCSELR

SEQ ID NO: 874048 - protein, 3007 aa, Homo sapiens
  misc_feature (327)..(328): Xaa can be any naturally occurring amino acid
WFSGGAGPRCGPGPWPPPMRGAVPARGEPQQDCCVKTELLGEETPMAADEGSAEKQAGEAHMAADGETNGSCENSDASSHANAAKHTQDSARVNPQDGTNTLTRIAENGVSERDSEAAKQNHVTADDFVQTSVIGSNGYILNKPALQAQPLRTTSTLASSLPGHAAKTLPGGAGKGRTPSAFPQTPAAPPATLGEGSADTEDRKLPAPGADVKVHRARKTMPKSVVGLHAASKDPREVREARDHKEPKEEINKNISDFGRQQLLPPFPSLHQSLPQNQCYMATTKSQTAAAVSRKKKRRMGTYSLVPKKKTKVLKQRTVIEMFKSPXXKKKNFFFWGKKKKKAPLLAPEFVPQGEKDLGASSLHVNGESLEMDSDEDDSEELEEDDGHGAEQAAAFPTEDSRTSKESMSEADRAQKMDGESEEEQESVDTGEEEEGGDESDLSSESSIKKKFLKRKGKTDSPWIKPARKRRRRSRKKPSGALGSESYKSSAGSAEQTAPGDSTGYMEVSLDSLDLRVKGILSSQAEGLANGPDVLETDGLQEVPLCSCRMETPKSREITTLANNQCMATESVDHELGRCTNSVVKYELMRPSNKAPLLVLCEDHRGRMVKHQCCPGCGYFCTAGNFMECQPESSISHRFHKDCASRVNNASYCPHCGEESSKAKEVTIAKADTTSTVTPVPGQEKGSALEGRADTTTGSAAGPPLSEDDKLQGAASHVPEGFDPTGPAGLGRPTPGLSQGPGKETLESALIALDSEKPKKLRFHPKQLYFSARQGELQKVLLMLVDGIDPNFKMEHQNKRSPLHAAAEAGHVDICHMLVQAGANIDTCSEDQRTPLMEAAENNHLEAVKYLIKAGALVDPKDAEGSTCLHLAAKKGHYEVVQYLLSNGQMDVNCQDDGGWTPMIWATEYKHVDLVKLLLSKGSDINIRDNEENICLHWAAFSGCVDIAEILLAAKCDLHAVNIHGDSPLHIAARENRYDCVVLFLSRDSDVTLKNKEGETPLQCASLNSQVWSALQMSKALQDSAPDRPSPVERIVSRDIARGYERIPIPCVNAVDSEPCPSNYKYVSQNCVTSPMNIDRNITHLQYCVCIDDCSSSNCMCGQLSMRCWYDKDGRLLPEFNMAEPPLIFECNHACSCWRNCRNRVVQNGLRARLQLYRTRDMGWGVRSLQDIPPGTFVCEYVGELISDSEADVREEDSYLFDLDNKISSAEQLKLTLPDRIPKEAPWIITDAELRVTLMVEGENVQKQMNPQVWNSGEDSGLSYGSGNSWTEQWFQAGDDFAPGGRLQGLETVWVVTTEGVLWHLVGSGRDVVKHCTVHRTALPNRVPGPYMLMVLGLRGHCWTRGAGEAALESVACEEKREPLRECSVQQHPPIQPRGLAEGWERRWTCRRPHKPVKELGLGGKGERRGQNCALERPLWTQRGGWGEARAAWCCGCLLEWQARPLWAAVREGVIRELEEAGQGNGLDLMGEEKLVTFGMQQTVLMPCHQHHARAGWALTLTECPMNNYVTKSAVCCRKQLTGAGGVGSKKNLPRLLEVKKGRFMRESRKIRCKKAMGNHQERRWQQELKACWGFYRMGLVPERAMCSADNAQVAGSYRVFLSAEDLVITGRRKIVICLHGRAVVLDHEERQTHSFSALSVAFPWSHQSDSFPSLGLRSMDTMKGGRACDRKLSQGGFSDEGQSCPGQAWGDRRTFTFKVLFEHGFNESSQCFEIDNLVSVVYKTFAPPEQHPLYVVIITNYILTHWATSRTYNYCNRQLSLEIARHLQRRCLHAPSSPPGKQPEPLEKGQVLTCQTSQLIPGSQPLFRQWIPILKIGSCPETARECDFLLGQPLSPCPLLTLTCEASPLLATGFTPQGTVLCYHPLLLPPGPSVAACLIFPTGIREPGSVAASPIISTGCRGGTPRLSHPQHRLQMGNPSTLPPSAQAADGEPLDSPTLSTGCRGGTPRLSHPQHRLQTGNPSTLPPSAQAADGEPLDSPTLSTGCSGECLDFLVMLVFSLGLPAHPPPSTPFLPLPAVRELEGFCFTVSWLPLFSRLLRAIPSFPHLLGPEKVPHCSKCFQTLVKLLTLPSRDFSSAPAEAINQFLQLLSCAAPFSLFRLSTLPLPVGLCWDLALAIGLAGRWDSSWGEHLLPGETGDFRNISSTVDVLTFMGQEDLCTSRGSRGLEGPHRYIFGTQIFPRGPLLSTFAELTHRWPFTLVKCLFTSVVEALQSHTELGNSSQDVGMGNQPAVLSLLVWLLPTPSFSGACIIPPATALCSTEIFSQVITHEAPTVCQGPPDLPANQDSSLCTLWVVGRTVPDPLLMPLMLVQVFQDADGIKVEGFGEILLDDEELSVVARACNPSTLRGQGGQITGTQEFEASLGNMVKHRLNKNKQTKISLAWWCVPVVLATWEAGMGGLLESRRWRLQWAEIMPLYCSLGDGNEALSKKEEKILLDDEDYDIVVIIRDEAWRKLRNLEELQNVSSSNFQRGREGTKVDWEGPRSLNNLRKVQESCQGVLEPKKCGLSTNAETDSEHKAEAIGHDIPKLEAYEAHFQGNCNCLKYSNVLCVFFLKERLKVNELIIHPKKQNQPKTRGIKRSTNEIETNMHWRQSNQNWFFGNTNQNGNPLGRWGRGSINKQFKGGPGAVADTCNPSSFGRLRWEDHLSPGVGDQPGQHSKTLSLEENLKTSWTWWHAPVIPATREAEVGGWLEPGRLRLQELRFYHCSPVWVTEQDHVSINKEINKEINKVDTAIDDNIDLKDNMNNFRPIHFKKNITALTLTQEEIENPNSLITLKEIESVIKITNKTSGPVSESTELSKYKFPIEMLSNFIYKASITWISKPDENSAVHSCKKSRQVIGKPDLNVYAKMIMFDLPQEMTGWFNFRKSVYVSHSLNTYEGEKLGHFNAEKAFDRIYHLFVEKLLEIKTRGELCDLMNWYLLNKKKKNRPGAVAHACNPSTVGGQGGQITLRSVVQDQHGKTPSLLKVQKLARCGGTRLESQLLRRLRQENCLNLGGGGGCSELR

SEQ ID NO: 874049 - protein, 2690 aa, Homo sapiens
MGTYSLVPKKKTKVLKQRTVIEMFKSITHSTVGSKGEKDLGASSLHVNGESLEMDSDEDDSEELEEDDGHGAEQAAAFPTEDSRTSKESMSEADRAQKMDGESEEEQESVDTGEEEEGGDESDLSSESSIKKKFLKRKGKTDSPWIKPARKRRRRSRKKPSGALGSESYKSSAGSAEQTAPGDSTGYMEVSLDSLDLRVKGILSSQAEGLANGPDVLETDGLQEVPLCSCRMETPKSREITTLANNQCMATESVDHELGRCTNSVVKYELMRPSNKAPLLVLCEDHRGRMVKHQCCPGCGYFCTAGNFMECQPESSISHRFHKDCASRVNNASYCPHCGEESSKAKEVTIAKADTTSTVTPVPGQEKGSALEGRADTTTGSAAGPPLSEDDKLQGAASHVPEGFDPTGPAGLGRPTPGLSQGPGKETLESALIALDSEKPKKLRFHPKQLYFSARQGELQKVLLMLVDGIDPNFKMEHQNKRSPLHAAAEAGHVDICHMLVQAGANIDTCSEDQRTPLMEAAENNHLEAVKYLIKAGALVDPKDAEGSTCLHLAAKKGHYEVVQYLLSNGQMDVNCQDDGGWTPMIWATEYKHVDLVKLLLSKGSDINIRDNEENICLHWAAFSGCVDIAEILLAAKCDLHAVNIHGDSPLHIAARENRYDCVVLFLSRDSDVTLKNKEGETPLQCASLNSQVWSALQMSKALQDSAPDRPSPVERIVSRDIARGYERIPIPCVNAVDSEPCPSNYKYVSQNCVTSPMNIDRNITHLQYCVCIDDCSSSNCMCGQLSMRCWYDKDGRLLPEFNMAEPPLIFECNHACSCWRNCRNRVVQNGLRARLQLYRTRDMGWGVRSLQDIPPGTFVCEYVGELISDSEADVREEDSYLFDLDNKISSAEQLKLTLPDRIPKEAPWIITDAELRVTLMVEGENVQKQMNPQVWNSGEDSGLSYGSGNSWTEQWFQAGDDFAPGGRLQGLETVWVVTTEGVLWHLVGSGRDVVKHCTVHRTALPNRVPGPYMLMVLGLRGHCWTRGAGEAALESVACEEKREPLRECSVQQHPPIQPRGLAEGWERRWTCRRPHKPVKELGLGGKGERRGQNCALERPLWTQRGGWGEARAAWCCGCLLEWQARPLWAAVREGVIRELEEAGQGNGLDLMGEEKLVTFGMQQTVLMPCHQHHARAGWALTLTECPMNNYVTKSAVCCRKQLTGAGGVGSKKNLPRLLEVKKGRFMRESRKIRCKKAMGNHQERRWQQELKACWGFYRMGLVPERAMCSADNAQVAGSYRVFLSAEDLVITGRRKIVICLHGRAVVLDHEERQTHSFSALSVAFPWSHQSDSFPSLGLRSMDTMKGGRACDRKLSQGGFSDEGQSCPGQAWGDRRTFTFKVLFEHGFNESSQCFEIDNLVSVVYKTFAPPEQHPLYVVIITNYILTHWATSRTYNYCNRQLSLEIARHLQRRCLHAPSSPPGKQPEPLEKGQVLTCQTSQLIPGSQPLFRQWIPILKIGSCPETARECDFLLGQPLSPCPLLTLTCEASPLLATGFTPQGTVLCYHPLLLPPGPSVAACLIFPTGIREPGSVAASPIISTGCRGGTPRLSHPQHRLQMGNPSTLPPSAQAADGEPLDSPTLSTGCRGGTPRLSHPQHRLQTGNPSTLPPSAQAADGEPLDSPTLSTGCSGECLDFLVMLVFSLGLPAHPPPSTPFLPLPAVRELEGFCFTVSWLPLFSRLLRAIPSFPHLLGPEKVPHCSKCFQTLVKLLTLPSRDFSSAPAEAINQFLQLLSCAAPFSLFRLSTLPLPVGLCWDLALAIGLAGRWDSSWGEHLLPGETGDFRNISSTVDVLTFMGQEDLCTSRGSRGLEGPHRYIFGTQIFPRGPLLSTFAELTHRWPFTLVKCLFTSVVEALQSHTELGNSSQDVGMGNQPAVLSLLVWLLPTPSFSGACIIPPATALCSTEIFSQVITHEAPTVCQGPPDLPANQDSSLCTLWVVGRTVPDPLLMPLMLVQVFQDADGIKVEGFGEILLDDEELSVVARACNPSTLRGQGGQITGTQEFEASLGNMVKHRLNKNKQTKISLAWWCVPVVLATWEAGMGGLLESRRWRLQWAEIMPLYCSLGDGNEALSKKEEKILLDDEDYDIVVIIRDEAWRKLRNLEELQNVSSSNFQRGREGTKVDWEGPRSLNNLRKVQESCQGVLEPKKCGLSTNAETDSEQQELRPLVMTFPELEAYEAHFQGNCNCLKYSNVLCVFFLKERLKVNELIIHPKKQNQPKTRGIKRSTNEIETNMHWRQSNQNWFFGNTNQNGNPLGRWGRGSINKQFKGGPGAVADTCNPSSFGRLRWEDHLSPGVGDQPGQHSKTLSLEENLKTSWTWWHAPVIPATREAEVGGWLEPGRLRLQELRFYHCSPVWVTEQDHVSINKEINKEINKVDTAIDITYDLKDNMNNFRPIHFKKNITALTLTQEEIENPNSLITLKEIESVIKITNKTSGPVSEFPELSKYKFPIEMLSELIYKASITWISKPDENSAVHSCKKSRQVIGKPDLNVYAKMIMFDLPQEMTGWFNFRKSVYVSHSLNTYEGEKLGHFNAEKAFDRIYHLFVEKLLEIKTRGELCDLMNWYLLNKKKKNRPGAVAHACNPSTVGGQGGQITLRSVVQDQHGKTPSLLKVQKLARCGGTRLESQLLRRLRQENCLNLGGGGGCSELR

SEQ ID NO: 874050 - protein, 478 aa, Homo sapiens
MRGAVPARGEPQQDCCVKTELLGEETPMAADEGSAEKQAGEAHMAADGETNGSCENSDASSHANAAKHTQDSARVNPQDGTNTLTRIAENGVSERDSEAAKQNHVTADDFVQTSVIGSNGYILNKPALQAQPLRTTSTLASSLPGHAAKTLPGGAGKGRTPSAFPQTPAAPPATLGEGSADTEDRKLPAPGADVKVHRARKTMPKSVVGLHAASKDPREVREARDHKEPKEEINKNISDFGRQQLLPPFPSLHQSLPQNQCYMATTKSQTAAAVSRKKKRRMGTYSLVPKKKTKVLKQRTVIEMFKSITHSTVGSKGEKDLGASSLHVNGESLEMDSDEDDSEELEEDDGHGAEQAAAFPTEDSRTSKESMSEADRAQKMDGESEEEQESVDTGEEEEGGDESDLSSESSIKKKFLKRKGKTDSPWIKPARKRRRRSRKKPSGALAASLTVSTKTVPLESITPAIVPTVGRRAPRPKR

SEQ ID NO: 874051 - protein, 101 aa, Homo sapiens
GFRRGSRWLFMWRMVICECLPAIVTVLSWSLWLHLKSLIKLCLFTVDGIDPNFKMEHQNKRSPLHAAAEAGHVDICHMLVQVRRHGALLGLFTCSLLFLPK

SEQ ID NO: 874052 - protein, 55 aa, Homo sapiens
MRTDPALGYTPARVGEKDLGASSLHVNGESLEMDSDEDDSEELEEDDGHGAEQAA

SEQ ID NO: 874053 - protein, 41 aa, Homo sapiens
MGPTGLFIPSFNNNGLSFPWVLGTMLAIWGQHTETGVLSFW

SEQ ID NO: 874054 - protein, 111 aa, Homo sapiens
GCWQDKAVKKQSVKQQEPGVEKDLQRAGSGSSGGSKKSERQTWNTARAREWGSTGEHAPSSLLPVNLLKDTSASPSSHVGQLLPGVHQHLPVFTTNPQYLKIACIHLCSFN

SEQ ID NO: 874055 - protein, 39 aa, Homo sapiens
MELEFPGQNISTLERRELHRESSRGLQRAPQKSSAGYPS

SEQ ID NO: 874056 - protein, 135 aa, Homo sapiens [sequence omitted]

SEQ ID NO: 874057 - protein, 47 aa, Homo sapiens
MASASSQPSLAVGFSSFDPGAPSCTASSASGILSPTASEVPYASGMP

SEQ ID NO: 874058 - protein, 75 aa, Homo sapiens
PNFLSYSQTLECSPALERTRSSSHSSASVPFHHSPSGLRLPQLQRSDRNLLAGWVREAGDLRLLVADRKEAECRG

SEQ ID NO: 874059 - protein, 292 aa, Homo sapiens
MGEKSENCGVPEDLLNGLKVTDTQEAECAGPPVPDPKNQHSQSKLLRDDEAHLQEDQGEEECFHDCSASFEEEPGADKVENKSNEDVNSSELDEEYLIELEKNMSDEEKQKRREESTRLKEEGNEQFKKGDYIEAESSYSRALEMCPSCFQKERSILFSNRAAARMKQDKKEMAINDCSKAIQLNPSYIRAILRRAELYEKTDKLDEALEDYKSILEKDPSIHQAREACMRLPKQIEERNERLKEEMLGKLKDLGNLVLRPFGLSTENFQIKQDSSTGSYSINFVQNPNNNR

SEQ ID NO: 874060 - protein, 292 aa, Homo sapiens; identical to SEQ ID NO: 874059

SEQ ID NO: 874061 - protein, 292 aa, Homo sapiens; identical to SEQ ID NO: 874059

SEQ ID NO: 874062 - protein, 331 aa, Homo sapiens
MGEKSENCGVPEDLLNGLKVTDTQEAECAGPPVPDPKNQHSQSKLLRDDEAHLQEDQGEEECFHDCSASFEEEPGADKVENKSNEDVNSSELDEEYLIELEKNMSDEEKQKRREESTRLKEEGNEQFKKGDYIEAESSYSRALEMCPSCFQKERSILFSNRAAARMKQDKKEMAINDCSKAIQLNPSYIRAILRRAELYEKTDKLDEALEDYKSILEKDPSIHQAREACMRLPKQIEERNERLKEEMLGKLKDLGNLVLRPFGLSTENFQIKQDSSTGSWCLCSWCPRFWLSYVQEEAHLLRLTFLIIHTHSPAKASPEPNKPVGWETAQT

SEQ ID NO: 874063 - protein, 279 aa, Homo sapiens
MGEKSENCGVPEDLLNGLKVTDTQEAECAGPPVPDPKNQHSQSKLLRDDEAHLQEDQGEEECFHDCSASFEEEPGADKVENKSNEDVNSSELDEEYLIELEKNMSDEEKQKRREESTRLKEEGNEQFKKGDYIEAESSYSRALEMCPSCFQKERSILFSNRAAARMKQDKKEMAINDCSKAIQLNPSYIRAILRRAELYEKTDKLDEALEDYKSILEKDPSIHQAREACMRLPKQIEERNERLKEEMLGKLKDLGNLVLRPFGLSTENFQIKQDSSTGS

SEQ ID NO: 874064 - protein, 134 aa, Homo sapiens
LSGPLAGGNQDKKEMAINDCSKAIQLNPSYIRAILRRAELYEKTDKLDEALEDYKSILEKDPSIHQAREACMRLPKQIEERNERLKEEMLGKLKDLGNLVLRPFGLSTENFQIKQDSSTGSYSINFVQNPNNNR

SEQ ID NO: 874065 - protein, 292 aa, Homo sapiens; identical to SEQ ID NO: 874059

SEQ ID NO: 874066 - protein, 292 aa, Homo sapiens; identical to SEQ ID NO: 874059

SEQ ID NO: 874067 - protein, 292 aa, Homo sapiens; identical to SEQ ID NO: 874059

SEQ ID NO: 874068 - protein, 148 aa, Homo sapiens [sequence omitted]

SEQ ID NO: 874069 - protein, 103 aa, Homo sapiens
KAFITTEEIRKCWRSLVSCVIREGTAGGNRHQYIKQEKLVSRLPKQIEERNERLKEEMLGKLKDLGNLVLRPFGLSTENFQIKQDSSTGSYSINFVQNPNNNR

SEQ ID NO: 874070 - protein, 369 aa, Homo sapiens
MTPTDFTSPIPNMADDYGSESTSSMEDYVNFNFTDFYCEKNNVRQFASHFLPPLYWLVFIVGALGNSLVILVYWYCTRVKTMTDMFLLNLAIADLLFLVTLPFWAIAAADQWKFQTFMCKVVNSMYKMNFYSCVLLIMCISVDRYIAIAQAMRAHTWREKRLLYSKMVCFTIWVLAAALCIPEILYSQIKEESGIAICTMVYPSDESTKLKSAVLTLKVILGFFLPFVVMACCYTIIIHTLIQAKKSSKHKALKVTITVLTVFVLSQFPYNCILLVQTIDAYAMFISNCAVSTNIDICFQVTQTIAFFHSCLNPVLYVFVGERFRRDLVKTLKNLGCISQAQWVSFTRREGSLKLSSMLLETTSGALSL

SEQ ID NO: 874071 - protein, 357 aa, Homo sapiens
MADDYGSESTSSMEDYVNFNFTDFYCEKNNVRQFASHFLPPLYWLVFIVGALGNSLVILVYWYCTRVKTMTDMFLLNLAIADLLFLVTLPFWAIAAADQWKFQTFMCKVVNSMYKMNFYSCVLLIMCISVDRYIAIAQAMRAHTWREKRLLYSKMVCFTIWVLAAALCIPEILYSQIKEESGIAICTMVYPSDESTKLKSAVLTLKVILGFFLPFVVMACCYTIIIHTLIQAKKSSKHKALKVTITVLTVFVLSQFPYNCILLVQTIDAYAMFISNCAVSTNIDICFQVTQTIAFFHSCLNPVLYVFVGERFRRDLVKTLKNLGCISQAQWVSFTRREGSLKLSSMLLETTSGALSL

SEQ ID NO: 874072 - protein, 198 aa, Homo sapiens
VLQLQSCSPSSCLSANAARMASQNRDPAATSVAAARKGAEPSGGAARGPVGKRLQQELMTLMMSGDKGISAFPESDNLFKWVGTIHGAAGTVYEDLRYKLSLEFPSGYPYNAPTVKFLTPCYHPNVDTQGNICLDILKEKWSALYDVRTILLSIQSLLGEPNIDSPLNTHAAELWKNPTAFKKYLQETYSKQVTSQEP

SEQ ID NO: 874073 - protein, 198 aa, Homo sapiens; identical to SEQ ID NO: 874072

SEQ ID NO: 874074 - protein, 169 aa, Homo sapiens
VLQLQSCSPSSCLSANAARMASQNRDPAATSVAAARKGAEPSGGAARGPVGKRLQQELMTLMVYEDLRYKLSLEFPSGYPYNAPTVKFLTPCYHPNVDTQGNICLDILKEKWSALYDVRTILLSIQSLLGEPNIDSPLNTHAAELWKNPTAFKKYLQETYSKQVTSQEP

SEQ ID NO: 874075 - protein, 89 aa, Homo sapiens
AVGSIRTSSTVCLLSGPRETQDSSKPLVWGLGWDMRLLLELTLQLFLQMPEPNIDSPLNTHAAELWKNPTAFKKYLQETYSKQVTSQEP

SEQ ID NO: 874076 - protein, 140 aa, Homo sapiens
MTLMMSGDKGISAFPESDNLFKWVGTIHGAAGTVYEDLRYKLSLEFPSGYPYNAPTVKFLTPCYHPNVDTQGNICLDILKEKWSALYDVRTILLSIQSLLGEPNIDSPLNTHAAELWKNPTAFKKYLQETYSKQVTSQEP

SEQ ID NO: 874077 - protein, 80 aa, Homo sapiens
NDGLSSDGPQLNDGPQLNDGPQLNDGPQPNDGPQLNDGPLPTPPGWLPKTATQPPLASPPPVKELSRAGAPPGVRWAKGE

SEQ ID NO: 874078 - protein, 98 aa, Homo sapiens
VLQLQSCSPSSCLSANAARMASQNRDPAATSVAAARKGAEPSGGAARGPVGKRLQQELMTLMMSGDKGISAFPESDNLFKWVGTIHGAAGTNPTLIVP

SEQ ID NO: 874079 - protein, 80 aa, Homo sapiens; identical to SEQ ID NO: 874077

SEQ ID NO: 874080 - protein, 149 aa, Homo sapiens
LSDSGKVPTHLKRLSDSGRQKSLYQPDNLFKWVGTIHGAAGTVYEDLRYKLSLEFPSGYPYNAPTVKFLTPCYHPNVDTQGNICLDILKEKWSALYDVRTILLSIQSLLGEPNIDSPLNTHAAELWKNPTAFKKYLQETYSKQVTSQEP

SEQ ID NO: 874081 - protein, 140 aa, Homo sapiens; identical to SEQ ID NO: 874076

SEQ ID NO: 874082 - protein, 113 aa, Homo sapiens
MEQLEQVYEDLRYKLSLEFPSGYPYNAPTVKFLTPCYHPNVDTQGNICLDILKEKWSALYDVRTILLSIQSLLGEPNIDSPLNTHAAELWKNPTAFKKYLQETYSKQVTSQEP

SEQ ID NO: 874083 - protein, 83 aa, Homo sapiens
NDGLSSDGPQLNDGPQLNDGPQLNDGPQPNDGPQLNDGPLPTPPGWLPKTATQPPLASPPPVKELSRAGAPPGVRWAKGYSRS

SEQ ID NO: 874084 - protein, 82 aa, Homo sapiens
TQGNICLDILKEKWSALYDVRTILLSIQSLLGGDFRDHPSPPCNLGTCQDSLGSASSTALTFSFSPPTEPNIDSPLNTHAAE

SEQ ID NO: 874085 - protein, 43 aa, Homo sapiens
RRSRQRSPGGGVSCGALRVEISRLPGQIREEGRELNTEVVAAP

SEQ ID NO: 874086 - protein, 42 aa, Homo sapiens
MFASPWMNEGMAGTHRAAHFTFLTFLPPQSMYKNRVGSTSHE

SEQ ID NO: 874087 - protein, 108 aa, Homo sapiens
LLLLNSRPRRQQAGAEQEPSGVSVHRQPSSGSCTTHPQGPGDSEEAASPCQHACLTHLRACFASLGSRQCLGWGLGQYPLRLGAQLPRTPELSACSHLVKGDFPLPML

SEQ ID NO: 874088 - protein, 488 aa, Homo sapiens
MPAVSGPGPLFCLLLLLLDPHSPETGCPPLRRFEYKLSFKGPRLALPGAGIPFWSHHGDAILGLEEVRLTPSMRNRSGAVWSRASVPFSAWEVEVQMRVTGLGRRGAHGMAVWYTRGRGHVGSVLGGLASWDGIGIFFDSPAEDTQDSPAIRVLASDGHIPSEQPGDGASQGLGSCHWDFRNRPHPFRARITYWGQRLRMSLNSGLTPSDPGEFCVDVGPLLLVPGGFFGVSAATGTLADDHDVLSFLTFSLSEPSPEVPPQPFLEMQQLRLARQLEGLWARLGLGTREDVTPKSDSEAQGEGERLFDLEETLGRHRRILQALRGLSKQLAQAERQWKKQLGPPGQARPDGGWALDASCQIPSTPGRGGHLSMSLNKDSAKVGALLHGQWTLLQALQEMRDAAVRMAAEAQVSYLPVGIEHHFLELDHILGLLQEELRGPAKAAAKAPRPPGQPPRASSCLQPGIFLFYLLIQTVGFFGYVHFRWATP

SEQ ID NO: 874089 - protein, 125 aa, Homo sapiens
ASRMPAVSGPGPLFCLLLLLLDPHSPETGCPPLRRFEYKLSFKGPRLALPGAGIPFWSHHGGEGQGWGPAMPRVPQSAGGAVTWWGVGLSQPSSVQGGARPGTVPGTPGPLPGLSPAPPPQHPPP

SEQ ID NO: 874090 - protein, 527 aa, Homo sapiens
MPAVSGPGPLFCLLLLLLDPHSPETGCPPLRRFEYKLSFKGPRLALPGAGIPFWSHHGDAILGLEEVRLTPSMRNRSGAVWSRASVPFSAWEVEVQMRVTGLGRRGAHGMAVWYTRGRGHVGSVLGGLASWDGIGIFFDSPAEDTQDSPAIRVLASDGHIPSEQPGDGASQGLGSCHWDFRNRPHPFRARITYWGQRLRMSLNSGLTPSDPGEFCVDVGPLLLVPGGFFGVSAATGTLADDHDVLSFLTFSLSEPSPEVPPQPFLEMQQLRLARQLEGLWARLGLGTREDVTPKSDSEAQGEGERLFDLEETLGRHRRILQALRGLSKQLAQAERQWKKQLGPPGQARPDGGWALDASCQIPSTPGRGGHLSMSLNKDSAKVGALLHGQWTLLQALQEMRDAAVRMAAEAQVSYLPVGIEHHFLELDHILGLLQEELRGPAKAAAKAPRPPGQPPRASSCLQPGIFLFYLLIQTVGFFGYVHFSRQELNKSLQECLSTGSLPLGPAPHTPRALGILRRQPLPASMPA

SEQ ID NO: 874091 - protein, 416 aa, Homo sapiens
MPAVSGPGPLFCLLLLLLDPHSPETGCPPLRRFEYKLSFKGPRLALPGAGIPFWSHHGDAILGLEEVRLTPSMRNRSGAVWSRASVPFSAWEVEVQMRVTGLGRRGAHGMAVWYTRGRGHVGSVLGGLASWDGIGIFFDSPAEDTQDSPAIRVLASDGHIPSEQPGDGASQGLGSCHWDFRNRPHPFRARITYWGQRLRMSLNSGLTPSDPGEFCVDVGPLLLVPGGFFGVSAATGTLADDHDVLSFLTFSLSEPSPEVPPQPFLEMQQLRLARQLEGLWARLGLGTREDVTPKSDSEAQGEGERLFDLEETLGRHRRILQALRGLSKQLAQAERQWKKQLGPPGQARPDGGWALDASCQIPSTPGRGGHLSMSLNKHFGRPRRTDHEVKRLTPSGRSQGQKIETILANMVKPCLY

SEQ ID NO: 874092 - protein, 113 aa, Homo sapiens
MQKVTLGLLVFLAGFPVLDANDLEDKNSPFYYDWHSLQVGGLICAGVLCAMGIIIVMSEWRSSGEQAGRGWGSPPLTTQLSPTGAKCKCKFGQKSGHHPGETPPLITPGSAQS

SEQ ID NO: 874093 - protein, 140 aa, Homo sapiens [sequence omitted]

SEQ ID NO: 874094 - protein, 131 aa, Homo sapiens
RNETKDLEPRINTNKVLLYCLFSYIFFSRKPLLSLVNHTGQRSDMQKVTLGLLVFLAGFPVLDANDLEDKNSPFYYDWHSLQVGGLICAGVLCAMGIIIVMSAKCKCKFGQKSGHHPGETPPLITPGSAQS

SEQ ID NO: 874095 - protein, 114 aa, Homo sapiens
YAEQVYLGKRKCLLSPGTLLGLGQRSDMQKVTLGLLVFLAGFPVLDANDLEDKNSPFYYDWHSLQVGGLICAGVLCAMGIIIVMSAKCKCKFGQKSGHHPGETPPLITPGSAQS

SEQ ID NO: 874096 - protein, 103 aa, Homo sapiens
MAAPASRFLLLLLPASAPHRDPGPACVPAGFPVLDANDLEDKNSPFYYDWHSLQVGGLICAGVLCAMGIIIVMSAKCKCKFGQKSGHHPGETPPLITPGSAQS

SEQ ID NO: 874097 - protein, 80 aa, Homo sapiens
HAVGFCAPWAHLRWGSVRHGHHHRHECKMQMQVWPEVRSPSRGDSTSHHPRLSPKLMRTDQLKLGGGPFSVPRSCLCTET

SEQ ID NO: 874098 - protein, 54 aa, Homo sapiens
MQKVTLGLLVFLAGFPVLDANDLEDKNSPFYYGAPYIFVKRMGGQMERTQAGTE

SEQ ID NO: 874099 - protein, 144 aa, Homo sapiens
MGRGYSGALQARGGLEEPLERGLRGPSFTQSPLHGAAAAYLSAQRDASLPVPGQRSDMQKVTLGLLVFLAGFPVLDANDLEDKNSPFYYDWHSLQVGGLICAGVLCAMGIIIVMSAKCKCKFGQKSGHHPGETPPLITPGSAQS

SEQ ID NO: 874100 - protein, 107 aa, Homo sapiens
RTKACSTRGNKPGPRLLELAEKGNPWGLAWVPAGFPVLDANDLEDKNSPFYYDWHSLQVGGLICAGVLCAMGIIIVMSAKCKCKFGQKSGHHPGETPPLITPGSAQS

SEQ ID NO: 874101 - protein, 120 aa, Homo sapiens
DVLNYCQTCASFASCDEVPAGFPVLDANDLEDKNSPFYYDWHSLQVGGLICAGVLCAMGIIIVMSEWRSSGEQAGRGWGSPPLTTQLSPTGAKCKCKFGQKSGHHPGETPPLITPGSAQS

SEQ ID NO: 874102 - protein, 144 aa, Homo sapiens
MGRGYSGALQARGGLEEPLERGLRGPSFTQSPLHGAAAAYLSAQRDASLPVPGQRSDMQKVTLGLLVFLAGFPVLDANDLEDKNSPFYYDWHSLQVGGLICAGVLCAMGIIIVMSAKCKCKFGQKSGQSTQGDSPLITPGSAQS

SEQ ID NO: 874103 - protein, 138 aa, Homo sapiens
ANVHSHSPQSMLIDMESLSPTSTPTAPQSMLVDMESLSPVSSPTAPQSMLIDMESHSPMFISQSPSINVDRHGIIITNVHSHSPSINADRHGIIFTNVNLLLSFLHRLVLQARNLHQKPYCTPPFPLQTPDQFSEMSC

SEQ ID NO: 874104 - protein, 318 aa, Homo sapiens
MNRFGTRLVGATATSSPPPKARSNENLDKIDMSLDDIIKLNRKEGKKQNFPRLNRRLLQQSGAQQFRMRVRWGIQQNSGFGKTSLNHRGRVMPGKRRPNGVITGLAARKTTGIRKGISPMNRPPLSDKNIEQYFPVLKRKANLLRQNEGQRKPVAVLKRPSQLSRKNNIPANFTRSGNKLNHQKDTRQATFLFRRGLKVQAQLNTEQLLDDVVAKRTRQWRTSTTNGGILTVSIDNPGAVQCPVTQKPRLTRTAVPSFLTKREQSDVKKVPKGVPLQFDINSVGKQTGMTLNERFGILKEQRATLTYNKGGSRFVTVG

SEQ ID NO: 874105 - protein, 318 aa, Homo sapiens; identical to SEQ ID NO: 874104

SEQ ID NO: 874106 - protein, 121 aa, Homo sapiens
MNRFGTRLVGATATSSPPPKARSNENLDKIDMSLDDIIKLNRKEGKKQNFPRLNRRLLQQSGAQQFRMRVRWGIQQNSDTKTLESSIVKHMKRFVLVIPALWEVRARGLLKPRTSGPAWAT

SEQ ID NO: 874107 - protein, 251 aa, Homo sapiens
MRVRWGIQQNSGFGKTSLNHRGRVMPGKRRPNGVITGLAARKTTGIRKGISPMNRPPLSDKNIEQYFPVLKRKANLLRQNEGQRKPVAVLKRPSQLSRKNNIPANFTRSGNKLNHQKDTRQATFLFRRGLKVQAQLNTEQLLDDVVAKRTRQWRTSTTNGGILTVSIDNPGAVQCPVTQKPRLTRTAVPSFLTKREQSDVKKVPKGVPLQFDINSVGKQTGMTLNERFGILKEQRATLTYNKGGSRFVTVG

SEQ ID NO: 874108 - protein, 318 aa, Homo sapiens; identical to SEQ ID NO: 874104

SEQ ID NO: 874109 - protein, 318 aa, Homo sapiens; identical to SEQ ID NO: 874104

SEQ ID NO: 874110 - protein, 199 aa, Homo sapiens
MNRPPLSDKNIEQYFPVLKRKANLLRQNEGQRKPVAVLKRPSQLSRKNNIPANFTRSGNKLNHQKDTRQATFLFRRGLKVQAQLNTEQLLDDVVAKRTRQWRTSTTNGGILTVSIDNPGAVQCPVTQKPRLTRTAVPSFLTKREQSDVKKVPKGVPLQFDINSVGKQTGMTLNERFGILKEQRATLTYNKGGSRFVTVG

SEQ ID NO: 874111 - protein, 124 aa, Homo sapiens
MPGKRRPNGVITGLAARKTTGIRKGISPMNRPPLSDKNIEQYFPVLKRKANLLRQNEGQRKPVAVLKRPSQLSRRYSSGNFSFQKRPEGAGPVEYRTTARRCSSKENSSMADFHHKWRDFDCIY

SEQ ID NO: 874112 - protein, 318 aa, Homo sapiens; identical to SEQ ID NO: 874104

SEQ ID NO: 874113 - protein, 314 aa, Homo sapiens
LAAGHRLPSAAGGSGWSRHGCCGRGKTANSSPAAGPAAPGPRLSPRSAEPTRYFLSAYYVPCCASALRTQVDKPELLPDSPGAHHTRRVYVMTQASRGLHEEFIEDAPRTRTPLCAAYLALARDGLPADPKSLRIAAIIGRAHGRAHQTADAASPIHLAKNRNQPDRLLTRLAHTAQRVDAGPSTDAYHQKTRRTYPRTCHEYALVYRTPSPHSGGSARTERTGNPNQITVRITSRTSRAIKPTQHPAAEEGQRTRSRTSTCTKTGPALYGTVHVKGLPRASPREIRKSPLARLQTPTCNTWTIPAVCIYSPDE

SEQ ID NO: 874114 - protein, 802 aa, Homo sapiens
MCSSSPSMQSLSCPPSFLQSHHATTSLGGLRAELPASTPRFRSAAPSLLPVLYGARASFAPPPAVAYSRCQVLGAVRCSALFKITYASSEATVPGHLHHLPQWNASCVKAHNNPCGGTTMSSESSKKRKPKVIRSDGAPAEGKRNRSDTEQEGKYYSEEAEVDLRDPGRDYELYKYTCQELQRLMAEIQDLKSRGGKDVAIEIEERRIQSCVHFMTLKKLNRLAHIRLKKGRDQTHEAKQKVDAYHLQLQNLLYEVMHLQKEITKCLEFKSKHEEIDLVSLEEFYKEAPPDISKAEVTMGDPHQQTLARLDWELEQRKRLAEKYRECLSNKEKILKEIEVKKEYLSSLQPRLNSIMQASLPVQEYLFMPFDQAHKQYETARHLPPPLYVLFVQATAYGQACDKTLSVAIEGSVDEAKALFKPPEDSQDDESDSDAEEEQTTKRRRPTLGVQLDDKRKEMLKRHPLSVMLDLKCKDDSVLHLTFYYLMNLNIMTVKAKVTTAMELITPISAGDLLSPDSVLSCLYPGDHGKKTPNPANQYQFDKVGILTLSDYVLELGHPYLWVQKLGGLHFPKEQPQQTVIADHSLSASHMETTMKLLKTRVQSRLALHKQFASLEHGIVPVTSDCQYLFPAKVVSRLVKWVTIAHEDYMELHFTKDIVDAGLAGDTNLYYMALIERGTAKLQAAVVLNPGYSSIPPVFQLCLNWKGEKTNSNDDNIRAMEGEVNVCYKELCGPWPSHQLLTNQLQRLCVLLDVYLETESHDDSVEGPKEFPQEKMCLRLFRGPSRMKPFKYNHPQGFFSHR

SEQ ID NO: 874115 - protein, 683 aa, Homo sapiens [sequence omitted]

SEQ ID NO: 874116 - protein, 782 aa, Homo sapiens
MCSSSPSMQSLSCPPSFLQSHHATTSLGGLRAELPASTPRFRSAAPSLLPVLYGARASFAPPPAVAYSRCQVLGAVRCSALFKITYASSEATVPGHLHHLPQWNASCVKAHNNPCGGTTMSSESSKKRKPKEGKYYSEEAEVDLRDPGRDYELYKYTCQELQRLMAEIQDLKSRGGKDVAIEIEERRIQSCVHFMTLKKLNRLAHIRLKKGRDQTHEAKQKVDAYHLQLQNLLYEVMHLQKEITKCLEFKSKHEEIDLVSLEEFYKEAPPDISKAEVTMGDPHQQTLARLDWELEQRKRLAEKYRECLSNKEKILKEIEVKKEYLSSLQPRLNSIMQASLPVQEYLFMPFDQAHKQYETARHLPPPLYVLFVQATAYGQACDKTLSVAIEGSVDEAKALFKPPEDSQDDESDSDAEEEQTTKRRRPTLGVQLDDKRKEMLKRHPLSVMLDLKCKDDSVLHLTFYYLMNLNIMTVKAKVTTAMELITPISAGDLLSPDSVLSCLYPGDHGKKTPNPANQYQFDKVGILTLSDYVLELGHPYLWVQKLGGLHFPKEQPQQTVIADHSLSASHMETTMKLLKTRVQSRLALHKQFASLEHGIVPVTSDCQYLFPAKVVSRLVKWVTIAHEDYMELHFTKDIVDAGLAGDTNLYYMALIERGTAKLQAAVVLNPGYSSIPPVFQLCLNWKGEKTNSNDDNIRAMEGEVNVCYKELCGPWPSHQLLTNQLQRLCVLLDVYLETESHDDSVEGPKEFPQEKMCLRLFRGPSRMKPFKYNHPQGFFSHR

SEQ ID NO: 874117 - protein, 344 aa, Homo sapiens
MLKRHPLSVMLDLKCKDDSVLHLTFYYLMNLNIMTVKAKVTTAMELITPISAGDLLSPDSVLSCLYPGDHGKKTPNPANQYQFDKVGILTLSDYVLELGHPYLWVQKLGGLHFPKEQPQQTVIADHSLSASHMETTMKLLKTRVQSRLALHKQFASLEHGIVPVTSDCQYLFPAKVVSRLVKWVTIAHEDYMELHFTKDIVDAGLAGDTNLYYMALIERGTAKLQAAVVLNPGYSSIPPVFQLCLNWKGEKTNSNDDNIRAMEGEVNVCYKELCGPWPSHQLLTNQLQRLCVLLDVYLETESHDDSVEGPKEFPQEKMCLRLFRGPSRMKPFKYNHPQGFFSHR

SEQ ID NO: 874118 - protein, 171 aa, Homo sapiens
ADLCRDHEYGMTDAHEKYMELHFTKDIVDAGLAGDTNLYYMALIERGTAKLQAAVVLNPGYSSIPPVFQLCLNWKGEKTNSNDDNIRAMEGEVNVCYKELCGPWPSHQLLTNQLQRLCVLLDVYLETESHDDSVEGPKEFPQEKMCLRLFRGPSRMKPFKYNHPQGFFSHR

SEQ ID NO: 874119 - protein, 250 aa, Homo sapiens
MSSESSKKRKPKVIRSDGAPAEGKRNRSDTEQEGKYYSEEAEVDLRDPGRDYELYKYTCQELQRLMAEIQDLKSRGGKDVAIEIEERRIQSCVHFMTLKKLNRLAHIRLKKGRDQTHEAKQKVDAYHLQLQNLLYEVMHLQKEITKCLEFKSKHEEIDLVSLEEFYKEAPPDISKAEVTMGDPHQQTLARLDWELEQRKRLAEKYRECLSNKEKILKEIEVKKEYLSSLQPRLNSIMQVGPSGLLLCLHH

SEQ ID NO: 874120 - protein, 683 aa, Homo sapiens [sequence omitted]

SEQ ID NO: 874121 - protein, 683 aa, Homo sapiens [sequence omitted]

SEQ ID NO: 874122 - protein, 683 aa, Homo sapiens [sequence omitted]

SEQ ID NO: 874123 - protein, 683 aa, Homo sapiens [sequence omitted]

SEQ ID NO: 874124 - protein, 344 aa, Homo sapiens; identical to SEQ ID NO: 874117

SEQ ID NO: 874125 - protein, 72 aa, Homo sapiens
ATAYGQACGEYGAWVRTRGYGSSSCGRVNQLEAVPAQEISQSCPKPSGDRSFLPSALPSMAALTSWPKAGLT

SEQ ID NO: 874126 - protein, 122 aa, Homo sapiens
MNENKVRLKRMKTNLFPGSWGLKRSLYGVKPLFLNVLKLTLLQPEASRSALQVPECVGLLPASAPGECGVGVYRCDQGLRDWGAASPQHGLYFPTRSLPLPQLQSSFSITNTGITASIFLEV

SEQ ID NO: 874127 - protein, 586 aa, Homo sapiens
MALEIHMSDPMCLIENFNEQLKVNQEALEILSAITQPVVVVAIVGLYRTGKSYLMNKLAGKNKGFSVASTVQSHTKGIWIWCVPHPNWPNHTLVLLDTEGLGDVEKADNKNDIQIFALALLLSSTFVYNTVNKIDQGAIDLLHNVTELTDLLKARNSPDLDRVEDPADSASFFPDLVWTLRDFCLGLEIDGQLVTPDEYLENSLRPKQGSDQRVQNFNLPRLCIQKFFPKKKCFIFDLPAHQKKLAQLETLPDDELEPEFVQQVTEFCSYIFSHSMTKTLPGGIMVNGSRLKNLVLTYVNAISSGDLPCIENAVLALAQRENSAAVQKAIAHYDQQMGQKVQLPMETLQELLDLHRTSEREAIEVFMKNSFKDVDQSFQKELETLLDAKQNDICKRNLEASSDYCSALLKDIFGPLEEAVKQGIYSKPGGHNLFIQKTEELKAKYYREPRKGIQAEEVLQKYLKSKESVSHAILQTDQALTETEKKKKEAQVKAEAEKAEAQRLAAIQRQNEQMMQERERLHQEQVRQMEIAKQNWLAEQQKMQEQQMQEQAAQLSTTFQAQNRSLLSELQHAQRTVNNDDPCVLL

SEQ ID NO: 874128 - protein, 680 aa, Homo sapiens
MALEIHMSDPMCLIENFNEQLKVNQEALEILSAITQPVVVVAIVGLYRTGKSYLMNKLAGKNKGFSVASTVQSHTKGIWIWCVPHPNWPNHTLVLLDTEGLGDVEKADNKNDIQIFALALLLSSTFVYNTVNKIDQGAIDLLHNVTELTDLLKARNSPDLDRVEDPADSASFFPDLVWTLRDFCLGLEIDGQLVTPDEYLENSLRPKQGSDQRVQNFNLPRLCIQKFFPKKKCFIFDLPAHQKKLAQLETLPDDELEPEFVQQVTEFCSYIFSHSMTKTLPGGIMVNGSRLKNLVLTYVNAISSGDLPCIENAVLALAQRENSAAVQKAIAHYDQQMGQKVQLPMETLQELLDLHRTSEREAIEVFMKNSFKDVDQSFQKELETLLDAKQNDICKRNLEASSDYCSALLKDIFGPLEEAVKQGIYSKPGGHNLFIQKTEELKAKYYREPRKGIQAEEVLQKYLKSKESVSHAILQTDQALTETEKKKKGEKKVEIMQDRKKSINFKLNLAWPSWDVKLEQEWQRCFLAPQAYLTGMILHCGYLEGKNNPWEFYPGSWNNHKQKWEAEGRGTLILEKIIFFSSEAQVKAEAEKAEAQRLAAIQRQNEQMMQERERLHQEQVRQMEIAKQNWLAEQQKMQEQQMQEQAAQLSTTFQAQNRSLLSELQHAQRTVNNDDPCVLL

SEQ ID NO: 874129 - protein, 405 aa, Homo sapiens
MERLQKQPLTSPGSVSPSRDSSVPGSPSSIVAKMDNQVLGYKDLAAIPKDKAILDIERPDLMIYEPHFTYSLLEHVELPRSRERSLSPKSTSPPPSPEVWADSRSPGIISQASAPRTTGTPRTSLPHFHHPETSRPDSNIYKKPPIYKQRESVGGSPQTKHLIEDLIIESSKFPAAQPPDPNQPAKIETDYWPCPPSLAVVETEWRKRKASRRGAEEEEEEEDDDSGEEMKALRERQREELSKVTSNLGKMILKEEMEKSLPIRRKTRSLPDRTPFHTSLHQGTSKSSSLPAYGRTTLSRLQSTEFSPSGSETGSPGLQNGEGQRGRMDRGNSLPCVLEQKIYPYEMLVVTNKGRTKLPPGVDRMRLERHLSAEDFSRVFAMSPEEFGKLALWKRNELKKKASLF

SEQ ID NO: 874130 - protein, 320 aa, Homo sapiens
MERLQKQPLTSPGSVSPSRDSSVPGSPSSIVAKMDNQVLGYKDLAAIPKDKAILDIERPDLMIYEPHFTYSLLEHVELPRSRERSLSPKSTSPPPSPEVWADSRSPGIISQASAPRTTGTPRTSLPHFHHPETSRPDSNIYKKPPIYKQRESVGGSPQTKHLIEDLIIESSKFPAAQPPDPNQPAKIETDYWPCPPSLAVVETEWRKRKASRRGAEEEEEEEDDDSGEEMKALRERQREELSKVTSNLGKMILKEEMEKSLPIRRKTRSLPDRTPFHTSLHQGTSKSSSLPAYGRTTLSRLQSTEFSPSGSETGSPDLSL

SEQ ID NO: 874131 - protein, 80 aa, Homo sapiens
VPVGIAGFAAIVAYGLYKLKKQGNTKMSIHLIHMRVAAQGFVVGAMTVGMGYSMYREFWAKPKPEKKRCCLGLVGGACFS

SEQ ID NO: 874132 - protein, 380 aa, Homo sapiens
MERLQKAKMDNQVLGYKDLAAIPKDKAILDIERPDLMIYEPHFTYSLLEHVELPRSRERSLSPKSTSPPPSPEVWADSRSPGIISQASAPRTTGTPRTSLPHFHHPETSRPDSNIYKKPPIYKQRESVGGSPQTKHLIEDLIIESSKFPAAQPPDPNQPAKIETDYWPCPPSLAVVETEWRKRKASRRGAEEEEEEEDDDSGEEMKALRERQREELSKVTSNLGKMILKEEMEKSLPIRRKTRSLPDRTPFHTSLHQGTSKSSSLPAYGRTTLSRLQSTEFSPSGSETGSPGLQNGEGQRGRMDRGNSLPCVLEQKIYPYEMLVVTNKGRTKLPPGVDRMRLERHLSAEDFSRVFAMSPEEFGKLALWKRNELKKKASLF

SEQ ID NO: 874133 - protein, 380 aa, Homo sapiens; identical to SEQ ID NO: 874132

SEQ ID NO: 874134 - protein, 380 aa, Homo sapiens; identical to SEQ ID NO: 874132

SEQ ID NO: 874135 - protein, 380 aa, Homo sapiens
  misc_feature (67)..(67): Xaa can be any naturally occurring amino acid
MERLQKAKMDNQVLGYKDLAAIPKDKAILDIERPDLMIYEPHFTYSIMEKVEMNEKKREIDVKKIKXKKKITEVWADSRSPGIISQASAPRTTGTPRTSLPHFHHPETSRPDSNIYKKPPIYKQRESVGGSPQTKHLIEDLIIESSKFPAAQPPDPNQPAKIETDYWPCPPSLAVVETEWRKRKASRRGAEEEEEEEDDDSGEEMKALRERQREELSKVTSNLGKMILKEEMEKSLPIRRKTRSLPDRTPFHTSLHQGTSKSSSLPAYGRTTLSRLQSTEFSPSGSETGSPGLQNGEGQRGRMDRGNSLPCVLEQKIYPYEMLVVTNKGRTKLPPGVDRMRLERHLSAEDFSRVFAMSPEEFGKLALWKRNELKKKASLF

SEQ ID NO: 874136 - protein, 405 aa, Homo sapiens; identical to SEQ ID NO: 874129

SEQ ID NO: 874137 - protein, 405 aa, Homo sapiens; identical to SEQ ID NO: 874129

SEQ ID NO: 874138 - protein, 174 aa, Homo sapiens
MERLQKQPLTSPGSVSPSRDSSVPGSPSSIVAKMDNQVLGYKDLAAIPKDKAILDIERPDLMIYEPHFTYSLLEHVELPRSRERSLSPKSTSPPPSPEVWADSRSPGIISQASAPRTTGTPRTSLPHFHHPETSRPDSNIYKKPPIYKQRESVGGSPQTKHLIEDLIIESSKFP

SEQ ID NO: 874139 - protein, 405 aa, Homo sapiens; identical to SEQ ID NO: 874129

SEQ ID NO: 874140 - protein, 144 aa, Homo sapiens
YAVEAVGDRLWHEQTPFETSRPDSNIYKKPPIYKQRESVGGSPQTKHLIEDLIIESSKFPAAQPPDPNQPAKIETDYWPCPPSLAVVETEWRKRKASRRGAEEEEEEEDDDSGEEMKALRERQREELSKVTSNLGKGDLDGQGD

SEQ ID NO: 874141 - protein, 380 aa, Homo sapiens; identical to SEQ ID NO: 874132

SEQ ID NO: 874142 - protein, 380 aa, Homo sapiens; identical to SEQ ID NO: 874132

SEQ ID NO: 874143 - protein, 380 aa, Homo sapiens; identical to SEQ ID NO: 874132

SEQ ID NO: 874144 - protein, 248 aa, Homo sapiens
MTPRVGPDLIIESSKFPAAQPPDPNQPAKIETDYWPCPPSLAVVETEWRKRKASRRGAEEEEEEEDDDSGEEMKALRERQREELSKVTSNLGKMILKEEMEKSLPIRRKTRSLPDRTPFHTSLHQGTSKSSSLPAYGRTTLSRLQSTEFSPSGSETGSPGLQNGEGQRGRMDRGNSLPCVLEQKIYPYEMLVVTNKGRTKLPPGVDRMRLERHLSAEDFSRVFAMSPEEFGKLALWKRNELKKKASLF

SEQ ID NO: 874145 - protein, 405 aa, Homo sapiens; identical to SEQ ID NO: 874129

SEQ ID NO: 874146 - protein, 77 aa, Homo sapiens
ITTTTTSHRSYQSSVTKTLSQEKSKETMQEGKANTGNSSPKYRGPQTILLIFRGRDTLTTHVHFSKQRTHSLVPEPF

SEQ ID NO: 874147 - protein, 874 aa, Homo sapiens
SIQRWTFAWWPCLILALLSSLAASGFPRSPFRLLGGKVANGIEVYSTKINSKVTSRFAHNVVTMRAVNRADTAKEVSFDVELPKTAFITNFTLTIDGVTYPGNVKEKEVAKKQYAGRKLEKFTVSVNVAAGSKVTFELTYEELLKRHKGKYEMYLKVQPKQLVKHFEIEVDIFEPQGISMLDAEASFITNDLLGSALTKSFSGKKGHVSFKPSLDQQRSCPTCTDSLLNGDFTITYDVNRESPGNVQIVNGYFVHFFAPQGLPVVPKNVAFVIDISGSMAGRKLEQTKEALLRILEDMKEEDYLNFILFSGDVSTWKEHLVQATPENLQEARTFVKSMEDKGMTNINDGLLRGISMLNKAREEHRIPERSTSIVIMLTDGDANVGESRPEKIQENVRNAIGGKFPLYNLGFGNNLNYNFLENMALENHGFARRIYEDSDADLQLQGFYEEVANPLLTGVEMEYPENAILDLTQNTYQHFYDGSEIVVAGRLVDEDMNSFKADVKGHGATNDLTFTEEVDMKEMEKALQERDYIFGNYIERLWAYLTIEQLLEKRKNAHGEEKENLTARALDLSLKYHFVTPLTSMVVTKPEDNEDERAIADKPGEDAEATPVSPAMSYLTSYQPPQNPYYYVDGDPHFIIQIPEKDDALCFNIDEAPGTVLRLIQDAVTGLTVNGQITGDKRGSPDSKTRKTYFGKLGIANAQMDFQVEVTTEKITLWNRAVPSTFSWLDTVTVTQDGLSMMINRKNMVVSFGDGVTFVVVLHQVWKKHPVHRDFLGFYVVDSHRMSAQTHGLLGQFFQPFDFKVSDIRPGSDPTKPDATLVVKNHQLIVTRGSQKDYRKDASIGTKVVCWFVHNNGEGLIDGVHTDYIVPNLF

SEQ ID NO: 874148 - protein, 854 aa, Homo sapiens
SIQRWTFAWWPCLILALLSSLAASGFPRSPFRLLGGKVANGIEVYSTKINSKVTSRFAHNVVTMRAVNRADTAKEVSFDVELPKTAFITNFTLTIDGVTYPGNVKEKEVAKKQYAGRKLEKFTVSVNVAAGSKVTFELTYEELLKRHKGKYEMYLKVQPKQLVKHFEIEVDIFEPQGISMLDAEASFITNDLLGSALTKSFSGKKGHVSFKPSLDQQRSCPTCTDSLLNGDFTITYDVNRESPGNVQIVNGYFVHFFAPQGLPVVPKNVAFVIDISGSMAGRKLEQTKEALLRILEDMKEEDYLNFILFSGDVSTWKEHLVQATPENLQEARTFVKSMEDKGMTNINDGLLRGISMLNKAREEHRIPERSTSIVIMLTDGDANVGESRPEKIQENVRNAIGGKFPLYNLGFGNNLNYNFLENMALENHGFARRIYEDSDADLQLQGFYEEVANPLLTGVEMEYPENAILDLTQNTYQHFYDGSEIVVAGRLVDEDMNSFKADVKGHGATNDLTFTEEVDMKEMEKALQERDYIFGNYIERLWAYLTIEQLLEKRKNAHGEEKENLTARALDLSLKYHFVTPLTSMVVTKPEDNEDERAIADKPGEDAEATPVSPAMSYLSEYMLQKTMPSASTSMKPQAQCCALFRMQSQASQLMGRSLATREAALTPRPERLTLENWASQCSDGLPGGGDNGEDHPVEQGRASTFSWLDTVTVTQDGLSMMINRKNMVVSFGDGVTFVVVLHQVWKKHPVHRDFLGFYVVDSHRMSAQTHGLLGQFFQPFDFKVSDIRPGSDPTKPDATLVVKNHQLIVTRGSQKDYRKDASIGTKVVCWFVHNNGEGLIDGVHTDYIVPNLF

SEQ ID NO: 874149 - protein, 874 aa, Homo sapiens; identical to SEQ ID NO: 874147

SEQ ID NO: 874150 - protein, 257 aa, Homo sapiens
SSGASQGHLLSSALSPFVSAASYQPPQNPYYYVDGDPHFIIQIPEKDDALCFNIDEAPGTVLRLIQDAVTGLTVNGQITGDKRGSPDSKTRKTYFGKITLWNRAVPSTFSWLDTVTVTQDGLSMMINRKNMVVSFGDGVTFVVVLHQVWKKHPVHRDFLGFYVVDSHRMSAQTHGLLGQFFQPFDFKVSDIRPGSDPTKPDATLVVKNHQLIVTRGSQKDYRKDASIGTKVVCWFVHNNGEGLIDGVHTDYIVPNLF

SEQ ID NO: 874151 - protein, 709 aa, Homo sapiens
SIQRWTFAWWPCLILALLSSLAASGFPRSPFRLLGGKVANGIEVYSTKINSKVTSRFAHNVVTMRAVNRADTAKEVSFDVELPKTAFITNFTLTIDGVTYPGNVKEKEVAKKQYAGRKLEKFTVSVNVAAGSKVTFELTYEELLKRHKGKYEMYLKVQPKQLVKHFEIEVDIFEPQGISMLDAEASFITNDLLGSALTKSFSGKKGHVSFKPSLDQQRSCPTCTDSLLNGDFTITYDVNRESPGNVQIVNGYFVHFFAPQGLPVVPKNVAFVIDISGSMAGRKLEQTKEALLRILEDMKEEDYLNFILFSGDVSTWKEHLVQATPENLQEARTFVKSMEDKGMTNINDGLLRGISMLNKAREEHRIPERSTSIVIMLTDGDANVGESRPEKIQENVRNAIGGKFPLYNLGFGNNLNYNFLENMALENHGFARRIYEDSDADLQLQGFYEEVANPLLTGVEMEYPENAILDLTQNTYQHFYDGSEIVVAGRLVDEDMNSFKADVKGHGATNDLTFTEEVDMKEMEKALQERDYIFGNYIERLWAYLTIEQLLEKRKNAHGEEKENLTARALDLSLKYHFVTPLTSMVVTKPEDNEDERAIADKPGEDAEATPVSPAMSYLTSYQPPQNPYYYVDGDPHFIIQIPEKDDALCFNIDEAPGTVLRLIQDAVTGLTVNGQITGDKRGSPDSKTRKTYFGKLGIAMLRWTSRWR

SEQ ID NO: 874152 - protein, 895 aa, Homo sapiens
SIQRWTFAWWPCLILALLSSLAASGFPRSPFRLLGGNGASRKGKVANGIEVYSTKINSKVTSRFAHNVVTMRAVNRADTAKEVSFDVELPKTAFITNFTLTIDGVTYPGNVKEKEVAKKQYEKAVSQGKTAGLVNPGRKLEKFTVSVNVAAGSKVTFELTYEELLKRHKGKYEMYLKVQPKQLVKHFEIEVDIFEPQGISMLDAEASFITNDLLGSALTKSFSGKKGHVSFKPSLDQQRSCPTCTDSLLNGDFTITYDVNRESPGNVQIVNGYFVHFFAPQGLPVVPKNVAFVIDISGSMAGRKLEQTKEALLRILEDMKEEDYLNFILFSGDVSTWKEHLVQATPENLQEARTFVKSMEDKGMTNINDGLLRGISMLNKAREEHRIPERSTSIVIMLTDGDANVGESRPEKIQENVRNAIGGKFPLYNLGFGNNLNYNFLENMALENHGFARRIYEDSDADLQLQGFYEEVANPLLTGVEMEYPENAILDLTQNTYQHFYDGSEIVVAGRLVDEDMNSFKADVKGHGATNDLTFTEEVDMKEMEKALQERDYIFGNYIERLWAYLTIEQLLEKRKNAHGEEKENLTARALDLSLKYHFVTPLTSMVVTKPEDNEDERAIADKPGEDAEATPVSPAMSYLTSYQPPQNPYYYVDGDPHFIIQIPEKDDALCFNIDEAPGTVLRLIQDAVTGLTVNGQITGDKRGSPDSKTRKTYFGKLGIANAQMDFQVEVTTEKITLWNRAVPSTFSWLDTVTVTQDGLSMMINRKNMVVSFGDGVTFVVVLHQVWKKHPVHRDFLGFYVVDSHRMSAQTHGLLGQFFQPFDFKVSDIRPGSDPTKPDATLVVKNHQLIVTRGSQKDYRKDASIGTKVVCWFVHNNGEGLIDGVHTDYIVPNLF

SEQ ID NO: 874153 - protein, 856 aa, Homo sapiens
SIQRWTFAWWPCLILALLSSLAASGFPRSPFRLLGGKVANGIEVYSTKINSKVTSRFAHNVVTMRAVNRADTAKEVSFDVELPKTAFITNFTLTIDGVTYPGNVKEKEVAKKQYAGRKLEKFTVSVNVAAGSKVTFELTYEELLKRHKGKYEMYLKVQPKQLVKHFEIEVDIFEPQGISMLDAEASFITNDLLGSALTKSFSGKKGHVSFKPSLDQQRSCPTCTDSLLNGDFTITYDVNRESPGNVQIVNGYFVHFFAPQGLPVVPKNVAFVIDISGSMAGRKLEQTKEALLRILEDMKEEDYLNFILFSGDVSTWKEHLVQATPENLQEARTFVKSMEDKGMTNINDGLLRGISMLNKAREEHRIPERSTSIVIMLTDGDANVGESRPEKIQENVRNAIGGKFPLYNLGFGNNLNYNFLENMALENHGFARRIYEDSDADLQLQGFYEEVANPLLTGVEMEYPENAILDLTQNTYQHFYDGSEIVVAGRLVDEDMNSFKADVKGHGATNDLTFTEEVDMKEMEKALQERDYIFGNYIERLWAYLTIEQLLEKRKNAHGEEKENLTARALDLSLKYHFVTPLTSMVVTKPEDNEDERAIADKPGEDAEATPVSPAMSYLTSYQPPQNPYYYVDGDPHFIIQIPEKDDALCFNIDEAPGTVLRLIQDAVTGLTVNGQITGDKRGSPDSKTRKTYFGKITLWNRAVPSTFSWLDTVTVTQDGLSMMINRKNMVVSFGDGVTFVVVLHQVWKKHPVHRDFLGFYVVDSHRMSAQTHGLLGQFFQPFDFKVSDIRPGSDPTKPDATLVVKNHQLIVTRGSQKDYRKDASIGTKVVCWFVHNNGEGLIDGVHTDYIVPNLF

SEQ ID NO: 874154 - protein, 874 aa, Homo sapiens; identical to SEQ ID NO: 874147

SEQ ID NO: 874155 - protein, 874 aa, Homo sapiens; identical to SEQ ID NO: 874147

SEQ ID NO: 874156 - protein, 653 aa, Homo sapiens
SIQRWTFAWWPCLILALLSSLAASGFPRSPFRLLGGKVANGIEVYSTKINSKVTSRFAHNVVTMRAVNRADTAKEVSFDVELPKTAFITNFTLTIDGVTYPGNVKEKEVAKKQYAGRKLEKFTVSVNVAAGSKVTFELTYEELLKRHKGKYEMYLKVQPKQLVKHFEIEVDIFEPQGISMLDAEASFITNDLLGSALTKSFSGKKGHVSFKPSLDQQRSCPTCTDSLLNGDFTITYDVNRESPGNVQIVNGYFVHFFAPQGLPVVPKNVAFVIDISGSMAGRKLEQTKEALLRILEDMKEEDYLNFILFSGDVSTWKEHLVQATPENLQEARTFVKSMEDKGMTNINDGLLRGISMLNKAREEHRIPERSTSIVIMLTDGDANVGESRPEKIQENVRNAIGGKFPLYNLGFGNNLNYNFLENMALENHGFARRIYEDSDADLQLQGFYEEVANPLLTGVEMEYPENAILDLTQNTYQHFYDGSEIVVAGRLVDEDMNSFKADVKGHGATNDLTFTEEVDMKEMEKALQERDYIFGNYIERLWAYLTIEQLLEKRKNAHGEEKENLTARALDLSLKYHFVTPLTSMVVTKPEDNEDERAIADKPGEDAEGMEAGTRRPPVLGTLPGCPVEEWARLGRPRPAEVGHLKENGVWGE

SEQ ID NO: 874157 - protein, 213 aa, Homo sapiens
MPNPSSTSSPYPLPEEIRNLLADVETSVARYTETRTTLSTKAKEPERIPYLPKTTHDVKSNLLFSELSKDQKVTARTTGATNTDDPFAWASRHYFISLRHDTDSQTDEAPLCCTPKFPPIAAQDLPFVLTGWLPLHTRITRLPAFWRSDHSAQHRMRVTSSAYLPAYSLPPFIAHLTTPTTPHTTSVELRPHHLPTPLPPIAIPLPTHPPDHP

SEQ ID NO: 874158 - protein, 241 aa, Homo sapiens
FFFLEVRIAAVEALCMLAQSSPSFAEKCLDFLVDMFNDEIEEVRLQSIHTMRKISNNITLREDQLDTVLAVLEDSSRDIREALHELLCCTNVSTKEGIHLALVELLKNLTKYPTDRDSIWKCLKFLGSRHPTLVLPLVPELLSTHPFFDTAEPDMDDPAYIAVLVLIFNAAKTCPTMPALFSDHTFRHYAYLRDSLSHLVPALRLPGRKLGVLQVVSSQDHNSRGLFPRRFLKAKPLDTVL

SEQ ID NO: 874159 - protein, 213 aa, Homo sapiens
FFFLEVRIAAVEALCMLAQSSPSFAEKCLDFLVDMFNDEIEEVRLQSIHTMRKISNNITLREDQLDTVLAVLEDSSRDIREALHELLCCTNVSTKEGIHLALVELLKNLTKCLKFLGSRHPTLVLPLVPELLSTHPFFDTAEPDMDDPAYIAVLVLIFNAAKTCPTMPALFSDHTFRHYAYLRRQVMEGDLQNGNFMYSGVGGIKQVGGYTFT

SEQ ID NO: 874160 - protein, 230 aa, Homo sapiens
MTTTGETRTRKNGSAKQERGRQTSPPEKNKKYGSKTPRRKNKKQTDRQKIPEKTKNTKRDQTKERKEDATKKRNKKKKKTEKTRRRRQTKKNKRPQRPTARGDRPAPPATQKTTRTKKRKQKKDSSGGNAEDKERQCRYYRRGKRRKEPSSDCTDNKRTPERAETGAREEDSTEEENRAAEEKSGDRERRETADKKTRTEQHKKKPGKEPTKRNDKRRREQDTAQKDEER

SEQ ID NO: 874161 - protein, 202 aa, Homo sapiens
MNLDSIHRLIEETQIFQMQQSSIKSRGDMVAPASPPRDTCNTCFPLHGLQSHAAHNFCAHSYNTNKWDICEELRLRELEEVKARAAQMEKTMRWWSDCTANWREKWSKVRAERNSAREEGRQLRIKLEMAMKELSTLKKKQSLPPQKEALEANVTQDLKLPGFVEESCEHTDQFQLSSQMHESIREYSVQRQFSTKEDTNNK

SEQ ID NO: 874162 - protein, 202 aa, Homo sapiens
MNLDSIHRLIEETQIFQMQQSSIKSRGDMVAPASPPRDTCNTCFPLHGLQSHAAHNFCAHSYNTNKWDICEELRLRELEEVKARAAQMEKTMRWWSDCTANWREKWSKVRAERNSAREEGRQLRIKLEMAMKELSTLKKKQSLPPQKEALEANVTQDLKLPGFVEESCEHTDQFQLSSQMHESIREYLVQRQFSTKEDTNNK

SEQ ID NO: 874163 - protein, 738 aa, Homo sapiens
MEKSRMNLPKGPDTLCFDKDEFMKEDFDVDHFVSDCRKRVQLEELRDDLELYYKLLKTAMVELINKDYADFVNLSTNLVGMDKALNQLSVPLGQLREEVLSLRSSVSEGIRAVDERMSKQEDIRKKKMCVLRLIQVIRSVEKIEKILNSQSSKETSALEASSPLLTGQILERIATEFNQLQFHAVQSKGMPLLDKVRPRIAGITAMLQQSLEGLLLEGLQTSDVDIIRHCLRTYATIDKTRDAEALVGQVLVKPYIDEVIIEQFVESHPNGLQVMYNKLLEFVPHHCRLLREVTGGAISSEKGNTVPGYDFLVNSVWPQIVQGLEEKLPSLFNPGNPDAFHEKYTISMDFVRRLERQCGSQASVKRLRAHPAYHSFNKKWNLPVYFQIRFREIAGSLEAALTDVLEDAPAESPYCLLASHRTWSSLRRCWSDEMFLPLLVHRLWRLTLQILARYSVFVNELSLRPISNESPKEIKKPLVTGSKEPSITQGNTEDQGSGPSETKPVVSISRTQLVYVVADLDKLQEQLPELLEIIKPKLEMIGFKNFSSISAALEDSQSSFSACVPSLSSKIIQDLSDSCFGFLKSALEVPRLYRRTNKEVPTTASSYVDSALKPLFQLQSGHKDKLKQAIIQQWLEGTLSESTHKYYETVSDVLNSVKKMEESLKRLKQARKTTPANPVGPSGGMSDDDKIRLQLALDVEYLGEQIQKLGLQASDIKSFSALAELVAAAKDQATAEQP

SEQ ID NO: 874164 - protein, 145 aa, Homo sapiens
PVHLYLLPSSFQEVPTTASSYVDSALKPLFQLQSGHKDKLKQAIIQQWLEGTLSESTHKYYETVSDVLNSVKKMEESLKRLKQARKTTPANPVGPSGGMSDDDKIRLQLALDVEYLGEQVTHQPPAAPASLKPNSESRAVTWWLA

SEQ ID NO: 874165 - protein, 656 aa, Homo sapiens
MEKSRMNLPKGPDTLCFDKDEFMKEDFDVDHFVSDCRKRVQLEELRDDLELYYKLLKTAMVELINKDYADFVNLSTNLVGMDKALNQLSVPLGQLREEVLSLRSSVSEGIRAVDERMSKQEDIRKKKMCVLRLIQVIRSVEKIEKILNSQSSKETSALEASSPLLTGQILERIATEFNQLQFHAVQSKGMPLLDKVRPRIAGITAMLQQSLEGLLLEGLQTSDVDIIRHCLRTYATIDKTRDAEALVGQVLVKPYIDEVIIEQFVESHPNGLQVMYNKLLEFVPHHCRLLREVTGGAISSEKGNTVPGYDFLVNSVWPQIVQGLEEKLPSLFNPGNPDAFHEKYTISMDFVRRLERQCGSQASVKRLRAHPAYHSFNKKWNLPVYFQIRFREIAGSLEAALTDVLEDAPAESPYCLLASHRTWSSLRRCWSDEMFLPLLVHRLWRLTLQILARYSVFVNELSLRPISNESPKEIKKPLVTGSKEPSITQGNTEDQGSGPSETKPVVSISRTQLVYVVADLDKLQEQLPELLEIIKPKLEMIGFKNFSSISAALEDSQSSFSACVPSLSSKIIQDLSDSCFGFLKSALEVPRLYRRTNKEVPTTASSYVDSALKPLFQLQSGHKDKLKQAIIQQWLEGTLSESTHKYYETVSDVLFQ

SEQ ID NO: 874166 - protein, 106 aa, Homo sapiens
MEKSRMNLPKGPDTLCFDKDEFMKVRAASAPRSRAMRVPLPCALCGVSSVGCSCLRTLSVRSSAETSLHFAMSLLASGLAGAAWRKHFCKIVRVTWKGLKVLGKWF

SEQ ID NO: 874167 - protein, 248 aa, Homo sapiens
MEKSRMNLPKGPDTLCFDKDEFMKEDFDVDHFVSDCRKRVQLEELRDDLELYYKLLKTAMVELINKDYADFVNLSTNLVGMDKALNQLSVPLGQLREEVLSLRSSVSEGIRAVDERMSKQEDIRKKKMCVLRLIQVIRSVEKIEKILNSQSSKETSALEASSPLLTGQILERIATEFNQLQFHAVQSKGMPLLDKVRPRIAGITAMLQQSLEGLLLEGLQTSDGDIIRDLVADLRQRLDQRTGDGGRP

SEQ ID NO: 874168 - protein, 116 aa, Homo sapiens
MEKSRMNLPKGPDTLCFDKDEFMKEDFDVDHFVSDCRKRVQLEELRDDLELYYKLLKTAMVELINKDYADFVNLSTNLVGMDKALNQLSVPLGQLREEVLVSFPNNIKQFTLKHDM

SEQ ID NO: 874169 - protein, 738 aa, Homo sapiens; identical to SEQ ID NO: 874163

SEQ ID NO: 874170 - protein, 104 aa, Homo sapiens
PCTSCQCCPARQCHPSSQLQALVFLLHTELRGHFPVLPEIFHQGAPSHHQGKQGLESLLMCKTLIQVGRKSLSGHKTRQHLQIFLQKGPFSQIQPRQMFKLEHR

SEQ ID NO: 874171 - protein, 124 aa, Homo sapiens
RDHESSQGRAQVVRRGGQGAWLRHPGPTWLGGHHWVGVSYYGRGRLGTLTERLLPTPTSQAWENCPHCAAGVSAPTGIRGRPGLKGTPGPTSTFCKARQGSGMLPGGCGWATAWGLSHKLRFGK

SEQ ID NO: 874172 - protein, 114 aa, Homo sapiens
MATLGHTFPFYAGPKPTFPMDTTLASIIMIFLTALATFIVILPGIRGKTRLFWLLRVVTSLFIGAAILAVNFSSEWSVGQVSTNTSYKAFSSEWISADIGLQVGLGGVNITLTG

SEQ ID NO: 874173 - protein, 140 aa, Homo sapiens
MATLGHTFPFYAGPKPTFPMDTTLASIIMIFLTALATFIVILPGIRGKTRLFWLLRVVTSLFIGAAILGTPVQQLNETINYNEEFTWRLGENYAEEYAKALEKGLPDPVLYLAEKFTPRSPCGLYRQYRLAGHYTSAMLW

SEQ ID NO: 874174 - protein, 921 aa, Homo sapiens
MESHPVSSQVQVIVMPQPPEVAEITGTCYHAQLIFVVLVETVIWFGCVPTQSQLELYLQEFPCVVGGTQGRQLNHRAGLFCAILVIVSKSHADLIGLLGVSAFASSSFFLLPLPCKKCLSPPAMILRLPQPCGTVSPIKPLFVPSFGYIFFSSVKMECTHTSALWAHTPALTHSSGPMGTRAHTRQSCGCTHLHSHIHQDPWAHVHTRQHRERTHLHSRTHLHSRTQDRRTYVHTHISTVGAHTCTQRTRQDPRADVHTCTSTRGHVHAHISTHGHTWMHTSVPWAHTHAPTPDGFGLLGACFALRVSKSGGRHLGWGHSMVLRSPVSPGPTCSQPWVPKCCSHWSLCPTHHGQGCLNRAESRVMQGWGVEALPRGSSQLWLGWALPSLSCCETQEPWGRTAVCIRAVVKLQIPKCDLETTLAGEIYPGPLGLSLPSPSTVRDRLRGVPPHLCVASAQQAFLPIAKGRARQIHCVVRASPDPPTPVSSHGEKGGVSLGPFFFYEVTDATQVGAQLTHLISGVAPSAGGCPRLDAVACRPPFLQSLGRQHPCAHVHTGREHCPVSQVVVGGVGAKVWLGPECLRTPPSNFPWCWDAAASWTLALKCHLHLPPQTVSSRQGQAVAVTLAAARGLGGCWVVAWTLPSCLLVSRRGLAGLGPPPPHWAPDSQGAVSSLGMALISERDCLWPFFCIPYENSSLLDALRRQAEGWKGRGRAQQRPPSDDGGRPFQPLSGHRFIPSPISFLALLSKSCVCGGGLASLPASRLFPPIPLWFSQASSGLARNVGELGGGGHRKCLPSSDNSSSCRGRGEGRAEWVRRGRAEGGSRLGGRVFSCPPRHWAWPSPTDRTVLSSLFYFLLETGSHSVAQAGVQSCDWPQSDSPTSAFQSTGITAVSQCAQPLPKFTPVWASSEGNWPVMRWSL

SEQ ID NO: 874175 - protein, 140 aa, Homo sapiens
LCSCALPAFPWQAFYWLNKDTNFSSVFANTWFRQVLGPSQAWGCRLTVLLSAFQPGPHMLGLQVTTTHDGCAAWGAVPRGRRGWCGAASRSLHQPPEGPCPGRGRVCSAVWVVSPPQGPPGWCPLLPHGRKSQRHLATSL

SEQ ID NO: 874176 - protein, 359 aa, Homo sapiens
GSRAMSRACKKCLSPPAMILRLPQPCGTVSPIKPLFVPSFGYIFFSSVKMECTHTSALWAHTPALTHSSGPMGTRAHTRQSCGCTHLHSHIHQDPWAHVHTRQHRERTHLHSRTHLHSRTQDRRTYVHTHISTVGAHTCTQRTRQDPRADVHTCTSTRGHVHAHISTHGHYMDAHISTMGTHTCTHSRWLRLAGCLLRPRVSKSGGRHLGWGHSMVLRSPVSPGPTCSQPWVPKCCSHWSLCPTHHGQGCLNRAESRVMQGWGVEALPRGSSQLWLGWALPSLSCCETQEPWGRTAVCIRAVVKLQIPKCDLETTLAGEIYPGPLGLSLPSPSTVRDRLRGVPPHLCVASAQQACPAHC

SEQ ID NO: 874177 - protein, 89 aa, Homo sapiens
RSGWGRGRGRGLQMPPPPPFLVRGPHGVGEQEESIRIMKPQPATHCGGTEERGPVPSPPDGSEERSPARPGGGGGGGGGGDGGNPKAAR

SEQ ID NO: 874178 - protein, 81 aa, Homo sapiens
MKDFPGLVQESRASADAQEARQRTSMIRDTPAVSEVPGSQPPSHPRWCGPSAGHDGTTITGYQAGNLAADQNGPKIGEGGI

SEQ ID NO: 874179 - protein, 522 aa, Homo sapiens
VRAGPRSALPSGSWRPSLPCSAVAARTGAREPGWGQGLEPRDQRLRCPGEAMELSSKKKLHALSLAEKIQVLELLDESKMSQSEVARRFQVSQPQISRICKNKEKLLADWCSGTANRERKRKRESKYSGIDEALLCWYHIARAKAWDVTGPMLLHKAKELADIMGQDFVPSIGWLVRWKRRNNVGFGARHVLAPSFPPEPPPPGLTSQAQLPLSLKDFSPEDVFGCAELPLLYRAVPGSFGACDQVQVLLCANSRGTEKRRVLLGGLQAAPRCFFGIRSEALPASYHPDLGIPWLEWLAQFDRDMGQQGRQVALLLAARVVEELAGLPGLYHVKLLPLAASSTTPPLPSSVVRAFKAHYRHRLLGKLAAIQSERDGTSLAEAGAGITVLDALHVASAAWAKVPPQLIFSSFIQEGLAPGKTPPSSHKTSEMPPVPGGLSLEEFSRFVDLEGEEPRSGVCKEEIGTEDEKGDREGAFEPLPTKADALRALGTLRRWFECNSTSPELFEKFYDCEEEVERLCCL

SEQ ID NO: 874180 - protein, 522 aa, Homo sapiens; identical to SEQ ID NO: 874179

SEQ ID NO: 874181 - protein, 74 aa, Homo sapiens
GVVGHHAPTDPVGQGQVRRLPRQGHLDAGGAQQDEVGQLPFPDPLQALVDLGGVHLSLDGVEDGDVGVVGLAVS

SEQ ID NO: 874182 - protein, 404 aa, Homo sapiens
SFKPLKMENETVSELNQTQLQPRAVVALEYQVVTILLVLIICGLGIVGNIMVVLVVMRTKHMRTPTNCYLVSLAVADLMVLVAAGLPNITDSIYGSWVYGYVGCLCITYLQYLGINASSCSITAFTIERYIAICHPIKAQFLCTFSRAKKIIIFVWAFTSLYCMLWFFLLDLNISTYKDAIVISCGYKISRNYYSPIYLMDFGVFYVVPMILATVLYGFIARILFLNPIPSDPKENSKTWKNDSTHQNTNLNVNTSNRCFNSTVSSRKQVTKMLAVVVILFALLWMPYRTLVVVNSFLSSPFQENWFLLFCRICIYLNSAINPVIYNLMSQKFRAAFRKLCNCKQKPTEKPANYSVALNYSVIKESDHFSTELDDITVTDTYLSATKVSFDDTCLASEVSFSQS

SEQ ID NO: 874183 - protein, 150 aa, Homo sapiens
MSGSMATAEASGSDGKGQEVETSVTYYRLEEVAKRNSLKELWLVIHGRVYDVTRFLNEHPGGEEVLLEQAGVDASESFEDVGHSSDAREMLKQYYIGDIHPSDLKPESGSKDPSKNDTCKSCWAYWILPIIGAVLLGFLYRYYTSESKSS

SEQ ID NO: 874184 - protein, 150 aa, Homo sapiens; identical to SEQ ID NO: 874183

SEQ ID NO: 874185 - protein, 150 aa, Homo sapiens; identical to SEQ ID NO: 874183

SEQ ID NO: 874186 - protein, 150 aa, Homo sapiens; identical to SEQ ID NO: 874183

SEQ ID NO: 874187 - protein, 150 aa, Homo sapiens; identical to SEQ ID NO: 874183

SEQ ID NO: 874188 - protein, 114 aa, Homo sapiens
VWPIVLAPRGKNATGRIRGEGTSAAPKQVSSFRPKVDASESFEDVGHSSDAREMLKQYYIGDIHPSDLKPESGSKDPSKNDTCKSCWAYWILPIIGAVLLGFLYRYYTSESKSS

SEQ ID NO: 874189 - protein, 127 aa, Homo sapiens [sequence omitted]

SEQ ID NO: 874190 - protein, 329 aa, Homo sapiens
MGGDILGPHVPEVGTFPLTHELKVYRTATEIAGSHRHILEGQPHRSPSQQQLLHKIFHHLRAVVGGGCQAQELFTPGDSWVVDGLHIDAMLGEQEITELAVECCIAHPDGDDVAGAGDDRKAPVHEELAHVLDIALVGSPQGLALLSLEQPHRFQSSREHHGGQRSGKDEACSIGAHHVHQVTGAGNVAAHTAKGLAKSSRDDVNLMHNSITLPNPSAPGPIQSYSMDLIHEGQGPNWWDTSHNSSRGQMAPSMEWTVSKATILGILGLDFSRSFFEVVRVIVPEDKLGCSTWLRKPRKAERGLSRKVVAESQLAVERQYVRFNGDCGS

SEQ ID NO: 874191 - protein, 109 aa, Homo sapiens
MATAEASGSDGKGQEVETSVTYYRLEEVAKRNSLKELWLVIHGRVYDVTRFLNEVGPGRWEASEAAGARGEKAVWSVCGKEGRLGWGRYGVRKGSRPSEGNWGGIGGGL

SEQ ID NO: 874192 - protein, 150 aa, Homo sapiens; identical to SEQ ID NO: 874183

SEQ ID NO: 874193 - protein, 150 aa, Homo sapiens; identical to SEQ ID NO: 874183

SEQ ID NO: 874194 - protein, 150 aa, Homo sapiens; identical to SEQ ID NO: 874183

SEQ ID NO: 874195 - protein, 150 aa, Homo sapiens; identical to SEQ ID NO: 874183

SEQ ID NO: 874196 - protein, 132 aa, Homo sapiens
MSGSMATAEASGSDGKGQEVETSVTYYRLEEVAKRNSLKELWLVIHGRVYDVTRFLNEHPGGEEVLLEQAGVDASESFEDVGHSSDAREMLKQYYIGDIHPWCRTKNYMALSCLGGGKGGMNWGDRTLVNSE

SEQ ID NO: 874197 - protein, 121 aa, Homo sapiens
MATAEASGSDGKGQEVETSVTYYRLEEVAKRNSLKELWLVIHGRVYDVTRFLNEHPGGEEVLLEQAGVDASESFEDVGHSSDAREMLKQYYIGDIHPSDLKPESGSKDPSKNDTCKRLVSP

SEQ ID NO: 874198 - protein, 150 aa, Homo sapiens
NSPTHTSLRHHHDRLLLRLHLVLPELRGRLLPALLLPRPLLLPPRDLPDHRVPPRDLRAPLHAPHLRALPPPGVLRPLLPAGRLLPPHHLLPLVVHGCGVQALLLGHHLLPACVCAVPLLPAPLRPADPLQHHLQDLLLLRPQCPHRAIH

SEQ ID NO: 874199 - protein, 102 aa, Homo sapiens
MMKLKSNQTRTYDGDGYKKRAACLCFRSESEEEVLLVSSSRHPDRWIVPGGGMEPEEEPSVAAVREVCEEPTQCEDDEEKTFTGLHFHLMNSKYIFSSLWFS

SEQ ID NO: 874200 - protein, 171 aa, Homo sapiens [sequence omitted]

SEQ ID NO: 874201 - protein, 120 aa, Homo sapiens
MEPEEEPSVAAVREVCEEAGVKGTLGRLVGIFENQERKHRTYVYVLIVTEVLEDWEDSVNIGRKREWFKIEDAIKVLQYHKPVQASYFETLRQGYSANNGTPVVATTYSVSAQSSMSGIR

SEQ ID NO: 874202 - protein, 151 aa, Homo sapiens
MKLKSNQTRTYDGDGYKKRAACLCFRSESEEENQERKHRTYVYVLIVTEVLEDWEDSVNIGTPNFLPKEPFSLISDGCYVYIFGTINCGGDKGRKREWFKIEDAIKVLQYHKPVQASYFETLRQGYSANNGTPVVATTYSVSAQSSMSGIR

SEQ ID NO: 874203 - protein, 130 aa, Homo sapiens
MKLKSNQTRTYDGDGYKKRAACLCFRSESEEEVLLVSSSRHPDRWIVPGGGMEPEEEPSVAAVREVCEEAGVKGTLGRLVGIFENQERKHRTYVYVLIVTEVLEDWEDSVNIGRKREWFKIEDAIKVLGL

SEQ ID NO: 874204 - protein, 171 aa, Homo sapiens [sequence omitted]

SEQ ID NO: 874205 - protein, 171 aa, Homo sapiens [sequence omitted]

SEQ ID NO: 874206 - protein, 248 aa, Homo sapiens
HVMKAMQSLKSRGYVKEQFAWRHFYWYLTNEGIQYLRDYLHLPPEIVPATLRRSRPETGRPRPKGLEGERPARLTRGEADRDTYRRSAVPPGADKKAEAGAGSATEFQFVLLVSSSRHPDRWIVPGGGMEPEEEPSVAAVREVCEEAGVKGTLGRLVGIFENQERKHRTYVYVLIVTEVLEDWEDSVNIGRKREWFKIEDAIKVLQYHKPVQASYFETLRQGYSANNGTPVVATTYSVSAQSSMSGIR

SEQ ID NO: 874207 - protein, 173 aa, Homo sapiens
GPRGGWRDLGSSSAAETRRDLGQVPASPSADLRGWTARSPLRPLGVLRRCSYLPRLPPRTPPVLRLRCRRSGRLESRVPLLSDAGFHRANWEGAIRERGLRCERAAVPQAECSLTPLTHRAQDGGAVVVGGGGGRGGGGPGGSGDGSRDGGSGGAGPGPGGMRRPRRASGGAV

SEQ ID NO: 874208 - protein, 66 aa, Homo sapiens
PCYAGSIYGSGAGQTGHSDNQQAAAFHYHLTGARHPGRPGLLQILSQPLNFYREGFVDQNFDLVNA

SEQ ID NO: 874209 - protein, 232 aa, Homo sapiens
MASSAASSEHFEKLHEIFRGLHEDLQGVPERLLGTAGTEEKKKLIRDFDEKQQEANETLAEMEEELRYAPLSFRNPMMSKLRNYRKDLAKLHREVRSTPLTATPGGRGDMKYGIYAVENEHMNRLQSQRAMLLQGTESLNRATQSIERSHRIATETDQIGSEIIEELGEQRDQLERTKSRLVNTSENLSKSRKILRSMSRKVTTNKLLLSIIILLELAILGGLVYYKFFRSH

SEQ ID NO: 874210 - protein, 232 aa, Homo sapiens; identical to SEQ ID NO: 874209

SEQ ID NO: 874211 - protein, 232 aa, Homo sapiens; identical to SEQ ID NO: 874209

SEQ ID NO: 874212 - protein, 277 aa, Homo sapiens
MAWSGWVNGRGWGVAYALGWAADRRARKGPRAPNLGGRCSSAACAMASSAASSEHFEKLHEIFRGLHEDLQGVPERLLGTAGTEEKKKLIRDFDEKQQEANETLAEMEEELRYAPLSFRNPMMSKLRNYRKDLAKLHREVRSTPLTATPGGRGDMKYGIYAVENEHMNRLQSQRAMLLQGTESLNRATQSIERSHRIATETDQIGSEIIEELGEQRDQLERTKSRLVNTSENLSKSRKILRSMSRKVTTNKLLLSIIILLELAILGGLVYYKFFRSH

SEQ ID NO: 874213 - protein, 191 aa, Homo sapiens
MKTYKGCPSGCWGRRGPLAEMEEELRYAPLSFRNPMMSKLRNYRKDLAKLHREVRSTPLTATPGGRGDMKYGIYAVENEHMNRLQSQRAMLLQGTESLNRATQSIERSHRIATETDQIGSEIIEELGEQRDQLERTKSRLVNTSENLSKSRKILRSMSRKVTTNKLLLSIIILLELAILGGLVYYKFFRSH

SEQ ID NO: 874214 - protein, 229 aa, Homo sapiens
MASSAASSEHFEKLHEIFRGLHEDLQGVPERLLGTAGTEEKKKLIRDFDEKQQEANETLAEMEEELRYAPLSFRNPMMSKLRNYRKDLAKLHREVRSTPLTATPGGRGDMKYGIYAVENEHMNRLQSQRAMLLQGTESLNRATQSIERSHRIATETDQIGSEIIEELGEQRDQLERTKSRSDNQQAAAFHYHLTGARHPGRPGLLQILSQPLNFYREGFVDQNFDLVNA

SEQ ID NO: 874215 - protein, 232 aa, Homo sapiens; identical to SEQ ID NO: 874209

SEQ ID NO: 874216 - protein, 232 aa, Homo sapiens; identical to SEQ ID NO: 874209

SEQ ID NO: 874217 - protein, 232 aa, Homo sapiens; identical to SEQ ID NO: 874209

SEQ ID NO: 874218 - protein, 232 aa, Homo sapiens; identical to SEQ ID NO: 874209

SEQ ID NO: 874219 - protein, 427 aa, Homo sapiens
MPGSYFGFLVELSLLCPGWSRTTGFKQSSHLGLPKYWDYRREPLARPGSTSESLGSRWAFQEKCSTSRRQAEPLARLSFQGRKLTVKTRNEEFGQGGKAKRDDSEDDVYDANIHQIGPKPAVAARAEPGTRSNARPRDETLSSEPNYIPRRALQRPPLAGRRGPGGRRPRCQSRRSPRPLSLRPFPNPDPALLGFRDSSAASSEHFEKLHEIFRGLHEDLQGVPERLLGTAGTEEKKKLIRDFDEKQQEANETLAEMEEELRYAPLSFRNPMMSKLRNYRKDLAKLHREVRSTPLTATPGGRGDMKYGIYAVENEHMNRLQSQRAMLLQGTESLNRATQSIERSHRIATETDQIGSEIIEELGEQRDQLERTKSRLVNTSENLSKSRKILRSMSRKVTTNKLLLSIIILLELAILGGLVYYKFFRSH

SEQ ID NO: 874220 - protein, 66 aa, Homo sapiens; identical to SEQ ID NO: 874208

SEQ ID NO: 874221 - protein, 70 aa, Homo sapiens
PSTVFTPRVIGTAVARYNFAARDMRELSLREGDVVRIYSRIGGDQGWWKGETNGRIGWFPSTYVEEEGIQ

SEQ ID NO: 874222 - protein, 115 aa, Homo sapiens
MIPAKDMAKVMIVMLAICFLTKSDGKSVKKRSVSEIQLMHNLGKHLNSMERVEWLRKKLQDVHNFVALGAPLAPRDAGSQRPRKKEDNVLVESHEKSLGEADKADVNVLTKAKSQ

SEQ ID NO: 874223 - protein, 164 aa, Homo sapiens
FLLVSNYLKLKKSVHRPMGVCMCCFEPIVEIQRIGSDIICNNKRASLVKMIPAKDMAKVMIVMLAICFLTKSDGKSVKKRSVSEIQLMHNLGKHLNSMERVEWLRKKLQDVHNFVALGAPLAPRDAGSQRPRKKEDNVLVESHEKSLGEADKADVNVLTKAKSQ

SEQ ID NO: 874224 - protein, 30 aa, Homo sapiens
MLSPFLPLMFVNPSWYRWINNRLVATWLTL

SEQ ID NO: 874225 - protein, 323 aa, Homo sapiens
RSAEPANQLPLPLPCPLRVAASRVGGQELRGADPGPPACEAHSQVERASSTLRSPAFMREIPRSRLRPPPCFKHQRGPGVLAGDRPNLRSCFCTRYIDRSDGLRARKSWRDEASVQLLPQTTARRALSPGSVKSPAPGGDNMRAMDGAGTPGSPSNPQGSGGAGGVGDTLRPLQARSIPSARSPVRRRVLWYMGPAARPRRFVPGPPGDATTLELYTKVCLPRKRWRLPLGRLARSPRLQAPRVRAGSSHSCKEAAKYVFQTFHGSKLSASIKRSGVRGKSILGISMQMNGPGFQLRSGFPPLRAELAPSHARPEASGRCPGG

SEQ ID NO: 874226 - protein, 323 aa, Homo sapiens; identical to SEQ ID NO: 874225

SEQ ID NO: 874227 - protein, 143 aa, Homo sapiens
LSPSLLTPSFTGSMSPSVAQSLSVTLPATPSFSFLPPASLCISPSHPCLLSSLSFSSSPCHASLITPPHSAFPPTHGLLSLSLSLSPPPSFSLSLFLHLLPTPFPLYFYWLLCPLLPSSLPHPGKLLPPILAPAPPGCVLEMG

SEQ ID NO: 874228 - protein, 106 aa, Homo sapiens
GVLGSPGCAGSFLGVLGSPGYAEFSWVCWVLPGGLGSLRCAGSFLVCWVLLCVLGPPWWAVFPQVCWVLPGMLGPPACAASFLCVLGSPRFAGSSQVCWVPPPGNP

SEQ ID NO: 874229 - protein, 140 aa, Homo sapiens
MEDYALTFGINPFIALMIQPIVTMTVVDNQGLGLPVDIQHKAKPSPKASQMLPPDLGPPSFQNLLSPSEKLEPWDPGMRKLTVQTCGLTFIHPAGHGLCHPTAQASAETLSSTALNRPSVREGACNEKSTENKKPQDSVL

SEQ ID NO: 874230 - protein, 425 aa, Homo sapiens
MELYFGEYQHVQQEYGVHLRLASDDTQKSRSSQNSKAGSYGVSIRVQGIDGHPYIVLNNTERCLAGTSFSENGPPFPPPVINNLPLHSSNGSVPKENSEELQLPENPYAQPSPIRNLKQPLLHEGKNGVLDRKDGSVKPSHLLNFQRHPELLQPYDPEKNELNLQNHQPSESNWLKTLTEEGINNKKPWTCFPKPSNSQPTSPSLEDPAKSGVTAIRLCSSVVIEDPKKQTSVCVNVQSCTKERVGEEALFTSGRPLTAHSPHAHPETKKTRPDVLPFRRQDSAGPVLDGARSRRSSSSSTTPTSANSLYRFLLDDQECAIHADNVNRHENRRYIPFLPGTGRDIDTGSIPGVDQLIEKFDQKPGLQRRGRSGKRNRINTDDRKRSRSVDSAFPFGLQGNSEYLIEFSRNLGKSSEHLLRPSQVC

SEQ ID NO: 874231 - protein, 239 aa, Homo sapiens
AQTEQTAAATHPIDKVQLAKVEDGKRMELSQLLNEIRANYEKILTRNQIETVLSTRIQLEEDISKKMDKDEEALKAAQAELKEARRQWHHLQVEIESLHAVERGLENSLHASEQHYQMQLQDLETVIEGLEKELQEVRRGIEKQLQEHEMLLNTKMRLEQEIATYRHLLEKEEIRYYGCIQGGKKDKKPTTSRVGFVLPSAIINEISFTTKVPQKYENENVETVTKQAILNGSIVKGEH

SEQ ID NO: 874232 - protein, 173 aa, Homo sapiens
MDKDEEALKAAQAELKEARRQWHHLQVEIESLHAVERGLENSLHASEQHYQMQLQDLETVIEGLEKELQEVRRGIEKQLQEHEMLLNTKMRLEQEIATYRHLLEKEEIRYYGCIQGGKKDKKPTTSRVGFVLPSAIINEISFTTKVPQKYENENVETVTKQAILNGSIVKGEH

SEQ ID NO: 874233 - protein, 170 aa, Homo sapiens
MIPKSALFYIYYRKKGENVEALRNLSFDIYEGQITALLGHSGTGKSTLMNILCGLCPPSDGFASIYGHRVSEIDEMFEARKMIGICPQLDIHFDVLTVEENLSILASIKGIPANNIIQEVQKVLLDLDMQTIKDNQAKKLSGGQKRKLSLGIAVLGNPKILLLDEATSAL

SEQ ID NO: 874234 - protein, 47 aa, Homo sapiens
VISTHCEASGHRVLPSSLLQGGEAPSPVLTMSIQSLFTVSLCPVEAT

SEQ ID NO: 874235 - protein, 297 aa, Homo sapiens
ERPGGGGARRRPQHLPALLPSERPDCATLQAMENELPVPHTSSSACATSSTSGASSSSGCNNSSSGGSGRPTGPQISVYSGIPDRQTVQVIQQALHRQPSTAAQYLQQMYAAQQQHLMLQTAALQQQHLSSAQLQSLAAVQQASLVSNRQGSTSGSNVSAQAPAQSSSINLAASPAAAQLLNRAQSVNSAAASGIAQQAVLLGNTSSPALTASQAQMYLRAQMLIFTPTATVATVQPELGTGSPARPPTPAQVQNLTLRTQQTPAAAASGPTPTQPVLPSLALKPTPGGSQPLPTPA

SEQ ID NO: 874236 - protein, 47 aa, Homo sapiens
RNVTQHPSRSNTDTLCTRMYSKALSIPRNTNPGGSEAHKHQHSCQPS

SEQ ID NO: 874237 - protein, 566 aa, Homo sapiens
KTQAPYALKEAWPLRRSVVGLVAGANREETAGVAVARLGITPGDWPARFVPAGSRAGGLFGNSEPQRNMALPTLPSYWCSQQRLNQQLARQREQEARLRQQWEQNSRYFRMSDICSSKQAEWSSKTSYQRSMHAYQREKMKEEKRRSLEARREKLRQLMQEEQDLLARELEELRLSMNLQERRIREQHGKLKSAKEEQRKLIAEQLLYEHWKKNNPKLREMELDLHQKHVVNSWEMQKEEKKQQEATAEQENKRYENEYERARREALERMKAEEERRQLEDKLQAEALLQQMEELKLKEVEATKLKKEQENLLKQRWELERLEEERKQMEAFRQKAELGRFLRHQYNAQLSRRTQQIQEELEADRRILQALLEKEDESQRLHLARREQVMADVAWMKQAIEEQLQLERAREAELQMLLREEAKEMWEKREAEWARERSARDRLMSEVLTGRQQQIQEKIEQNRRAQEESLKHREQLIRNLEEVRELARREKEESEKLKSARKQELEAQVAERRLQAWEADQQEEEEEEEARRVEQLSDALLQQEAETMAEQGYRPKPYGHPKIAWN

SEQ ID NO: 874238 - protein, 566 aa, Homo sapiens; identical to SEQ ID NO: 874237

SEQ ID NO: 874239 - protein, 408 aa, Homo sapiens
MQEEQDLLARELEELRLSMNLQERRIREQHGKLKSAKEEQRKLIAEQLLYEHWKKNNPKLREMELDLHQKHVVNSWEMQKEEKKQQEATAEQENKRYENEYERARREALERMKAEEERRQLEDKLQAEALLQQMEELKLKEVEATKLKKEQENLLKQRWELERLEEERKQMEAFRQKAELGRFLRHQYNAQLSRRTQQIQEELEADRRILQALLEKEDESQRLHLARREQVMADVAWMKQAIEEQLQLERAREAELQMLLREEAKEMWEKREAEWARERSARDRLMSEVLTGRQQQIQEKIEQNRRAQEESLKHREQLIRNLEEVRELARREKEESEKLKSARKQELEAQVAERRLQAWEADQQEEEEEEEARRVEQLSDALLQQEAETMAEQGYRPKPYGHPKIAWN

SEQ ID NO: 874240 - protein, 346 aa, Homo sapiens
MELDLHQKHVVNSWEMQKEEKKQQEATAEQENKRYENEYERARREALERMKAEEERRQLEDKLQAEALLQQMEELKLKEVEATKLKKEQENLLKQRWELERLEEERKQMEAFRQKAELGRFLRHQYNAQLSRRTQQIQEELEADRRILQALLEKEDESQRLHLARREQVMADVAWMKQAIEEQLQLERAREAELQMLLREEAKEMWEKREAEWARERSARDRLMSEVLTGRQQQIQEKIEQNRRAQEESLKHREQLIRNLEEVRELARREKEESEKLKSARKQELEAQVAERRLQAWEADQQEEEEEEEARRVEQLSDALLQQEAETMAEQGYRPKPYGHPKIAWN

SEQ ID NO: 874241 - protein, 330 aa, Homo sapiens
KTQAPYALKEAWPLRRSVVGLVAGANREETAGVAVARLGITPGDWPARFVPAGSRAGGLFGNSEPQRNMALPTLPSYWCSQQRLNQQLARQREQEARLRQQWEQNSRYFRMSDICSSKQAEWSSKTSYQRSMHAYQREKMKEEKRRSLEARREKLRQLMQEEQDLLARELEELRLSMNLQERRIREQHGKLKSAKEEQRKLIAEQLLYEHWKKNNPKLREMELDLHQKHVVNSWEMQKEEKKQQEATAEQENKRYENEYERARREAEITKEEQRKLIAEQLLYEHWKKNNPKLREMELDLHQKHVVNSWEMQKEGKKQQEATAEQENKRY

SEQ ID NO: 874242 - protein, 72 aa, Homo sapiens
LKKEQENLLKQRWELERLEEERKQMEAFRQKAELGCVSEGPPTLPRRVGLLLFQTCIRVAETIKETAWSAVI

SEQ ID NO: 874243 - protein, 566 aa, Homo sapiens; identical to SEQ ID NO: 874237

SEQ ID NO: 874244 - protein, 498 aa, Homo sapiens
MALPTLPSYWCSQQRLNQQLARQREQEARLRQQWEQNSRYFRMSDICSSKQAEWSSKTSYQRSMHAYQREKMKEEKRRSLEARREKLRQLMQEEQDLLARELEELRLSMNLQERRIREQHGKLKSAKEEQRKLIAEQLLYEHWKKNNPKLREMELDLHQKHVVNSWEMQKEEKKQQEATAEQENKRYENEYERARREALERMKAEEERRQLEDKLQAEALLQQMEELKLKEVEATKLKKEQENLLKQRWELERLEEERKQMEAFRQKAELGRFLRHQYNAQLSRRTQQIQEELEADRRILQALLEKEDESQRLHLARREQVMADVAWMKQAIEEQLQLERAREAELQMLLREEAKEMWEKREAEWARERSARDRLMSEVLTGRQQQIQEKIEQNRRAQEESLKHREQLIRNLEEVRELARREKEESEKLKSARKQELEAQVAERRLQAWEADQQEEEEEEEARRVEQLSDALLQQEAETMAEQGYRPKPYGHPKIAWN

SEQ ID NO: 874245 - protein, 320 aa, Homo sapiens
KTQAPYALKEAWPLRRSVVGLVAGANREETAGVAVARLGITPGDWPARFVPAGSRAGGLFGNSEPQRNMALPTLPSYWCSQQRLNQQLARQREQEARLRQQWEQNSRYFRMSDICSSKQAEWSSKTSYQRSMHAYQREKMKEEKRRSLEARREKLRQLMQEEQDLLARELEELRLSMNLQERRIREQHGKLKSAKEEQRKLIAEQLLYEHWKKNNPKLREMELDLHQKHVVNSWEMQKEEKKQQEATAEQENKRYENEYERARREALERMKAEEERRQLEDKLQAEALLQQMEELKLKEVEADQTKEGAGESVVHFLATL

SEQ ID NO: 874246 - protein, 227 aa, Homo sapiens
KTQAPYALKEAWPLRRSVVGLVAGANREETAGVAVARLGITPGDWPARFVPAGSRAGGLFGNSEPQRNMALPTLPSYWCSQQRLNQQLARQREQEARLRQQWEQNSRYFRMSDICSSKQAEWSSKTSYQRSMHAYQREKMKEEKRRSLEARREKLRQLMQEEQDLLARELEELRLSMNLQERRIREQHGKLKSAKEEQRKLIAEQLLYEHWKKNNPKLREVKIRDLH

SEQ ID NO: 874247 - protein, 107 aa, Homo sapiens
MVTQGSQGEGRPFLSAESAGPAQEQPNGYRCSHDSECQSSCCVRNNSPQELCTPQSVFLQCVPWRKPNGDFCSSHQECHSQCCIQLREYSPFRCIPRTGILAQCLPL

SEQ ID NO: 874248 - protein, 103 aa, Homo sapiens
RPLASAKKLPTPSWRASPQSPPRRDRAYGLANAAATPACLSCSRRSASPQPSHAEESGWCRGLNFSLGSGPKGLPRPLEPAYFLYSLAVWLLPPSWVTSGCRH

SEQ ID NO: 874249 - protein, 41 aa, Homo sapiens
KNEAVALHSPSWPCWGANSRDANAVPRLHRRPRQVWVRQGP

SEQ ID NO: 874250 - protein, 91 aa, Homo sapiens
IASAWPGERKGLVWESPLHCQDGATGRYLGGRKPVSPWGWLGAGPRVMTTVLFLPPGAPFDPVRLLGNAVSSVTCSCLREPLWLRGPGVPE

SEQ ID NO: 874251 - protein, 36 aa, Homo sapiens
SERSWACLFVPLLGCYSRKQTQRWPHHIIGLLDFIS

SEQ ID NO: 874252 - protein, 106 aa, Homo sapiens
TLLVSMEANTNSIFIKTISHLKIHKNKYTEAYIFPFASGFSTAYMALVTTVDLKCWGSSENCPTEKVGNLGSLFRAFPVGVDSGTPHHAHSGEAKTCWKGTIIVCC

SEQ ID NO: 874253 - protein, 81 aa, Homo sapiens
LSARQPPHLVELKKILYQKKMATAQLQRTPMSALVFPNKISTEHQSLVLVKRLLAVSVSCITYLRGIFPECAYGTRYLDGC

SEQ ID NO: 874254 - protein, 407 aa, Homo sapiens
ALRESACASGTARAASCSSSGLRRPPLRRNVELKKILYQKKMATAQLQRTPMSALVFPNKISTEHQSLVLVKRLLAVSVSCITYLRGIFPECAYGTRYLDDLCVKILREDKNCPGSTQLVKWMLGCYDALQKKYLMVVYTNPEDPQTISECYQFKFKYTNNGPLMDFISKNQSNESSMLSTDTKKASILLIRKIYILMQNLGPLPNDVCLTMKLFYYDEVTPPDYQPPGFKDGDCEGVIFEGEPMYLNVGEVSTPFHIFKVKVTTERERMENIDSTILSPKQIKTPFQKILRDKDVEDEQEHYTSDDLDIETKMEEQEKNPASSELEEPSLVCEEDEIMRSKESPDLSISHSQVEQLVNKTSELDMSESKTRSGKVFQNKMVLHHFDSSSQESVPKRRKFSEPKEHI

SEQ ID NO: 874255 - protein, 295 aa, Homo sapiens
MVITGYLLSKTISECYQFKFKYTNNGPLMDFISKNQSNESSMLSTDTKKASILLIRKIYILMQNLGPLPNDVCLTMKLFYYDEVTPPDYQPPGFKDGDCEGVIFEGEPMYLNVGEVSTPFHIFKVKVTTERERMENIDSTILSPKQIKTPFQKILRDKDVEDEQEHYTSDDLDIETKMEEQEKNPASSELEEPSLVCEEDEIMRSKESPDLSISHSQVEQLVNKTSELDMSESKTRSGKVFQNKMANGNQPVKSSKENRKRSQHESGRIVLHHFDSSSQESVPKRRKFSEPKEHI

SEQ ID NO: 874256 - protein, 365 aa, Homo sapiens
ALRESACASGTARAASCSSSGLRRPPLRRNVELKKILYQKKMATAQLQRTPMSALVFPNKISTEHQSLVLVKRLLAVSVSCITYLRGIFPECAYGTRYLDDLCVKILREDKNCPGSTQLVKWMLGCYDALQKKYLMVVYTNPEDPQTISECYQFKFKYTNNGPLMDFISKNQSNESSMLSTDTKKASILLIRKIYILMQNLGPLPNDVCLTMKLFYYDEVTPPDYQPPGFKDGDCEGVIFEGEPMYLNVGEVSTPFHIFKVKVTTERERMENIDSTILSPKQIKTPFQKILRDKDVEDEQEHYTSDDLDIETKMEEQEKNPASSELEEPSLVCEEDEIMRSKESPDLSISHSQVEQLDNKIDTRN

SEQ ID NO: 874257 - protein, 431 aa, Homo sapiens
ALRESACASGTARAASCSSSGLRRPPLRRNVELKKILYQKKMATAQLQRTPMSALVFPNKISTEHQSLVLVKRLLAVSVSCITYLRGIFPECAYGTRYLDDLCVKILREDKNCPGSTQLVKWMLGCYDALQKKYLMVVYTNPEDPQTISECYQFKFKYTNNGPLMDFISKNQSNESSMLSTDTKKASILLIRKIYILMQNLGPLPNDVCLTMKLFYYDEVTPPDYQPPGFKDGDCEGVIFEGEPMYLNVGEVSTPFHIFKVKVTTERERMENIDSTILSPKQIKTPFQKILRDKDVEDEQEHYTSDDLDIETKMEEQEKNPASSELEEPSLVCEEDEIMRSKESPDLSISHSQVEQLVNKTSELDMSESKTRSGKVFQNKMANGNQPVKSSKENRKRSQHESGRIVLHHFDSSSQESVPKRRKFSEPKEHI

SEQ ID NO: 874258 - protein, 431 aa, Homo sapiens; identical to SEQ ID NO: 874257

SEQ ID NO: 874259 - protein, 319 aa, Homo sapiens
MRLWNKISRWMLGCYDALQKKYLMVVYTNPEDPQTISECYQFKFKYTNNGPLMDFISKNQSNESSMLSTDTKKASILLIRKIYILMQNLGPLPNDVCLTMKLFYYDEVTPPDYQPPGFKDGDCEGVIFEGEPMYLNVGEVSTPFHIFKVKVTTERERMENIDSTILSPKQIKTPFQKILRDKDVEDEQEHYTSDDLDIETKMEEQEKNPASSELEEPSLVCEEDEIMRSKESPDLSISHSQVEQLVNKTSELDMSESKTRSGKVFQNKMANGNQPVKSSKENRKRSQHESGRIVLHHFDSSSQESVPKRRKFSEPKEHI

SEQ ID NO: 874260 - protein, 319 aa, Homo sapiens; identical to SEQ ID NO: 874259

SEQ ID NO: 874261 - protein, 66 aa, Homo sapiens
GEPESSGRAGLLPAQAGGLGLRSRAKNRPARRGSALQGCCPVPGQGHIRIGKRQAHGSTGSLTGAR

SEQ ID NO: 874262 - protein, 153 aa, Homo sapiens
MEDPVFIDATWKKVGWLQHFLRSIMILSSDTWFPPPREFKASKFRVRMYLKYFFCMGLSSTRTMSSAGLASTLPTERVERVLQGCLTPLAAMGPWLLQSSVSSQVECCPAPGPAGNDSAPDVHPQELGLLASLTPPSVHICLPGRMVLPLSLG

SEQ ID NO: 874263 - protein, 102 aa, Homo sapiens
FKEPDRRYSRAGTYLYPFSSSIWFPWRQLPHLEPWPRLAPGASHSWGEAKDLAVTSQAQDQGPFLGWALGLGLEETLMVQASLGGEDSKHRVKCWWGPPFAR

SEQ ID NO: 874264 - protein, 54 aa, Homo sapiens
QPPWPKLPLSSVDDMLKVSSRVSSGGLFLQDDPVGTRRGGAGLSPSWSGCHTSC

SEQ ID NO: 874265 - protein, 386 aa, Homo sapiens
MSVDAELCAHGSRDLLRYFYSRRDLTSPWSSVKCFHKLASAYGARQLQGYCASLFAILLPQDPSFQMPLDLYAYAVATGDALLEKLCLQFLAWNFEALTQAEAWPSVPTDLLQLLLPRSDLAVPSELALLKAVDTWSWGERASHEEVEGLVEKIRFPMMLPEELFELQFNLSLYWSHEALFQKKTLQALEFHTVPFQLLARYKGLNLTEDTYKPRIYTSPTWSAFVTDSSWSARKSQLVYQSRRGPLVKYSSDYFQAPSDYRYYPYQSFQTPQHPSFLFQDKRVSWSLVYLPTIQSCWNYGFSCSSDELPVLGLTKSGGSDRTIAYENKALMLCEGLFVADVTDFEGWKAAIPSALDTNSSKSTSSFPLPGRALQRRSARSSAPST

SEQ ID NO: 874266 - protein, 386 aa, Homo sapiens; identical to SEQ ID NO: 874265

SEQ ID NO: 874267 - protein, 386 aa, Homo sapiens; identical to SEQ ID NO: 874265

SEQ ID NO: 874268 - protein, 386 aa, Homo sapiens; identical to SEQ ID NO: 874265

SEQ ID NO: 874269 - protein, 386 aa, Homo sapiens; identical to SEQ ID NO: 874265

SEQ ID NO: 874270 - protein, 386 aa, Homo sapiens; identical to SEQ ID NO: 874265

SEQ ID NO: 874271 - protein, 254 aa, Homo sapiens
MSVDAELCAHGSRDLLRYFYSRRDLTSPWSSVKCFHKLASAYGARQLQGYCASLFAILLPQDPSFQMPLDLYAYAVATGDALLEKLCLQFLAWNFEALTQAEAWPSVPTDLLQLLLPRSDLAVPSELALLKAVDTWSWGERASHEEVEGLVEKIRFPMMLPEELFELQFNLSLYWSHEALFQKKTLQALEFHTVPFQLLARYKGLNLTEDTYKPRIYTSPTGTTASPAPRTSSLSWASPSLAAQIAPLPTKTKP

SEQ ID NO: 874272 - protein, 386 aa, Homo sapiens; identical to SEQ ID NO: 874265

SEQ ID NO: 874273 - protein, 368 aa, Homo sapiens
MSVDAELCAHGSRDLLRYFYSRRDLTSPWSSVKCFHKLASAYGARQLQGYCASLFAILLPQDPSFQMPLDLYAYAVATGDALLEKLCLQFLAWNFEALTQAEAWPSVPTDLLQLLLPRSDLAVPSELALLKAVDTWSWGERASHEEVEGLVEKIRFPMMLPEELFELQFNLSLYWSHEALFQKKTLQALEFHTVPFQLLARYKGLNLTEDTYKPRIYTSPTWSAFVTDSSWSARKSQLVYQSRRGPLVKYSSDYFQAPSDYRYYPYQSFQTPQHPSFLFQDKRVSWSLVYLPTIQSCWNYGFSCSSDELPVLGLTKSGGSDRTIAYENKALMLCEGLFVADVTDFEGWKAAIPSALDTSGLDGVAQGW

SEQ ID NO: 874274 - protein, 386 aa, Homo sapiens; identical to SEQ ID NO: 874265

SEQ ID NO: 874275 - protein, 386 aa, Homo sapiens; identical to SEQ ID NO: 874265

SEQ ID NO: 874276 - protein, 386 aa, Homo sapiens; identical to SEQ ID NO: 874265

SEQ ID NO: 874277 - protein, 364 aa, Homo sapiens
MSVDAELCAHGSRDLLRYFYSRRDLTSPWSSVKCFHKLASAYGARQLQGYCASLFAILLPQDPSFQMPLDLYAYAVATGDALLEKLCLQFLAWNFEALTQAEAWPSVPTDLLQLLLPRSDLAVPSELALLKAVDTWSWGERASHEEVEGLVEKIRFPMMLPEELFELQFNLSLYWSHEALFQKKTLQALEFHTVPFQLLARYKGLNLTEDTYKPRIYTSPTWSAFVTDSSWSARKSQLVYQSRRGPLVKYSSDYFQAPSDYRYYPYQSFQTPQHPSFLFQDKRVSWSLVYLPTIQSCWNYGFSCSSDELPVLGLTKSGGSDRTIAYENKALMLCEGLFVADVTRPRGCSGIPPQPLVSLPLSLV

SEQ ID NO: 874278 - protein, 195 aa, Homo sapiens
MTPPRLFWVWLLVAGTQGVNDGDMRLADGGATNQGRVEIFYRGQWGTVCDNLWDLTDASVVCRALGFENATQALGRAAFGQGSGPIMLDEVQCTGTEASLADCKSLGWLKSNCRHERDAGVVCTNETRSTHTLDLSRELSEALGQIFDSQRGCDLSISVNVQGEDALGFCGHTVILTANLGGPGPVARSRAAMSP

SEQ ID NO: 874279 - protein, 343 aa, Homo sapiens
MSVDAELCAHGSRDLLRYFYSRRDLTSPWSSVKCFHKLASAYGARQLQGYCASLFAILLPQDPSFQMPLDLYAYAVATGDALLEKLCLQFLAWNFEALTQAEAWPSVPTDLLQLLLPRSDLAVPSELALLKAVDTWSWGERASHEEVEGLVEKIRFPMMLPEELFELQFNLSLYWSHEALFQKKTLQALEFHTVPFQLLARYKGLNLTEDTYKPRIYTSPTWSAFVTDSSWSARKSQLVYQSRRGPLVKYSSDYFQAPSDYRYYPYQSFQTPQHPSFLFQDKRVSWSLVYLPTIQSCWNYGFSCSSDEDRPLGRRILLTDRNPQHHLASTPPEENPILYQHLF

SEQ ID NO: 874280 - protein, 386 aa, Homo sapiens; identical to SEQ ID NO: 874265

SEQ ID NO: 874281 - protein, 494 aa, Homo sapiens
PRVATRRPRVRGRVGFWVKGPVCRGILWLEARRLHTAVAATAARIWASRHGHDPSEALLGVAAGCRNPSHQRECAGRGRPGLLWPHGHPDCQPGRPRPCGKEPGSNVTMSVDAELCAHGSRDLLRYFYSRRDLTSPWSSVKCFHKLASAYGARQLQGYCASLFAILLPQDPSFQMPLDLYAYAVATGDALLEKLCLQFLAWNFEALTQAEAWPSVPTDLLQLLLPRSDLAVPSELALLKAVDTWSWGERASHEEVEGLVEKIRFPMMLPEELFELQFNLSLYWSHEALFQKKTLQALEFHTVPFQLLARYKGLNLTEDTYKPRIYTSPTWSAFVTDSSWSARKSQLVYQSRRGPLVKYSSDYFQAPSDYRYYPYQSFQTPQHPSFLFQDKRVSWSLVYLPTIQSCWNYGFSCSSDELPVLGLTKSGGSDRTIAYENKALMLCEGLFVADVTDFEGWKAAIPSALDTNSSKSTSSFPLPGRALQRRSARSSAPST

SEQ ID NO: 874282 - protein, 475 aa, Homo sapiens
TNRAGTPRLARQVIIMSSVYTRHLCRLHCPDWGQLRPWFPEGNLKLAKAPHQRECAGRGRPGLLWPHGHPDCQPGRPRPCGKEPGSNVTMSVDAELCAHGSRDLLRYFYSRRDLTSPWSSVKCFHKLASAYGARQLQGYCASLFAILLPQDPSFQMPLDLYAYAVATGDALLEKLCLQFLAWNFEALTQAEAWPSVPTDLLQLLLPRSDLAVPSELALLKAVDTWSWGERASHEEVEGLVEKIRFPMMLPEELFELQFNLSLYWSHEALFQKKTLQALEFHTVPFQLLARYKGLNLTEDTYKPRIYTSPTWSAFVTDSSWSARKSQLVYQSRRGPLVKYSSDYFQAPSDYRYYPYQSFQTPQHPSFLFQDKRVSWSLVYLPTIQSCWNYGFSCSSDELPVLGLTKSGGSDRTIAYENKALMLCEGLFVADVTDFEGWKAAIPSALDTNSSKSTSSFPLPGRALQRRSARSSAPST

SEQ ID NO: 874283 - protein, 433 aa, Homo sapiens
ACVCVQLRECMCDCVVYMCMHEYCTHTHAHSHTVCTQVAVLDSWAQGSPAVLWGRHLLSFFLPRYFYSRRDLTSPWSSVKCFHKLASAYGARQLQGYCASLFAILLPQDPSFQMPLDLYAYAVATGDALLEKLCLQFLAWNFEALTQAEAWPSVPTDLLQLLLPRSDLAVPSELALLKAVDTWSWGERASHEEVEGLVEKIRFPMMLPEELFELQFNLSLYWSHEALFQKKTLQALEFHTVPFQLLARYKGLNLTEDTYKPRIYTSPTWSAFVTDSSWSARKSQLVYQSRRGPLVKYSSDYFQAPSDYRYYPYQSFQTPQHPSFLFQDKRVSWSLVYLPTIQSCWNYGFSCSSDELPVLGLTKSGGSDRTIAYENKALMLCEGLFVADVTDFEGWKAAIPSALDTNSSKSTSSFPLPGRALQRRSARSSAPST

SEQ ID NO: 874284 - protein, 358 aa, Homo sapiens
LRSPGVVLVLASAYGARQLQGYCASLFAILLPQDPSFQMPLDLYAYAVATGDALLEKLCLQFLAWNFEALTQAEAWPSVPTDLLQLLLPRSDLAVPSELALLKAVDTWSWGERASHEEVEGLVEKIRFPMMLPEELFELQFNLSLYWSHEALFQKKTLQALEFHTVPFQLLARYKGLNLTEDTYKPRIYTSPTWSAFVTDSSWSARKSQLVYQSRRGPLVKYSSDYFQAPSDYRYYPYQSFQTPQHPSFLFQDKRVSWSLVYLPTIQSCWNYGFSCSSDELPVLGLTKSGGSDRTIAYENKALMLCEGLFVADVTDFEGWKAAIPSALDTNSSKSTSSFPLPGRALQRRSARSSAPST

SEQ ID NO: 874285 - protein, 195 aa, Homo sapiens; identical to SEQ ID NO: 874278

SEQ ID NO: 874286 - protein, 259 aa, Homo sapiens
IRGSCGGRKSWGERASHEEVEGLVEKIRFPMMLPEELFELQFNLSLYWSHEALFQKKTLQALEFHTVPFQLLARYKGLNLTEDTYKPRIYTSPTWSAFVTDSSWSARKSQLVYQSRRGPLVKYSSDYFQAPSDYRYYPYQSFQTPQHPSFLFQDKRVSWSLVYLPTIQSCWNYGFSCSSDELPVLGLTKSGGSDRTIAYENKALMLCEGLFVADVTDFEGWKAAIPSALDTNSSKSTSSFPLPGRALQRRSARSSAPST

SEQ ID NO: 874287 - protein, 195 aa, Homo sapiens; identical to SEQ ID NO: 874278

SEQ ID NO: 874288 - protein, 213 aa, Homo sapiens
VVSVRVVLRGKTLQALEFHTVPFQLLARYKGLNLTEDTYKPRIYTSPTWSAFVTDSSWSARKSQLVYQSRRGPLVKYSSDYFQAPSDYRYYPYQSFQTPQHPSFLFQDKRVSWSLVYLPTIQSCWNYGFSCSSDELPVLGLTKSGGSDRTIAYENKALMLCEGLFVADVTDFEGWKAAIPSALDTNSSKSTSSFPLPGRALQRRSARSSAPST

SEQ ID NO: 874289 - protein, 170 aa, Homo sapiens
CRGPDCHRKGTGVLWSLEGLIGVVSVVRGPLVKYSSDYFQAPSDYRYYPYQSFQTPQHPSFLFQDKRVSWSLVYLPTIQSCWNYGFSCSSDELPVLGLTKSGGSDRTIAYENKALMLCEGLFVADVTDFEGWKAAIPSALDTNSSKSTSSFPLPGRALQRRSARSSAPST

SEQ ID NO: 874290 - protein, 195 aa, Homo sapiens; identical to SEQ ID NO: 874278

SEQ ID NO: 874291 - protein, 103 aa, Homo sapiens
  misc_feature (57)..(58): Xaa can be any naturally occurring amino acid
  misc_feature (60)..(60): Xaa can be any naturally occurring amino acid
  misc_feature (66)..(66): Xaa can be any naturally occurring amino acid
  misc_feature (69)..(70): Xaa can be any naturally occurring amino acid
  misc_feature (78)..(80): Xaa can be any naturally occurring amino acid
  misc_feature (93)..(93): Xaa can be any naturally occurring amino acid
  misc_feature (99)..(99): Xaa can be any naturally occurring amino acid
MTPPRLFWVWLLVAGTQGVNDGDMRLADGGATNQGRVEIFYRGQWGTVCDNLWDLTXXIXFFLSLXFYXXTHSLFISXXXQLSFPIILYYFHXTLTYSXLSYF

SEQ ID NO: 874292 - protein, 72 aa, Homo sapiens
MSPYSPERSASRNYWKASTRVHQEFSHHLTSFQVVSTRTPSRLLWDPPTAPGQSALVTRVVTQAHSVGSSPV

SEQ ID NO: 874293 - protein, 386 aa, Homo sapiens; identical to SEQ ID NO: 874265

SEQ ID NO: 874294 - protein, 367 aa, Homo sapiens
MSVDAELCAHGSRDLLRYFYSRRDLTSPWSSVKCFHKLASAYGARQLQGYCASLFAILLPQDPSFQMPLDLYAYAVATGDALLEKLCLQFLAWNFEALTQAEAWPSVPTDLLQLLLPRSDLAVPSELALLKAVDTWSWGERASHEEVEGLVEKIRFPMMLPEELFELQFNLSLYWSHEALFQKKTLQALEFHTVPFQLLARYKGLNLTEDTYKPRKSQLVYQSRRGPLVKYSSDYFQAPSDYRYYPYQSFQTPQHPSFLFQDKRVSWSLVYLPTIQSCWNYGFSCSSDELPVLGLTKSGGSDRTIAYENKALMLCEGLFVADVTDFEGWKAAIPSALDTNSSKSTSSFPLPGRALQRRSARSSAPST

SEQ ID NO: 874295 - protein, 386 aa, Homo sapiens; identical to SEQ ID NO: 874265

SEQ ID NO: 874296 - protein, 385 aa, Homo sapiens
MSVDAELCAHGSRDLLRYFYSRRDLTSPWSSVKCFHKLASAYGARQLQGYCASLFAILLPQDPSFQMPLDLYAYAVATGDALLEKLCLQFLAWNFEALTQAEAWPSVPTDLLQLLLPRSDLAVPSELALLKAVDTWSWGERASHEEVEGLVEKIRFPMMLPEELFELQFNLSLYWSHEALFQKKTLQALEFHTVPFQLLARYKGLNLTEDTYKPRIYTSPTWSAFVTDSSWSARKSQLVYQSRRGPLVKYSSDYFQAPSDYRYYPYQSFQTPQHPSFLFQDKRVSWSLVYLPTIQSCWNYGFSCSSDELPVLGLTKSGGSDRTIAYAISRAGRLRFPVPWTPTARRAPPPSPCPAGHFNGVPHGHPPLLPDQLLRCGLDGVAQGW

SEQ ID NO: 874297 - protein, 339 aa, Homo sapiens
MSVDAELCAHGSRDLLRYFYSRRDLTSPWSSVKCFHKLASAYGARQLQGYCASLFAILLPQDPSFQMPLDLYAYAVATGDALLEKLCLQFLAWNFEALTQAEAWPSVPTDLLQLLLPRSDLAVPSELALLKAVDTWSWGERASHEEVEGLVEKIRFPMMLPEELFELQFNLSLYWSHEALFQKKTLQALEFHTVPFQLLARYKGLNLTEDTYKPRIYTSPTWSAFVTDSSWSARKSQLVYQSRRGPLVKYSSDYFQAPSDYRYYPYQSFQTPQHPSFLFQDKRVSWSLVYLPTIQSCWNYGFSCSSDEAGHFNGVPHGHPPLLPDQLLRCGLDGVAQGW

SEQ ID NO: 874298 - protein, 386 aa, Homo sapiens; identical to SEQ ID NO: 874265

SEQ ID NO: 874299 - protein, 195 aa, Homo sapiens; identical to SEQ ID NO: 874278

SEQ ID NO: 874300 - protein, 386 aa, Homo sapiens; identical to SEQ ID NO: 874265

SEQ ID NO: 874301 - protein, 386 aa, Homo sapiens; identical to SEQ ID NO: 874265

SEQ ID NO: 874302 - protein, 320 aa, Homo sapiens
MPLDLYAYAVATGDALLEKLCLQFLAWNFEALTQAEAWPSVPTDLLQLLLPRSDLAVPSELALLKAVDTWSWGERASHEEVEGLVEKIRFPMMLPEELFELQFNLSLYWSHEALFQKKTLQALEFHTVPFQLLARYKGLNLTEDTYKPRIYTSPTWSAFVTDSSWSARKSQLVYQSRRGPLVKYSSDYFQAPSDYRYYPYQSFQTPQHPSFLFQDKRVSWSLVYLPTIQSCWNYGFSCSSDELPVLGLTKSGGSDRTIAYENKALMLCEGLFVADVTDFEGWKAAIPSALDTNSSKSTSSFPLPGRALQRRSARSSAPST

SEQ ID NO: 874303 - protein, 276 aa, Homo sapiens
MSVDAELCAHGSRDLLRYFYSRRDLTSPWSSVKCFHKLASAYGARQLQGYCASLFAILLPQDPSFQMPLDLYAYAVATGDALLEKLCLQFLAWNFEALTQAEAWPSVPTDLLQLLLPRSDLAVPSELALLKAVDTWSWGERASHEEVEGLVEKIRFPMMLPEELFELQFNLSLYWSHEALFQKKTLQALEFHTVPFQLLARYKGLNLTEDTYKPRIYTSPTWSAFVTDSSWSARKSQLVYQSRRGPLVKYSSDYFQAPSDYRYYPFNDKRTSFNDN

SEQ ID NO: 874304 - protein, 254 aa, Homo sapiens; identical to SEQ ID NO: 874271

SEQ ID NO: 874305 - protein, 368 aa, Homo sapiens
MIKKKDLTSPWSSVKCFHKLASAYGARQLQGYCASLFAILLPQDPSFQMPLDLYAYAVATGDALLEKLCLQFLAWNFEALTQAEAWPSVPTDLLQLLLPRSDLAVPSELALLKAVDTWSWGERASHEEVEGLVEKIRFPMMLPEELFELQFNLSLYWSHEALFQKKTLQALEFHTVPFQLLARYKGLNLTEDTYKPRIYTSPTWSAFVTDSSWSARKSQLVYQSRRGPLVKYSSDYFQAPSDYRYYPYQSFQTPQHPSFLFQDKRVSWSLVYLPTIQSCWNYGFSCSSDELPVLGLTKSGGSDRTIAYENKALMLCEGLFVADVTDFEGWKAAIPSALDTNSSKSTSSFPLPGRALQRRSARSSAPST

SEQ ID NO: 874306 - protein, 370 aa, Homo sapiens
MTPPRLFWVWLLVAGTQGVNDGDMRLADGGATNQGRVEIFYRGQWGTVCDNLWDLYAYAVATGDALLEKLCLQFLAWNFEALTQAEAWPSVPTDLLQLLLPRSDLAVPSELALLKAVDTWSWGERASHEEVEGLVEKIRFPMMLPEELFELQFNLSLYWSHEALFQKKTLQALEFHTVPFQLLARYKGLNLTEDTYKPRIYTSPTWSAFVTDSSWSARKSQLVYQSRRGPLVKYSSDYFQAPSDYRYYPYQSFQTPQHPSFLFQDKRVSWSLVYLPTIQSCWNYGFSCSSDELPVLGLTKSGGSDRTIAYENKALMLCEGLFVADVTDFEGWKAAIPSALDTNSSKSTSSFPLPGRALQRRSARSSAPST

SEQ ID NO: 874307 - protein, 260 aa, Homo sapiens
TLSLWGTLSLSWGERASHEEVEGLVEKIRFPMMLPEELFELQFNLSLYWSHEALFQKKTLQALEFHTVPFQLLARYKGLNLTEDTYKPRIYTSPTWSAFVTDSSWSARKSQLVYQSRRGPLVKYSSDYFQAPSDYRYYPYQSFQTPQHPSFLFQDKRVSWSLVYLPTIQSCWNYGFSCSSDELPVLGLTKSGGSDRTIAYENKALMLCEGLFVADVTDFEGWKAAIPSALDTNSSKSTSSFPLPGRALQRRSARSSAPST

SEQ ID NO: 874308 - protein, 252 aa, Homo sapiens
VIKRSLAEWHEEVEGLVEKIRFPMMLPEELFELQFNLSLYWSHEALFQKKTLQALEFHTVPFQLLARYKGLNLTEDTYKPRIYTSPTWSAFVTDSSWSARKSQLVYQSRRGPLVKYSSDYFQAPSDYRYYPYQSFQTPQHPSFLFQDKRVSWSLVYLPTIQSCWNYGFSCSSDELPVLGLTKSGGSDRTIAYENKALMLCEGLFVADVTDFEGWKAAIPSALDTNSSKSTSSFPLPGRALQRRSARSSAPST

SEQ ID NO: 874309 - protein, 237 aa, Homo sapiens
KARYEAGVVSAEANVFELQFNLSLYWSHEALFQKKTLQALEFHTVPFQLLARYKGLNLTEDTYKPRIYTSPTWSAFVTDSSWSARKSQLVYQSRRGPLVKYSSDYFQAPSDYRYYPYQSFQTPQHPSFLFQDKRVSWSLVYLPTIQSCWNYGFSCSSDELPVLGLTKSGGSDRTIAYENKALMLCEGLFVADVTDFEGWKAAIPSALDTNSSKSTSSFPLPGRALQRRSARSSAPST

SEQ ID NO: 874310 - protein, 133 aa, Homo sapiens
MTPPRLFWVWLLVAGTQGVNDGDMRLADGGATNQGRVEIFYRGQWGTVCDNLWDLTDASVVCRALGFENATQALGRAAFGQGSGPIMLDEVQCTGTEASLADCKSLGWLKSNCRHERDAGVVCTNGTSTPEGI

SEQ ID NO: 874311 - protein, 113 aa, Homo sapiens
HASPRVAHASADAWASGSKDQSAEGSCGWKRGGSTRPLQLPQPGSGHPGTAMTPPRLFWVWLLVAGTQGELSPWEIPKAEVWKAGAPWGCSELQGDILPGARGPAVSQIFSPA

SEQ ID NO: 874312 - protein, 456 aa, Homo sapiens
MDSRLQEIRERQKLRRQLLAQQLGAESADSIGAVLNSKDEQREIAETRETCRASYDTSAPNAKRKYLDEGETDEDKMEEYKDELEMQQDEENLPYEEEIYKDSSTFLKGTQSLNPHNDYCQHFVDTGHRPQNFIRDVGLADRFEEYPKLRELIRLKDELIAKSNTPPMYLQADIEAFDIRELTPKFDVILLEPPLEEYYRETGITANEKCWTWDDIMKLEIDEIAAPRSFIFLWCGSGEGLDLGRVCLRKWGYRRCEDICWIKTNKNNPGKTKTLDPKAVFQRTKEHCLMGIKGTVKRSTDGDFIHANVDIDLIITEEPEIGNIEKPVEIFHIIEHFCLGRRRLHLFGRDSTIRPGWLTVGPTLTNSNYNAETYASYFSAPNSYLTGCTEEIERLRPKSPPPKSKSDRGGGAPRGGGRGGTSAGRGRERNRSNFRGERGGFRGGRGGAHRGGFPPR

SEQ ID NO: 874313 - protein, 314 aa, Homo sapiens
MDSRLQEIRERQKLRRQLLAQQLGAESADSIGAVLNSKDEQREIAETRETCRASYDTSAPNAKRKYLDEGETDEDKMEEYKDELEMQQDEENLPYEEEIYKDSSTFLKGTQSLNPHNDYCQHFVDTGHRPQNFIRDVGLADRFEEYPKLRELIRLKDELIAKSNTPPMYLQADIEAFDIRELTPKFDVILLEPPLEEYYRETGITANEKCWTWDDIMKLEIDEIAAPRSFIFLWCGSGEGLDLGRVCLRKWGYRRCEDICWIKTNKNNPGKTKTLDPKAVFQRTKAGSQLDQRLQIATTMQKHMHPISVLLIPT

SEQ ID NO: 874314 - protein, 428 aa, Homo sapiens
MDSRLQEIRERQKLRRQLLAQQLGAESADSIGAVLNSKDEQREIAETRETCRASYDTSAPNAKRKYLDEGETDEDKMEEYKDELEMQQDEENLPYEEEIYKDSSTFLKGTQSLNPHNDYCQHFVDTGHRPQNFIRDVGLADRFEEYPKLRELIRLKDELIAKSNTPPMYLQADIEAFDIRELTPKFDVILLEPPLEEYYRETGITANEKCWTWDDIMKLEIDEIAAPRSFIFLWCGSGEGLDLGRVCLRKWGYRRCEDICWIKTNKNNPGKTKTLDPKAVFQRTKEHCLMGIKGTVKRSTDGDFIHANVDIDLIITEEPEIGNIEKPVEIFHIIEHFCLGRRRLHLFGRDSTIRPAWLTVALLFQLNGPLFCFVAAATLNLDHVRTCTFMGSCSVQMFYHKDIFLVILSILISFFPVFTFLCTLYISM

SEQ ID NO: 874315 - protein, 456 aa, Homo sapiens; identical to SEQ ID NO: 874312

SEQ ID NO: 874316 - protein, 439 aa, Homo sapiens
MDSRLQEIRERQKLRRQLLAQQLGAESADSIGAVLNSKDEQREIAETRETCRASYDTSAPNAKRKYLDEGETDEDKMEEYKDELEMQQDEENLPYEEEIYKDSSTFLKGTQSLNPHNDYCQHFVDTGHRPQNFIRDVGLADRFEEYPKLRELIRLKDELIAKSNTPPMYLQADIEAFDIRELTPKFDVILLEPPLEEYYRETGITANEKCWTWDDIMKLEIDEIAAPRSFIFLWCGSGEGLDLGRVCLRKWGYRRCEDICWIKTNKNNPGKTKTLDPKAVFQRTKEHCLMGIKGTVKRSTDGDFIHANVDIDLIITEEPEIGNIEKPVEIFHIIEHFCLGRRRLHLFGRDSTIRPGWLTVGPTLTNSNYNAETYASYFSAPNSYLTGCTEEIERLRPKSPPPKSKSDRGGGAPRGGGRGGTSAGRGRERNRSNFRGERG

SEQ ID NO: 874317 - protein, 256 aa, Homo sapiens
MDSRLQEIRERQKLRRQLLAQQLGAESADSIGAVLNSKDEQREIAETRETCRASYDTSAPNAKRKYLDEGETDEDKMEEYKDELEMQQDEENLPYEEEIYKDSSTFLKGTQSLNPHNDYCQHFVDTGHRPQNFIRDVGLADRFEEYPKLRELIRLKDELIAKSNTPPMYLQADIEAFDIRELTPKFDVILLEPPLEEYYRETGITANEKCWTWDDIMKLEIDEIAAPRSFIFLWCGSGEGLDLGRVVRWCFYKVDF

SEQ ID NO: 874318 - protein, 565 aa, Homo sapiens
RSGRARRCHVEEPPLPLPPPPPPLCCRLLRLRRLPERGEWGGGGSAAAAMEANWTAFLFQAHEASHHQQQAAQNSLLPLLSSAVEPPDQKPLLPIPITQKPQGAPETLKDAIGIKKEKPKTSFVCTYCSKAFRDSYHLRRHESCHTGIKLVSRPKKTPTTVVPLISTIAGDSSRTSLVSTIAGILSTVTTSSSGTNPSSSASTTAMPVTQSVKKPSKPVKKNHACEMCGKAFRDVYHLNRHKLSHSDEKPFECPICNQRFKRKDRMTYHVRSHEGGITKPYTCSVCGKGFSRPDHLSCHVKHVHSTERPFKCQTCTAAFATKDRLRTHMVRHEGKVSCNICGKLLSAAYITSHLKTHGQSQSINCNTCKQGISKTCMSEETSNQKQQQQQQQQQQQQQHVTSWPGKQVETLRLWEEAVKARKKEAANLCQTSTAATTPVTLTTPFSITSSVSSGTMSNPVTVAAAMSMRSPVNVSSAVNITSPMNIGHPVTITSPLSMTSPLTLTTPVNLPTPVTAPVNIAHPVTITSPMNLPTPMTLAAPLNIAMRPVESMPFLPQALPTSPPW

SEQ ID NO: 874319 - protein, 364 aa, Homo sapiens
MPVTQSVKKPSKPVKKNHACEMCGKAFRDVYHLNRHKLSHSDEKPFECPICNQRFKRKDRMTYHVRSHEGGITKPYTCSVCGKGFSRPDHLSCHVKHVHSTERPFKCQTCTAAFATKDRLRTHMVRHEGKVSCNICGKLLSAAYITSHLKTHGQSQSINCNTCKQGISKTCMSEETSNQKQQQQQQQQQQQQQQQQQHVTSWPGKQVETLRLWEEAVKARKKEAANLCQTSTAATTPVTLTTPFSITSSVSSGTMSNPVTVAAAMSMRSPVNVSSAVNITSPMNIGHPVTITSPLSMTSPLTLTTPVNLPTPVTAPVNIAHPVTITSPMNLPTPMTLAAPLNIAMRPVESMPFLPQALPTSPPW

SEQ ID NO: 874320 - protein, 364 aa, Homo sapiens; identical to SEQ ID NO: 874319

SEQ ID NO: 874321 - protein, 431 aa, Homo sapiens
MPVTQSVKKPSKPVKKNHACEMCGKAFRDVYHLNRHKLSHSDEKPFECPICNQRFKRKDRMTYHVRSHEGGITKPYTCSVCGKGFSRPDHLSCHVKHVHSTERPFKCQTCTAAFATKDRLRTHMVRHEGKVSCNICGKLLSAAYITSHLKTHGQSQSINCNTCKQGISKTCMSEETSNQKQQQQQQQQQQQQQQQQQHVTSWPGKQVETLRLWEEAVKARKKEAANLCQTSTAATTPVTLTTPFSITSSVSSGTMSNPVTVAAAMSMRSPVNVSSAVNITSPMNIGHPVTITSPLSMTSPLTLTTPVSSASTTAMPVTQSVKKPSKPVKKNHACEMCGKAFRDVYHLNRHKLSHSDEKPFECPICNQRFKRKDRMTYHVRSHEGGITKPYTCSVCGKGFSRPDHLSCHVKHVHSTERPFKCQTCTAAGVTI

SEQ ID NO: 874322 - protein, 70 aa, Homo sapiens
MDSPLQQQQQQQQQQQQQQQQQHVTSWPGKQVETLRLWEEAVKARKKEAANQCAQTSTVCYSLVDGGTAA

SEQ ID NO: 874323 - protein, 569 aa, Homo sapiens
RSGRARRCHVEEPPLPLPPPPPPLCCRLLRLRRLPERGEWGGGGSAAAAMEANWTAFLFQAHEASHHQQQAAQNSLLPLLSSAVEPPDQKPLLPIPITQKPQGAPETLKDAIGIKKEKPKTSFVCTYCSKAFRDSYHLRRHESCHTGIKLVSRPKKTPTTVVPLISTIAGDSSRTSLVSTIAGILSTVTTSSSGTNPSSSASTTAMPVTQSVKKPSKPVKKNHACEMCGKAFRDVYHLNRHKLSHSDEKPFECPICNQRFKRKDRMTYHVRSHEGGITKPYTCSVCGKGFSRPDHLSCHVKHVHSTERPFKCQTCTAAFATKDRLRTHMVRHEGKVSCNICGKLLSAAYITSHLKTHGQSQSINCNTCKQGISKTCMSEETSNQKQQQQQQQQQQQQQQQQQHVTSWPGKQVETLRLWEEAVKARKKEAANLCQTSTAATTPVTLTTPFSITSSVSSGTMSNPVTVAAAMSMRSPVNVSSAVNITSPMNIGHPVTITSPLSMTSPLTLTTPVNLPTPVTAPVNIAHPVTITSPMNLPTPMTLAAPLNIAMRPVESMPFLPQALPTSPPW

SEQ ID NO: 874324 - protein, 364 aa, Homo sapiens; identical to SEQ ID NO: 874319

SEQ ID NO: 874325 - protein, 82 aa, Homo sapiens
RTHTGERPFSCDWLDCDKKFTRSDELARHYRTHTGEKRFSCPLCPKQFSRSDHLTKHARRHSPARWKAPPPAPVPARRPASP

SEQ ID NO: 874326 - protein, 173 aa, Homo sapiens
QNFHPDSEAAINRQINLELYASYVYLSMAYYFSRDDVALNNFSRYFLHQSREETEHAEKLMRLQNQRGGRIRLQDIKKPEQDDWESGLHAMECALLLEKNVNQSLLELHALASDKGDPHLCDFLETYYLNEQVKSIKELGDHVHNLVKMGAPDAGLAEYLFDTHTLGNENKQN

SEQ ID NO: 874327 - protein, 109 aa, Homo sapiens
GRGGLGCRSWRCAGSSRPYSEVFSVALLERGSSCILRIFCISAPFSSRCHRMPQIGPVPSVNQTSETASLQGQSPSTDELEDSECTPGSRPYRHTLGQTSPYTTQERTP

SEQ ID NO: 874328 - protein, 143 aa, Homo sapiens
MSSNLLPTLNSGGKVKDGSTKEDRPYKIFFRDLFLVKENEMAAKETEKFMNRNMKVYQKTTFSSRMKSHSYLSQLAFYPKRSGRSFEKFGPGPAPIPRLIEGSDTKRTVHEFINDQRDRFLLEYALSTKRNTIKKFEKDIAMR

SEQ ID NO: 874329 - protein, 152 aa, Homo sapiens
LCHQTVLPEAPLPESQPASPAVKSEGVRPPPSASQLPRSLVYDPDIANLPGPPFLFFIMDVSDGTYAVSLPKDQSEHINPFNSCFPSPSMLAHLTGAKAQVLPLAQAALRDRFPFASAPSRSPVSCHFPLSPHLLLSTSLILFQPPGLPAGS

SEQ ID NO: 874330 - protein, 73 aa, Homo sapiens
MSTNDAFPMALLPLPHSDPDSLPCILPILHSMFPQLHLLPCNQRMAHDEHQNGGNSSPFPSRCCVCPAQTRAP

SEQ ID NO: 874331 - protein, 101 aa, Homo sapiens
MLTLPMSCVGPALPGGNQRWSAFWRDRSRAHTMPLVVWTPLVHTGTDSVFSSTAATKGPPTERLQNLKLILSQQWGLQSKIRVPAGHAIWKGPRGESVPCL

SEQ ID NO: 874332 - protein, 104 aa, Homo sapiens
QAGRNGRCALPGDSDSTFPHLCPGLACLQALIDVHIVIVPHLVPGETLAAASPKGQPEDTAKCQFQPWRYRGVRCVGPWVPERIHLCLSLFCAAMTEYMRSDNG

SEQ ID NO: 874333 - protein, 102 aa, Homo sapiens
GPIPAPGQTQWLQAPDQLPTALIMRLALTDPGFRLILVDSSDGPASMDPSSRTTLVDPGFRLAPKAPGPRLDFADLTPRPAPAHSASRPTQVDPGSSQTPKL

SEQ ID NO: 874334 - protein, 80 aa, Homo sapiens
MDVAPPSPFLSGTHTAVRLIHGPPPSSLARCRGHPCCLPYDASSVVSDALFSIGRCACLLGAFAFFCVEILFSLSFALHL

SEQ ID NO: 874335 - protein, 82 aa, Homo sapiens
QRVHTGEKPYKCRECGKAFRWSSNLYRHQRIHSLQKQYDCHESEKTPNVEPKILTGEKRFWCQECGKTFTRKRTLLDHKGIH

SEQ ID NO: 874336 - protein, 87 aa, Homo sapiens
MSGRTAPFTCGETQRRGRVLSPVLLFTGSPVSHPPEMEANPAGSGAGGGGSSGIGGEDGVHFQSYPFDFLEFLNHQRFEPMELYGEH

SEQ ID NO: 874337 - protein, 39 aa, Homo sapiens
SYSELHHTLLLTLVILLCTRMYSFCLTVCPLGPVDRSLS

SEQ ID NO: 874338 - protein, 118 aa, Homo sapiens
EIPFDGVLVCIAHLQRFSIQTSYISRTQGLVATVPDGTALRGSQTYTPICNTGSHIIQLAGSIHPEVNEAHFMYTHSPQRPGNKVLLPIHFQISDPPNFCGRNIRGWVHEELHVFPGR

SEQ ID NO: 874339 - protein, 51 aa, Homo sapiens
KSRECSASSGDPSEAFKLRRRSSAIPKRVESEQPRLQFKSCRILGPSSSLG

SEQ ID NO: 874340 - protein, 101 aa, Homo sapiens
MAASTSSTVACVMNPKPLECSVFGSLITTQSVSVPHCSKWLLRLSSVVLKLNPPMKSFLSCSGSLGDSDLDMTEGRRETLTMLLQWRPRAEKNKLMNVSHC

SEQ ID NO: 874341 - protein, 83 aa, Homo sapiens
MSPFLWLLSGYKPETGPITQDTHHQCLWPEQGHFQSKPSPESRGRGHEPQKHPGMSGHLATQSTGPTLAHPARAVDSVCHRTP

SEQ ID NO: 874342 - protein, 293 aa, Homo sapiens
GARSGALMTRKGRGMQEVEELSETGKVVKQHRVGEALRVVVLVWAGSLGVDEAWFWVGGGYYGAVPAVEMPARALLPRRMGHRTLASTPALWASIPCPRSELRLDLVLPSGQSFRWREQSPAHWSGVLADQVWTLTQTEEQLHCTVYRGDKSQASRPTPDELEAVRKYFQLDVTLAQLYHHWGSVDSHFQEVAQKFQGVRLLRQDPIECLFSFICSSNNNIARITGMVERLCQAFGPRLIQLDDVTYHGFPSLQALAGPEVEAHLRKLGLGYRARHVSASARGILEEQGGLAW

SEQ ID NO: 874343 - protein, 35 aa, Homo sapiens
RTLNTEPILVKVFKQIEDDGILLNLFYKARITEIP

SEQ ID NO: 874344 - protein, 124 aa, Homo sapiens
RWLTPVIPALWEAEVGGSRGQEIETVLVNTVKPCLYYKYKKLAWRGGGYLQSQLLGRLRQENGMNLGGTGCSEPRSQPLHSSLDNRARLCLKNKTKKPYFHIQSHWDLELQHMNFQGYHSVQST

SEQ ID NO: 874345 - protein, 499 aa, Homo sapiens
MPHPRRYHSSERGSRGSYREHYRSRKHKRRRSRSWSSSSDRTRRRRREDSYHVRSRSSYDDRSSDRRVYDRRYCGSYRRNDYSRDRGDAYYDTDYRHSYEYQRENSSYRSQRSSRRKHRRRRRRSRTFSRSSSQHSSRRAKSVEDDAEGHLIYHVGDWLQERYEIVSTLGEGTFGRVVQCVDHRRGGARVALKIIKNVEKYKEAARLEINVLEKINEKDPDNKNLCVQMFDWFDYHGHMCISFELLGLSTFDFLKDNNYLPYPIHQVRHMAFQLCQAVKFLHDNKLTHTDLKPENILFVNSDYELTYNLEKKRDERSVKSTAVRVVDFGSATFDHEHHSTIVSTRHYRAPEVILELGWSQPCDVWSIGCIIFEYYVGFTLFQTHDNREHLAMMERILGPIPSRMIRKTRKQKYFYRGRLDWDENTSAGRYVRENCKPLRRYLTSEAEEHHQLFDLIESMLEYEPAKRLTLGEALQHPFFARLRAEPPNKLWDSSRDISR

SEQ ID NO: 874346 - protein, 528 aa, Homo sapiens
MPHPRRYHSSERGSRGSYREHYRSRKHKRRRSRSWSSSSDRTRRRRREDSYHVRSRSSYDDRSSDRRVYDRRYCGSYRRNDYSRDRGDAYYDTDYRHSYEYQRENSSYRSQRSSRRKHRRRRRRSRTFSRSSSQHSSRRAKSVEDDAEGHLIYHVGDWLQERWLLSPFFFQLSSFPTFSPSLSPTLLSFISDEIVSTLGEGTFGRVVQCVDHRRGGARVALKIIKNVEKYKEAARLEINVLEKINEKDPDNKNLCVQMFDWFDYHGHMCISFELLGLSTFDFLKDNNYLPYPIHQVRHMAFQLCQAVKFLHDNKLTHTDLKPENILFVNSDYELTYNLEKKRDERSVKSTAVRVVDFGSATFDHEHHSTIVSTRHYRAPEVILELGWSQPCDVWSIGCIIFEYYVGFTLFQTHDNREHLAMMERILGPIPSRMIRKTRKQKYFYRGRLDWDENTSAGRYVRENCKPLRRYLTSEAEEHHQLFDLIESMLEYEPAKRLTLGEALQHPFFARLRAEPPNKLWDSSRDISR

SEQ ID NO: 874347 - protein, 479 aa, Homo sapiens
MPHPRRYHSSERGSRGSYREHYRSRKHKRRRSRSWSSSSDRTRRRRREDSYHVRSRSSYDDRSSDRRVYDRRYCGSYRRNDYSRDRGDAYYDTDYRHSYEYQRENSSYRSQRSSRRKHRRRRRRSRTFSRSSSQHSSRRAKSVEDDAEGHLIYHVGDWLQERYEIVSTLGEGTFGRVVQCVDHRRGGARVALKIIKNVEKYKEAARLEINVLEKINEKDPDNKNLCVQMFDWFDYHGHMCISFELLGLSTFDFLKDNNYLPYPIHQVRHMAFQLCQAVKFLHDNKLTHTDLKRDERSVKSTAVRVVDFGSATFDHEHHSTIVSTRHYRAPEVILELGWSQPCDVWSIGCIIFEYYVGFTLFQTHDNREHLAMMERILGPIPSRMIRKTRKQKYFYRGRLDWDENTSAGRYVRENCKPLRRYLTSEAEEHHQLFDLIESMLEYEPAKRLTLGEALQHPFFARLRAEPPNKLWDSSRDISR

SEQ ID NO: 874348 - protein, 271 aa, Homo sapiens
MFDWFDYHGHMCISFELLGLSTFDFLKDNNYLPYPIHQVRHMAFQLCQAVKFLHDNKLTHTDLKPENILFVNSDYELTYNLEKKRDERSVKSTAVRVVDFGSATFDHEHHSTIVSTRHYRAPEVILELGWSQPCDVWSIGCIIFEYYVGFTLFQTHDNREHLAMMERILGPIPSRMIRKTRKQKYFYRGRLDWDENTSAGRYVRENCKPLRRYLTSEAEEHHQLFDLIESMLEYEPAKRLTLGEALQHPFFARLRAEPPNKLWDSSRDISR

SEQ ID NO: 874349 - protein, 268 aa, Homo sapiens
MRDITCYLVAELFAGDNGDLLAHALVRVEVVAQARVVLFYDDPGRLLHGFGANAAHVARVKPENILFVNSDYELTYNLEKKRDERSVKSTAVRVVDFGSATFDHEHHSTIVSTRHYRAPEVILELGWSQPCDVWSIGCIIFEYYVGFTLFQTHDNREHLAMMERILGPIPSRMIRKTRKQKYFYRGRLDWDENTSAGRYVRENCKPLRRYLTSEAEEHHQLFDLIESMLEYEPAKRLTLGEALQHPFFARLRAEPPNKLWDSSRDISR

SEQ ID NO: 874350 - protein, 499 aa, Homo sapiens; identical to SEQ ID NO: 874345

SEQ ID NO: 874351 - protein, 271 aa, Homo sapiens; identical to SEQ ID NO: 874348

SEQ ID NO: 874352 - protein, 499 aa, Homo sapiens; identical to SEQ ID NO: 874345

SEQ ID NO: 874353 - protein, 479 aa, Homo sapiens
MPHPRRYHSSERGSRGSYREHYRSRKHKRRRSRSWSSSSDRTRRRRREDSYHVRSRSSYDDRSSDRRVYDRRYCGSYRRNDYSRDRGDAYYDTDYRHSYEYQRENSSYRSQRSSRRKHRRRRRRSRTFSRSSSQHSSRRAKSVEDDAEGHLIYHVGDWLQERYEIVSTLGEGTFGRVVQCVDHRRGGARVALKIIKNVEKYKEAARLEINVLEKINEKDPDNKNLCVQMFDWFDYHGHMCISFELLGLSTFDFLKDNNYLPYPIHQVRHMAFQLCQAVKFLHDNKLTHTDLKPENILFVNSDYELTYNLEKKRDERSVKSTAVRVVDFGSATFDHEHHSTIVSTRHYRAPEVILELGWSQPCDVWSIGCIIFEYYVGFTLFQVSDGMSYLTAWHSSTWFLCFLLRTCLLSSPHCLPSWQLILSMPFSVPCSLFDLIESMLEYEPAKRLTLGEALQHPFFARLRAEPPNKLWDSSRDISR

SEQ ID NO: 874354 - protein, 386 aa, Homo sapiens
MPHPRRYHSSERGSRGSYREHYRSRKHKRRRSRSWSSSSDRTRRRRREDSYHVRSRSSYDDRSSDRRVYDRRYCGSYRRNDYSRDRGDAYYDTDYRHSYEYQRENSSYRSQRSSRRKHRRRRRRSRTFSRSSSQHSSRRAKSVEDDAEGHLIYHVGDWLQERYEIVSTLGEGTFGRVVQCVDHRRGGARVALKIIKNVEKYKEAARLEINVLEKINEKDPDNKNLCVQMFDWFDYHGHMCISFELLGLSTFDFLKDNNYLPYPIHQVRHMAFQLCQAVKFLHDNKLTHTDLKPENILFVNSDYELTYNLEKKRDERSVKSTAVRVVDFGSATFDHEHHSTIVSTRHYRAPEVILELGWSQPCDVWSIGCIIFEYYVGFTLLWLFGD

SEQ ID NO: 874355 - protein, 55 aa, Homo sapiens
QDTEPQNPMGSQRRSPEEEAGPYLEGLPLISSETRGAVGGEDRRCLETLAPQRCL

SEQ ID NO: 874356 - protein, 231 aa, Homo sapiens
RRCQATGRRRQEGTAGCRFLSPWSRAAPPRRRPRWVRGLSGAVGQALSRPPRALSRPRRSRAALRAACERDSREAPGRRTHSFPLGTPAGARLSLLWPAWASQAPSRLSPEQEPHLGPPLSHLPWVWYAPLCRTPRPPAWEEARTPGRPGHSCGLCQFHSSTWALSTVSHWAARGTPAASPGPLQGRGRLGSPGRPAPRRACLLSSCPSGLCWPGGSKMQGRRELGGEPLS

SEQ ID NO: 874357 - protein, 138 aa, Homo sapiens
SRCAWREQGADTGVQAGTRIKWKWWRWGERGRLGDTVEAEASGPGEGLDTALGQVPHGRAEGRGSSGQLEEAGDVHQDQRQNSFTRKGHSSPKKTGKLLWPFVQPKAHTPTSKLASNLHSTLQSTLCQKHLWPLHLLR

SEQ ID NO: 874358 - protein, 110 aa, Homo sapiens
HYSHVVTSPFKYLLKFYLVSKRIKNQERHTGEETSSHESSLLQREMTNSVSTLSEKTCQPPKATVPSLWRNSFENLMKALPLSGKVSVCTETQNTPWNFKRVKGPLKLTH

SEQ ID NO: 874359 - protein, 82 aa, Homo sapiens
MAPLFTTHPTGSWGHRDEGHKLVASLQTNALHVDPLHLRMASGEDQWQKALKASLLQAEVLGVGLGMSEGLEGQDSPLPGAE

SEQ ID NO: 874360 - protein, 68 aa, Homo sapiens
MQDPRHPQGLPLSPGLPKRQRQDRTIYNWKQQEVLENHFKEEQYPDYDTRQELAEMLNLREYQVQVWF

SEQ ID NO: 874361 - protein, 470 aa, Homo sapiens
SDNEIQRLPPEVANFMQLVELDVSRNDIPEIPESIKFCKALEIADFSGNPLSRLPDGFTQLRSLAHLALNDVSLQALPGDVGNLANLVTLELRENLLKSLPASLSFLVKLEQLDLGGNDLEVLPDTLGALPNLRELWLDRNQLSALPPELGNLRRLVCLDVSENRLEELPAELGGLVLLTDLLLSQNLLRRLPDGIGQLKQLSILKVDQNRLCEVTEAIGDCENLSELILTENLLMALPRSLGKLTKLTNLNVDRNHLEALPPEIGGCVALSVLSLRDNRLAVLPPELAHTTELHVLDVAGNRLQSLPFALTHLNLKALWLAENQAQPMLRFQTEDDARTGEKVLTCYLLPQQPPLSLEDAGQQGSLSETWSDAPPSRVSVIQFLEAPIGDEDAEEAAAEKRGLQRRATPHPSELKVMKRSIEGRRSEACPCQPDSGSPLPAEEEKRLSAESGLSEDSRPSPAPPLPQVF

SEQ ID NO: 874362 - protein, 1226 aa, Homo sapiens
SDNEIQRLPPEVANFMQLVELDVSRNDIPEIPESIKFCKALEIADFSGNPLSRLPDGFTQLRSLAHLALNDVSLQALPGDVGNLANLVTLELRENLLKSLPASLSFLVKLEQLDLGGNDLEVLPDTLGALPNLRELWLDRNQLSALPPELGNLRRLVCLDVSENRLEELPAELGGLVLLTDLLLSQNLLRRLPDGIGQLKQLSILKVDQNRLCEVTEAIGDCENLSELILTENLLMALPRSLGKLTKLTNLNVDRNHLEALPPEIGGCVALSVLSLRDNRLAVLPPELAHTTELHVLDVAGNRLQSLPFALTHLNLKALWLAENQAQPMLRFQTEDDARTGEKVLTCYLLPQQPPLSLEDAGQQGSLSETWSDAPPSRVSVIQFLEAPIGDEDAEEAAAEKRGLQRRATPHPSELKVMKRSIEGRRSEACPCQPDSGSPLPAEEEKRLSAESGLSEDSRPSASTVSEAEPEGPSAEAQGGSQQEATTAGGEEDAEEDYQEPTVHFAEDALLPGDDREIEEGQPEAPWTLPGGRQRLIRKDTPHYKKHFKISKLPQPEAVVALLQGMQPDGEGPVAPGGWHNGPHAPWAPRAQKEEEEEEEGSPQEEEEEEEEENRAEEEEASTEEEDKEGAVVSAPSVKGVSFDQANNLLIEPARIEEEELTLTILRQTGGLGISIAGGKGSTPYKGDDEGIFISRVSEEGPAARAGVRVGDKLLEVNGVALQGAEHHEAVEALRGAGTAVQMRVWRERMVEPENAVTITPLRPEDDYSPRERRGGGLRLPLLPPESPGPLRQRHVACLARSERGLGFSIAGGKGSTPYRAGDAGIFVSRIAEGGAAHRAGTLQVGDRVLSINGVDVTEARHDHAVSLLTAASPTIALLLEREAGGPLPPSPLPHSSPPTAAVATTSITTATPGVPGLPSLAPSLLAAALEGPYPVEEIRLPRAGGPLGLSIVGGSDHSSHPFGVQEPGVFISKVLPRGLAARSGLRVGDRILAVNGQDVRDATHQEAVSALLRPCLELSLLVRRDPAPPGLRELCIQKAPGERLGISIRGGARGHAGNPRDPTDEGIFISKVSPTGAAGRDGRLRVGLRLLEVNQQSLLGLTHGEAVQLLRSVGDTLTVLVCDGFEASTDAALEVSPGVIANPFAAGIGHRNSLESISSIDRELSPEGPGKEKELPWPGPCALLEEQAPPPDLGWGPCQLQHHPCPKSFNLGVSILKRPHRSSGL

SEQ ID NO: 874363 - protein, 1564 aa, Homo sapiens
SDNEIQRLPPEVANFMQLVELDVSRNDIPEIPESIKFCKALEIADFSGNPLSRLPDGFTQLRSLAHLALNDVSLQALPGDVGNLANLVTLELRENLLKSLPASLSFLVKLEQLDLGGNDLEVLPDTLGALPNLRELWLDRNQLSALPPELGNLRRLVCLDVSENRLEELPAELGGLVLLTDLLLSQNLLRRLPDGIGQLKQLSILKVDQNRLCEVTEAIGDCENLSELILTENLLMALPRSLGKLTKLTNLNVDRNHLEALPPEIGGCVALSVLSLRDNRLAVLPPELAHTTELHVLDVAGNRLQSLPFALTHLNLKALWLAENQAQPMLRFQTEDDARTGEKVLTCYLLPQQPPLSLEDAGQQGSLSETWSDAPPSRVSVIQFLEAPIGDEDAEEAAAEKRGLQRRATPHPSELKVMKRSIEGRRSEACPCQPDSGSPLPAEEEKRLSAESGLSEDSRPSASTVSEAEPEGPSAEAQGGSQQEATTAGGEEDAEEDYQEPTVHFAEDALLPGDDREIEEGQPEAPWTLPGGRQRLIRKDTPHYKKHFKISKLPQPEAVVALLQGMQPDGEGPVAPGGWHNGPHAPWAPRAQKEEEEEEEGSPQEEEEEEEEENRAEEEEASTEEEDKEGAVVSAPSVKGVSFDQANNLLIEPARIEEEELTLTILRQTGGLGISIAGGKGSTPYKGDDEGIFISRVSEEGPAARAGVRVGDKLLEVNGVALQGAEHHEAVEALRGAGTAVQMRVWRERMVEPENAVTITPLRPEDDYSPRERRGGGLRLPLLPPESPGPLRQRHVACLARSERGLGFSIAGGKGSTPYRAGDAGIFVSRIAEGGAAHRAGTLQVGDRVLSINGVDVTEARHDHAVSLLTAASPTIALLLEREAGGPLPPSPLPHSSPPTAAVATTSITTATPGVPGLPSLAPSLLAAALEGPYPVEEIRLPRAGGPLGLSIVGGSDHSSHPFGVQEPGVFISKVLPRGLAARSGLRVGDRILAVNGQDVRDATHQEAVSALLRPCLELSLLVRRDPAPPGLRELCIQKAPGERLGISIRGGARGHAGNPRDPTDEGIFISKVSPTGAAGRDGRLRVGLRLLEVNQQSLLGLTHGEAVQLLRSVGDTLTVLVCDGFEASTDAALEVSPGVIANPFAAGIGHRNSLESISSIDRELSPEGPGKEKELPGQTLHWGPEATEAAGRGLQPLKLDYRALAAVPSAGSVQRVPSGAAGGKMAESPCSPSGQQPPSPPSPDELPANVKQAYRAFAAVPTSHPPEDAPAQPPTPGPAASPEQLSFRERQKYFELEVRVPQAEGPPKRVSLVGADDLRKMQEEEARKLQQKRAQMLREAAEAGAEARLALDGETLGEEEQEDEQPPWASPSPTSRQSPASPPPLGGGAPVRTAKAERRHQERLRVQSPEPPAPERALSPAELRALEAEKRALWRAARMKSLEQDALRAQMVLSRSQEGRGTRGPLERLAEAPSPAPTPSPTPVEDLGPQTSTSPGRLSPDFAEELRSLEPSPSPGPQEEDGEVALVLLGRPSPGAVGPEDVALCSSRRPVRPGRRGLGPVPS

SEQ ID NO: 874364 - protein, 1589 aa, Homo sapiens
SDNEIQRLPPEVANFMQLVELDVSRNDIPEIPESIKFCKALEIADFSGNPLSRLPDGFTQLRSLAHLALNDVSLQALPGDVGNLANLVTLELRENLLKSLPASLSFLVKLEQLDLGGNDLEVLPDTLGALPNLRELWLDRNQLSALPPELGNLRRLVCLDVSENRLEELPAELGGLVLLTDLLLSQNLLRRLPDGIGQLKQLSILKVDQNRLCEVTEAIGDCENLSELILTENLLMALPRSLGKLTKLTNLNVDRNHLEALPPEIGGCVALSVLSLRDNRLAVLPPELAHTTELHVLDVAGNRLQSLPFALTHLNLKALWLAENQAQPMLRFQTEDDARTGEKVLTCYLLPQQPPLSLEDAGQQGSLSETWSDAPPSRVSVIQFLEAPIGDEDAEEAAAEKRGLQRRATPHPSELKVMKRSIEGRRSEACPCQPDSGSPLPAEEEKRLSAESGLSEDSRPSASTVSEAEPEGPSAEAQGGSQQEATTAGGEEDAEEDYQEPTVHFAEDALLPGDDREIEEGQPEAPWTLPGGRQRLIRKDTPHYKKHFKISKLPQPEAVVALLQGMQPDGEGPVAPGGWHNGPHAPWAPRAQKEEEEEEEGSPQEEEEEEEEENRAEEEEASTEEEDKEGAVVSAPSVKGVSFDQANNLLIEPARIEEEELTLTILRQTGGLGISIAGGKGSTPYKGDDEGIFISRVSEEGPAARAGVRVGDKLLEVNGVALQGAEHHEAVEALRGAGTAVQMRVWRERMVEPENAVTITPLRPEDDYSPRERRGGGLRLPLLPPESPGPLRQRHVACLARSERGLGFSIAGGKGSTPYRAGDAGIFVSRIAEGGAAHRAGTLQVGDRVLSINGVDVTEARHDHAVSLLTAASPTIALLLEREAGGPLPPSPLPHSSPPTAAVATTSITTATPGVPGLPSLAPSLLAAALEGPYPVEEIRLPRAGGPLGLSIVGGSDHSSHPFGVQEPGVFISKVLPRGLAARSGLRVGDRILAVNGQDVRDATHQEAVSALLRPCLELSLLVRRDPAPPGLRELCIQKAPGERLGISIRGGARGHAGNPRDPTDEGIFISKVSPTGAAGRDGRLRVGLRLLEVNQQSLLGLTHGEAVQLLRSVGDTLTVLVCDGFEASTDAALEVSPGVIANPFAAGIGHRNSLESISSIDRELSPEGPGKEKELPGQTLHWGPEATEAAGRGLQPLKLDYRALAAVPSAGSVQRVPSGAAGGKMAESPCSPSGQQPPSPPSPDELPANVKQAYRAFAAVPTSHPPEDAPAQPPTPGPAASPEQLSFRERQKYFELEVRVPQAEGPPKRVSLVGADDLRKMQEEEARKLQQKRAQMLREAAEAGAEARLALDGETLGEEEQEDEQPPWASPSPTSRQSPASPPPLGGGAPVRTAKAERRHQERLRVQSPEPPAPERALSPAELRALEAEKRALWRAARMKSLEQDALRAQMVLSRSQEGRGTRGPLERLAEAPSPAPTPSPTPVEDLGPQTSTSPGRLPLSGKKFDYRAFAALPSSRPVYDIQSPDFAEELRSLEPSPSPGPQEEDGEVALVLLGRPSPGAVGPEDVALCSSRRPVRPGRRGLGPVPS

SEQ ID NO: 874365 - protein, 301 aa, Homo sapiens
MEDEVVRFAKKMDKMVQKKNAAGALDLLKELKNIPMTLELLQSTRIGMSVNAIRKQSTDEEVTSLAKSLIKSWKKLLDGPSTEKDLDEKKKEPAITSQNSPEAREESTSSGNVSNRKDETNARDTYVSSFPRAPSTSDSVRLKCREMLAAALRTGDDYIAIGADEEELGSQIEEAIYQEIRNTDMKYKNRVRSRISNLKDAKNPNLRKNVLCGNIPPDLFARMTAEEMASDELKEMRKNLTKEAIREHQMAKTGGTQTDLFTCGKCKKKNCTYTQVQTRSADEPMTTFVVCNECGNRWKFC

SEQ ID NO: 874366 - protein, 280 aa, Homo sapiens
MEDEVVRFAKKMDKMVQKKNASTRIGMSVNAIRKQSTDEEVTSLAKSLIKSWKKLLDGPSTEKDLDEKKKEPAITSQNSPEAREESTSSGNVSNRKDETNARDTYVSSFPRAPSTSDSVRLKCREMLAAALRTGDDYIAIGADEEELGSQIEEAIYQEIRNTDMKYKNRVRSRISNLKDAKNPNLRKNVLCGNIPPDLFARMTAEEMASDELKEMRKNLTKEAIREHQMAKTGGTQTDLFTCGKCKKKNCTYTQVQTRSADEPMTTFVVCNECGNRWKFC

SEQ ID NO: 874367 - protein, 180 aa, Homo sapiens
MEDEVVRFAKKMDKMVQKKNAAGALDLLKELKNIPMTLELLQSTRIGMSVNAIRKQSTDEEVTSLAKSLIKSWKKLLDGPSTEKDLDEKKKEPAITSQNSPEAREESTSSGNVSNRKDETNARDTYVSSFPRAPSTSDSVRLKCREMLAAALRTGDDYIAIGADEEELGSQIEEAIYRNG

SEQ ID NO: 874368 - protein, 301 aa, Homo sapiens; identical to SEQ ID NO: 874365

SEQ ID NO: 874369 - protein, 301 aa, Homo sapiens; identical to SEQ ID NO: 874365

SEQ ID NO: 874370 - protein, 155 aa, Homo sapiens
MEDEVVRFAKKMDKMVQKKNAAGALDLLKELKNIPMTLELLQSTRIGMSVNAIRKQSTDEEVTSLAKSLIKSWKKLLDGPSTEKDLDEKKKEPAITSQNSPEAREESTSQYRHIFILKVIVLLPASIPLSNVPLFTLLFLFSNQMEVVNVCSHVF

SEQ ID NO: 874371 - protein, 312 aa, Homo sapiens
MGSPLTSDLQSVGSACTSRAVFDCRCLGRRSRAGALDLLKELKNIPMTLELLQSTRIGMSVNAIRKQSTDEEVTSLAKSLIKSWKKLLDGPSTEKDLDEKKKEPAITSQNSPEAREESTSSGNVSNRKDETNARDTYVSSFPRAPSTSDSVRLKCREMLAAALRTGDDYIAIGADEEELGSQIEEAIYQEIRNTDMKYKNRVRSRISNLKDAKNPNLRKNVLCGNIPPDLFARMTAEEMASDELKEMRKNLTKEAIREHQMAKTGGTQTDLFTCGKCKKKNCTYTQVQTRSADEPMTTFVVCNECGNRWKFC

SEQ ID NO: 874372 - protein, 238 aa, Homo sapiens
MEDESLIKSWKKLLDGPSTEKDLDEKKKEPAITSQNSPEAREESTSSGNVSNRKDETNARDTYVSSFPRAPSTSDSVRLKCREMLAAALRTGDDYIAIGADEEELGSQIEEAIYQEIRNTDMKYKNRVRSRISNLKDAKNPNLRKNVLCGNIPPDLFARMTAEEMASDELKEMRKNLTKEAIREHQMAKTGGTQTDLFTCGKCKKKNCTYTQVQTRSADEPMTTFVVCNECGNRWKFC

SEQ ID NO: 874373 - protein, 301 aa, Homo sapiens; identical to SEQ ID NO: 874365

SEQ ID NO: 874374 - protein, 78 aa, Homo sapiens
LHSGWQEHHLKEMRKNLTKEAIREHQMAKTGGTQTDLFTCGKCKKKNCTYTQVQTRSADEPMTTFVVCNECGNRWKFC

SEQ ID NO: 874375 - protein, 127 aa, Homo sapiens
VQQLKLLLRPDASLQAATDILFREVGLAGGHPLIGQLAHGSGCIGHQGQIGGVSAVQGFPAEVEAQEAGIDACKGLPSRRGGMQEVQGGTNEPAIGRQEAGSGYLVVPLQVPGEHLHQVVTLSWCGR

SEQ ID NO: 874376 - protein, 112 aa, Homo sapiens
MAKWGCEPLAQRLHPRLEVILHVPKQAMPRSAKKSGQPGHECTPRSPGNFIQDTTQPVLQPAGHRLPQLSRATTTLTEVSQEATLDTGRQQGMERGKEGGKTPSCGRVAKDG

SEQ ID NO: 874377 - protein, 318 aa, Homo sapiens
LKACGSRLTEKLLEGAPTEDTLVQMEKLADLEEESESWDNSEAEEEEKAPVLPESTEGRELTQGPAESSSLSGCGSWQPRKLPVFKSLRHMRQVLGAPSFRMLAWHVLMGNQVIWKSRDVDLVQSAFEVLRTMLPVGCVRIIPYSSQYEEAYRCNFLGLSPHVQIPPHVLSSEFAVIVEVHAAARSTLHPVGCEDDQSLSKYEFVVTSGSPVAADRVGPTILNKIEAALTNQNLSVDVVDQCLVCLKEEWMNKVKVLFKFTKVDSRPKEDTQKLLSILGASEEDNVKLLKFWMTGLSKTYKSHLMSTVRSPTASESRN

SEQ ID NO: 874378 - protein, 137 aa, Homo sapiens
LKACGSRLTEKLLEGAPTEDTLVQMEKLADLEEESESWDNSEAEEEEKAPVLPESTEGRELTQGPAESSSLSGCGSWQPRKLPVFKSLRHMRQVLGAPSFRMLAWHVLMGNQVIWKSRDVDLVQSAFEVLRVRTSFP

SEQ ID NO: 874379 - protein, 318 aa, Homo sapiens; identical to SEQ ID NO: 874377

SEQ ID NO: 874380 - protein, 195 aa, Homo sapiens
SESCCPPQTMLPVGCVRIIPYSSQYEEAYRCNFLGLSPHVQIPPHVLSSEFAVIVEVHAAARSTLHPVGCEDDQSLSKYEFVVTSGSPVAADRVGPTILNKIEAALTNQNLSVDVVDQCLVCLKEEWMNKVKVLFKFTKVDSRPKEDTQKLLSILGASEEDNVKLLKFWMTGLSKTYKSHLMSTVRSPTASESRN

SEQ ID NO: 874381 - protein, 50 aa, Homo sapiens
MLSEGLGSVPYSWAAFSNPGSIALSSGPSRSSPTWAGVAKLFQYCWQQHS

SEQ ID NO: 874382 - protein, 129 aa, Homo sapiens
AWATEPDSITKKNKNKQTKTNPPRALSSLGKSQVLTRAFVVPHESLPAASSITPLTTHGPLLTPLETRRSPFCFCLRTFALAVFQPERLLLPLVPPGLDSNVILPVKSFHLGSFYPSFLLSFCFILHCT

SEQ ID NO: 874383 - protein, 108 aa, Homo sapiens
GREVLSVSVLMTSTTQEGSIRHKAEFLEMNKYGGQNQHFLTRELNNRETCKTDNTSQKKNRREEKMREKLQDAWKRCRKSNIPCGAYRTYRERCRRRNHQRDHRRKMS

SEQ ID NO: 874384 - protein, 111 aa, Homo sapiens
TSCDWQSVKQSPLGLLQRKLADPGYAQGEAPEMFRRYLCWLLGGRFDGEQGEHACSSTVFFLLTGPQNSVSLFLFPRAVSSCWNLLSLSLLGTPQREAWPSIPPPPAPKTG

SEQ ID NO: 874385 - protein, 70 aa, Homo sapiens
GSLGPGQRHLQKEDLLPWDSARLEAQRLQSTGLGAGKELGGQGVEALPTVIADGPGPTHHTPAWCPPAWP

SEQ ID NO: 874386 - protein, 114 aa, Homo sapiens
MVMEGPRYLSPNCPDLLSENPLHALLPHKIKREKKTSAVHGQSQSGTCNSPDLMCFMTLVIGHTGICIPPCAPGRAELFAKYLIQEACNLGLEAVRPGFCYLAKLFQGFWSTHS

SEQ ID NO: 874387 - protein, 113 aa, Homo sapiens
MKPTRVQIQESIWGSSSFFSTNHYFYLIYAHLKAPVRAPLGLGARFSLGSSITYVCYWARLSVPTLCIRSYRLSPLYPLHFLGFPPSGAWASIDVSLHLPVILLSPGGVIFLN

SEQ ID NO: 874388 - protein, 208 aa, Homo sapiens
MNMEIGHPHEGKDDLGDKRVIMGTKFPMELGIRVGLGKEDSRCGESPVVSNKCEGRMAPPETKFPLSKGLEMGLERQNISRTVMQRGSLGVDSVSASQGTKPSLLPGRMGLENESLLAGYTHERIIQPPLGRVCGSSQAAGSRRAPLASGPEGVEELVGKPAFVMEPRQEMEKESTCVLMKPNTEIKLPVEVDIGLTQAEGPDETKNT

SEQ ID NO: 874389 - protein, 69 aa, Homo sapiens
CLEFTIIHSTLWDAVSVSYHYLGYMTVSPNQTLLVIQEVYKHLSGATNLSRYKLEVLVTVSASVSSTWR

SEQ ID NO: 874390 - protein, 280 aa, Homo sapiens
QQEYLENHIQTQSSALDRVNAMNSALASDSMGGQKTLVDVTLENSNINDENQKQKAELLAQEKLADQMVMEFTKKKMAREAEFEAEQERIRREKEKEIARLRAMQEKAQDYQAEQDALRAKRNQEVADREWRRKEKENARKKMETEAELRKSRLEQVAFKEHALAVQVQRDRDEFERILRAQREQIEKERLEEEKKATGRLQHANELRRQVRENQQKEVQNRIATFEEGRRLKEEAQKRRERIDEIKRKKLEELRATGLPEKYCIEAERKANILPATSVN

SEQ ID NO: 874391 - protein, 568 aa, Homo sapiens
RRRGGSRSPESGRVAEEMPLSTAGILSSSSAASNRSRNKARYRTKAVSSEVDESLFGDIKSPAQGQSDSPIVLLRDKHTLQKTLTALGLDRKPETIQLITRDMVRELIVPTEDPSGESLIISPEEFERIKWASHVLTREELEARDQAFKKEKEATMDAVMTRKKIMKQKEMVWNNNKKLSDLEEVAKERAQNLLQRANKLRMEQEEELKDMSKIILNAKCHAIRDAQILEKQQIQKELDTEEKRLDQMMEVERQKSIQRQEELERKRREERIRGRRQIVEQMEKNQEERSLLAEQREQEKEQMLEYMEQLQEEDLKDMERRQQQKLKMQAEIKRINDENQKQKAELLAQEKLADQMVMEFTKKKMAREAEFEAEQERIRREKEKEIARLRAMQEKAQDYQAEQDALRAKRNQEVADREWRRKEKENARKKMETEAELRKSRLEQVAFKEHALAVQVQRDRDEFERILRAQREQIEKERLEEEKKATGRLQHANELRRQVRENQQKEVQNRIATFEEGRRLKEEAQKRRERIDEIKRKKLEELRATGLPEKYCIEAERKANILPATSVN

SEQ ID NO: 874392 - protein, 121 aa, Homo sapiens [sequence omitted]

SEQ ID NO: 874393 - protein, 145 aa, Homo sapiens
MQVFLRPRELSRESGWGGGFFYAHFPLLCHSFHSLSSLQPNPQTLSLVNSRLLGASESWFVNPRCPFWPYHQQPKQVARRVHMCLEGKDPSGARKVGKWGSSPHLPGIDPLSWLPGCVRGWEGPYIIWLHLLWFLIALHSEMKRL

SEQ ID NO: 874394 - protein, 145 aa, Homo sapiens; identical to SEQ ID NO: 874393

SEQ ID NO: 874395 - protein, 106 aa, Homo sapiens
MSNVTQLLPALPSNPERQQWRKPLNGTSQAALLRAPHGQTRQHPQPGLSQGGPCSQQQSHRTCEGTMDTELGTLATSRGHSGSQEAMLCFFSFPPSLSFLLSPIPF

SEQ ID NO: 874396 - protein, 105 aa, Homo sapiens
MHSARAAPNLTQQSDGLMPICWMVRLRWREGQATSLGSPAGGSLGALPLRTFCARWELPDFCTPRLRSGRKQQEDSCRPLEPRAHPGGKGGGRCWFWLSPSPTSS

SEQ ID NO: 874397 - protein, 70 aa, Homo sapiens
LVAAGVVVVVVSTGGIGVVPGVEEGLVVEPVAVIVVAVVVSDGGVPLVCVLEEGVAIEPVATVVVVVVST

SEQ ID NO: 874398 - protein, 133 aa, Homo sapiens
CVCKRASERDASRCDDVNILWVYTSGPFCLHFYYNIVLTLHFTVRHLRPLHSCALLPAVSPVFFGSLLEMWAPQSIWSHLPPNTSTSRGLVLWEWAGPYEKHLAPTEDNDIMWGQVRCPPSHTIAQLPWALQV

SEQ ID NO: 874399 - protein, 827 aa, Homo sapiens
RLRAGDNRCWVSQGLRQDGTPLTPSLSALRFPAWWPQDVPVAWQSATDDAYEALSPSSCAFAMAFVCAGLSEVSIHCAQAGMQSCCIWNWWVLGLTDFKNEAADPQCTMSAEEDARWLRWVTQQFKTIAGEDGEISLQEFKAALHVKESFFAERFFALFDSDRSGTITLQELQEALTLLIHGSPMDKLKFLFQVYDIDGSGSIDPDELRTVLQSCLRESAISLPDEKLDQLTLALFESADADGNGAITFEELRDELQRFPGVMENLTISAAHWLTAPAPRPRPRRPRQLTRAYWHNHRSQLFCLATYAGLHVLLFGLAASAHRDLGASVMVAKGCGQCLNFDCSFIAVLMLRRCLTWLRATWLAQVLPLDQNIQFHQLMGYVVVGLSLVHTVAHTVNFVLQAQAEASPFQFWELLLTTRPGIGWVHGSASPTGVALLLLLLLMFICSSSCIRRSGHFEVFYWTHLSYLLVWLLLIFHGPNFWKWLLVPGILFFLEKAIGLAVSRMAAVCIMEVNLLPSKVTHLLIKRPPFFHYRPGDYLYLNIPTIARYEWHPFTISSAPEQKDTIWLHIRSQGQWTNRLYESFKASDPLGRGSKRLSRSVTMRKSQRSSKGSEILLEKHKFCNIKCYIDGPYGTPTRRIFASEHAVLIGAGIGITPFASILQSIMYRHQKRKHTCPSCQHSWIEGVQDNMKLHKVDFIWINRDQRSFEWFVSLLTKLEMDQAEEAQYGRFLELHMYMTSALGKNDMKAIGLQMALDLLANKEKKDSITGLQTRTQPGRPDWSKVFQKVAAEKKGKVQVFFCGSPALAKVLKGHCEKFGFRFFQENF

SEQ ID NO: 874400 - protein, 743 aa, Homo sapiens
SRRQEKMNTSGDPAQTGPEGCRGTMSAEEDARWLRWVTQQFKTIAGEDGEISLQEFKAALHVKESFFAERFFALFDSDRSGTITLQELQEALTLLIHGSPMDKLKFLFQVYDIDGSGSIDPDELRTVLQSCLRESAISLPDEKLDQLTLALFESADADGNGAITFEELRDELQRFPGVMENLTISAAHWLTAPAPRPRPRRPRQLTRAYWHNHRSQLFCLATYAGLHVLLFGLAASAHRDLGASVMVAKGCGQCLNFDCSFIAVLMLRRCLTWLRATWLAQVLPLDQNIQFHQLMGYVVVGLSLVHTVAHTVNFVLQAQAEASPFQFWELLLTTRPGIGWVHGSASPTGVALLLLLLLMFICSSSCIRRSGHFEVFYWTHLSYLLVWLLLIFHGPNFWKWLLVPGILFFLEKAIGLAVSRMAAVCIMEVNLLPSKVTHLLIKRPPFFHYRPGDYLYLNIPTIARYEWHPFTISSAPEQKDTIWLHIRSQGQWTNRLYESFKASDPLGRGSKRLSRSVTMRKSQRSSKGSEILLEKHKFCNIKCYIDGPYGTPTRRIFASEHAVLIGAGIGITPFASILQSIMYRHQKRKHTCPSCQHSWIEGVQDNMKLHKVDFIWINRDQRSFEWFVSLLTKLEMDQAEEAQYGRFLELHMYMTSALGKNDMKAIGLQMALDLLANKEKKDSITGLQTRTQPGRPDWSKVFQKVAAEKKGKVQVFFCGSPALAKVLKGHCEKFGFRFFQENF

SEQ ID NO: 874401 - protein, 222 aa, Homo sapiens
MKPLVLLVALLLWPSSVPAYPSITVTPDEEQNLNHYIQVLENLVRSVPSGEPGREKKSNSPKHVYSIASKGSKFKELVTHGDASTENDVLTNPISEETTTFPTGGFTPEIGKKKHTESTPFWSIKPNNVSIVLHAEEPYIENEEPEPEPEPAAKQTEAPRMLPVVTESSTSPYVTSYKSPVTTLDKSTGIGISTESEDVPQLSGETAIEKPEEFGKAPRELE

SEQ ID NO: 874402 - protein, 235 aa, Homo sapiens
RGVRREPRETWLLVLFRRRGMATSSRSPVGRGAEGITVTPDEEQNLNHYIQVLENLVRSVPSGEPGREKKSNSPKHVYSIASKGSKFKELVTHGDASTENDVLTNPISEETTTFPTGGFTPEIGKKKHTESTPFWSIKPNNVSIVLHAEEPYIENEEPEPEPEPAAKQTEAPRMLPVVTESSTSPYVTSYKSPVTTLDKSTGIGISTESEDVPQLSGETAIEKPEEFGKAPRELE

SEQ ID NO: 874403 - protein, 855 aa, Homo sapiens
RLRAGDNRCWVSQGLRQDGTPLTPSLSALRFPAWWPQDVPVAWQSATDDAYEALSPSSCAFAMAFVCAGLSEVSIHCAQAGMQSCCIWNWWVLGLTDFKNEAADPQCTMSAEEDARWLRWVTQQFKTIAGEDGEISLQEFKAALHVKESFFAERFFALFDSDRSGTITLQELQEALTLLIHGSPMDKLKFLFQVYDIDVCARQGASAGTEWGAGAGPHWASSPLGTGSGSIDPDELRTVLQSCLRESAISLPDEKLDQLTLALFESADADGNGAITFEELRDELQRFPGVMENLTISAAHWLTAPAPRPRPRRPRQLTRAYWHNHRSQLFCLATYAGLHVLLFGLAASAHRDLGASVMVAKGCGQCLNFDCSFIAVLMLRRCLTWLRATWLAQVLPLDQNIQFHQLMGYVVVGLSLVHTVAHTVNFVLQAQAEASPFQFWELLLTTRPGIGWVHGSASPTGVALLLLLLLMFICSSSCIRRSGHFEVFYWTHLSYLLVWLLLIFHGPNFWKWLLVPGILFFLEKAIGLAVSRMAAVCIMEVNLLPSKVTHLLIKRPPFFHYRPGDYLYLNIPTIARYEWHPFTISSAPEQKDTIWLHIRSQGQWTNRLYESFKASDPLGRGSKRLSRSVTMRKSQRSSKGSEILLEKHKFCNIKCYIDGPYGTPTRRIFASEHAVLIGAGIGITPFASILQSIMYRHQKRKHTCPSCQHSWIEGVQDNMKLHKVDFIWINRDQRSFEWFVSLLTKLEMDQAEEAQYGRFLELHMYMTSALGKNDMKAIGLQMALDLLANKEKKDSITGLQTRTQPGRPDWSKVFQKVAAEKKGKVQVFFCGSPALAKVLKGHCEKFGFRFFQENF

SEQ ID NO: 874404 - protein, 771 aa, Homo sapiens
SRRQEKMNTSGDPAQTGPEGCRGTMSAEEDARWLRWVTQQFKTIAGEDGEISLQEFKAALHVKESFFAERFFALFDSDRSGTITLQELQEALTLLIHGSPMDKLKFLFQVYDIDVCARQGASAGTEWGAGAGPHWASSPLGTGSGSIDPDELRTVLQSCLRESAISLPDEKLDQLTLALFESADADGNGAITFEELRDELQRFPGVMENLTISAAHWLTAPAPRPRPRRPRQLTRAYWHNHRSQLFCLATYAGLHVLLFGLAASAHRDLGASVMVAKGCGQCLNFDCSFIAVLMLRRCLTWLRATWLAQVLPLDQNIQFHQLMGYVVVGLSLVHTVAHTVNFVLQAQAEASPFQFWELLLTTRPGIGWVHGSASPTGVALLLLLLLMFICSSSCIRRSGHFEVFYWTHLSYLLVWLLLIFHGPNFWKWLLVPGILFFLEKAIGLAVSRMAAVCIMEVNLLPSKVTHLLIKRPPFFHYRPGDYLYLNIPTIARYEWHPFTISSAPEQKDTIWLHIRSQGQWTNRLYESFKASDPLGRGSKRLSRSVTMRKSQRSSKGSEILLEKHKFCNIKCYIDGPYGTPTRRIFASEHAVLIGAGIGITPFASILQSIMYRHQKRKHTCPSCQHSWIEGVQDNMKLHKVDFIWINRDQRSFEWFVSLLTKLEMDQAEEAQYGRFLELHMYMTSALGKNDMKAIGLQMALDLLANKEKKDSITGLQTRTQPGRPDWSKVFQKVAAEKKGKVQVFFCGSPALAKVLKGHCEKFGFRFFQENF

SEQ ID NO: 874405 - protein, 855 aa, Homo sapiens; identical to SEQ ID NO: 874403

SEQ ID NO: 874406 - protein, 162 aa, Homo sapiens
MYRHQKRKHTCPSCQHSWIEGVQDNMKLHKVDFIWINRDQRSFEWFVSLLTKLEMDQAEEAQYGRFLELHMYMTSALGKNDMKAIGLQMALDLLANKEKKDSITGLQTRTQPGRPDWSKVFQKVAAEKKGKVQVFFCGSPALAKVLKGHCEKFGFRFFQENF

SEQ ID NO: 874407 - protein, 90 aa, Homo sapiens
REQQPKCDCNFWQLQIPKTTRKGKGTLQGSSRKNVSPKKTTASGKPEEGSGPTVSCHCDQLNEELHQNEPQLDQNSEETSTFFSVSLSSQ

SEQ ID NO: 874408 - protein, 129 aa, Homo sapiens
MDPWQSLLGTESGGEAERLGQLWPADSSCRREAVSPASQCTLREKNKWQKELELAFEELFNINRKLKKHLCLYLALKPRMDQRPGEGHAFSEMQECGAGTPRGKKMADPEMLPAGEPRSPAEEEAQQAA

SEQ ID NO: 874409 - protein, 142 aa, Homo sapiens
PGSHAESFLSLLLSSDQPPSCVHCPHTHRNTDCRQGGALPASQRVFPMPNSGWHMAALSKYCLDYDIDELPGTLSAPLHSFPCLSWDPGHCQPDFQCSLLPDYKQDLFKMHEQFCHPLPSGSSWLLLAQGRALTPPRPLSSG

SEQ ID NO: 874410 - protein, 38 aa, Homo sapiens
RSVTLYSNELTQCSKYSLLIGAQEEQELSTDAQPCTSL

SEQ ID NO: 874411 - protein, 132 aa, Homo sapiens
VLRQTFTLVAQAGVQWHDLSSLQPPPPGFKRFSYLSLPSSWDYRHAPPRPANFVFLVETGFLHVGQADLELSTSGDPPTSASQSAGITGMSHHAQPKCPPFKAEICLLTTPAPILLSVFQKSKSTSNLLLFP

SEQ ID NO: 874412 - protein, 111 aa, Homo sapiens
LCPVGLSTDLSSLPRYSMLLSPSRTGFLKHLVASLLSPVYYSCLWLHPPFSLGLPVPLTLQAWLLVTIMTMIITMTITAHTMCYLHAKNSTNHFVLINCFLLPAPLEGRRY

SEQ ID NO: 874413 - protein, 40 aa, Homo sapiens
MHSPSHGTAASPTHLLPHKRAPNTLSHLGARSQLPAVTHC

SEQ ID NO: 874414 - protein, 816 aa, Homo sapiens
MGMASKNMAPAASVPFSSMVSTALCTALESFRGASSVTPEEVSPIAEDLSDAQLTQDALQIKVPVMDSLGKCKLADLLSSFSRNLVMISWVSSFSRCCSFPSSGRKKMAVALPRYFISSTQLDSFLQCWMLNMPKRFIIGTFTVVTWSTWKSSSSVSLTSKGLSHFAFKEDVIHQSKNCVSVKLLDQIHNFPLSTLLHVIVDLFLGLFGVPEVDSEGFCVVQLFNILQKLIHQLQALAEEQAIAGGQLELAVWLVEGTEEFLEAFMDLSLRNLREVEIQALQDFIVSVSLGPQGEHCKGCSDAHWGEEDIGAVGLVCQLAVEAEGELSQVGGDLVEGWVILIMVGCICLLGSISLGILSQGDRDQAAQACQQEDAPRDRRRHCQIHCPRSVVVPEAEDRMAGAPMAAAVQPAEVTVEVGEDLHMHQVRDREMPEALEFNLSANPEASTIFQRNSQTDALEFNSSANPEASTIFQRNSQTDVVEIRRSNCTNHVSTERFSQQYSSCSTIFLDDSTAIQHYLTMTIISVTLEIPHHITQRDADRSLSIPDEQLHSFAVSTVHIMKKRNGGGSLNNYSSSIPPTPSTSQEDPQFSVPPTANTPTPVCKRSMRWSNLFTSEKGSDPDKERKAPENHADTIGSGRAIPIKQGMLLKRSGKWLKTWKKKYVTLCSNGVLTYYSSLGDYMKNIHKKEIDLRTSTIKVPGKWPSLATSACAPISSSKSNGLSKDMDTGLGDSICFSPGISSTTSPKLNPPPSPHANKKKHLKKKSTNNFMIVSATGQTWHFEATTYEERDAWVQAIQSQILASLQSCKSSKSKS

SEQ ID NO: 874415 - protein, 647 aa, Homo sapiens
MGMASKNMAPAASVPFSSMVSTALCTALESFRGASSVTPEEVSPIAEDLSDAQLTQDALQIKVPVMDSLGKCKLADLLSSFSRNLVMISWVSSFSRCCSFPSSGRKKMAVALPRYFISSTQLDSFLQCWMLNMPKRFIIGTFTVVTWSTWKSSSSVSLTSKGLSHFAFKEDVIHQSKNCVSVKLLDQIHNFPLSTLLHVIVDLFLGLFGVPEVDSEGFCVVQLFNILQKLIHQLQALAEEQAIAGGQLELAVWLVEGTEEFLEAFMDLSLRNLREVEIQALQDFIVSVSLGPQGEHCKGCSDAHWGEEDIGAVGLVCQLAVEAEGELSQVGGDLVEGWVILIMVGCICLLGSISLGILSQGDRDQAAQACQQEDAPRDRRRHCQIHCPRSVVVPEAEDRMAGAPMAAAVQPAEVTVEVGEDLHMHQVRDREMPEALEFNLSANPEASTIFQRNSQTDALEFNSSANPEASTIFQRNSQTDVVEIRRSNCTNHVSTERFSQQYSSCSTIFLDDSTAIQHYLTMTIISVTLEIPHHITQRDADRSLSIPDEQLHSFAVSTVHIMKKRNGGGSLNNYSSSIPPTPSTSQEDPQFSVPPTANTPTPVCKRSMRWSNLFTSEKGSDPDKERKAPENHAEAGEWREPRRRSLQ

SEQ ID NO: 874416 - protein, 304 aa, Homo sapiens
TLAGSPFPARTIISVTLEIPHHITQRDADRSLSIPDEQLHSFAVSTVHIMKKRNGGGSLNNYSSSIPPTPSTSQEDPQFSVPPTANTPTPVCKRSMRWSNLFTSEKGSDPDKERKAPENHADTIGSGRAIPIKQGMLLKRSGKWLKTWKKKYVTLCSNGVLTYYSSLGDYMKNIHKKEIDLRTSTIKVPGKWPSLATSACAPISSSKSNGLSKDMDTGLGDSICFSPGISSTTSPKLNPPPSPHANKKKHLKKKSTNNFMIVSATGQTWHFEATTYEERDAWVQAIQSQILASLQSCKSSKSKS

SEQ ID NO: 874417 - protein, 204 aa, Homo sapiens
MESPKQLSDLKTLNELLVFISPFLLWGFGQCVEDSCLLPGGQTSGKWCLVVSFFFFFFFGGEGELSPLSVSPPEGVDVSKGLPPWASTCNLPTSRGIPRGLESLSRSVAVGLAICVRPTNAKRYNFGGFLEIEKMGESRAKCVASERGGPEKISVHLGDVYSRLAFGTFPKRVLGQFVPGGVIAPGVPQGVGCSGRLNRQCAHA

SEQ ID NO: 874418 - protein, 247 aa, Homo sapiens
LWKNLQLGVGRSKGGGGGRAGGPERRTADTPSPSPPPPVGTGNAPARGSGAGSRWSGFKKRKQVLDRVFSSSQPNLCCSSPEPLEPGGAGRAEQGSTLRRRIREHLLPAVKGPAAASGAAGGTPPGGRSPDSAPSSSSASSSLSSSPQPPPRGDRARDEGARRQGPGAHLCHQKSSSLPGTACLEQLLEPPPPPAEPARSPAESRAPETGEEHGSSQKIIKHCWKPVMQKCPWLIPDCTRLDITFTN

SEQ ID NO: 874419 - protein, 110 aa, Homo sapiens
TRVLQCAPRCSPNCVAFTAAVTVPACIYALFGPCEHTGILVILPPMEYFMALPCVYLFGYKPLITHFNTLDKVQSKKIQKRILASYVPKEKNKGDNANMLNNKGFFFLFV

SEQ ID NO: 874420 - protein, 76 aa, Homo sapiens
MTRDTVCQCKEGTFRNENSPEMCRKCSRCPSGEVQVSNCTSWDDIQCVEEFGANAILLPILSLTRNMLNAAPIQFS

SEQ ID NO: 874421 - protein, 243 aa, Homo sapiens
MSRPVRNRKVVDYSQFQESDDADEDYGRDSGPPTKKIRSSPREAKNKRRSGKNSQEDSEDSEDKDVKTKKDDSHSAEDSEDEKEDHKNVRQQRQAASKAASKQREMLMEDVGSEEEQEEEDEAPFQEKDSGSDEDFLMEDDDDSDYGSSKKKNKKMVKKSKPERKEKKMPKPRLKATVTPSPVKGKGKVGRPTASKASKEKTPSPKEEDEEPESPPEKKTSTSPPPEKSGDEGSEDEAPSGED

SEQ ID NO: 874422 - protein, 243 aa, Homo sapiens; identical to SEQ ID NO: 874421

SEQ ID NO: 874423 - protein, 243 aa, Homo sapiens; identical to SEQ ID NO: 874421

SEQ ID NO: 874424 - protein, 307 aa, Homo sapiens
MVCEKTTEGEDEAPFQEKDSGSDEDFLMEDDDDSDYGSSKKKNKKMVKKSWSLASRLGPVSTANMSRPVRNRKVVDYSQFQESDDADEDYGRDSGPPTKKIRSSPREAKNKRRSGKNSQEDSEDSEDKDVKTKKDDSHSAEDSEDEKEDHKNVRQQRQAASKAASKQREMLMEDVGSEEEQEEEDEAPFQEKDSGSDEDFLMEDDDDSDYGSSKKKNKKMVKKSKPERKEKKMPKPRLKATVTPSPVKGKGKVGRPTASKASKEKTPSPKEEDEEPESPPEKKTSTSPPPEKSGDEGSEDEAPSGED

SEQ ID NO: 874425 - protein, 243 aa, Homo sapiens; identical to SEQ ID NO: 874421

SEQ ID NO: 874426 - protein, 243 aa, Homo sapiens; identical to SEQ ID NO: 874421

SEQ ID NO: 874427 - protein, 243 aa, Homo sapiens; identical to SEQ ID NO: 874421

SEQ ID NO: 874428 - protein, 243 aa, Homo sapiens; identical to SEQ ID NO: 874421

SEQ ID NO: 874429 - protein, 202 aa, Homo sapiens
AGAYRWGGTGKNSQEDSEDSEDKDVKTKKDDSHSAEDSEDEKEDHKNVRQQRQAASKAASKQREMLMEDVGSEEEQEEEDEAPFQEKDSGSDEDFLMEDDDDSDYGSSKKKNKKMVKKSKPERKEKKMPKPRLKATVTPSPVKGKGKVGRPTASKASKEKTPSPKEEDEEPESPPEKKTSTSPPPEKSGDEGSEDEAPSGED

SEQ ID NO: 874430 - protein, 202 aa, Homo sapiens
MERLIGSGRMKQFKEDREDSEDKDVKTKKDDSHSAEDSEDEKEDHKNVRQQRQAASKAASKQREMLMEDVGSEEEQEEEDEAPFQEKDSGSDEDFLMEDDDDSDYGSSKKKNKKMVKKSKPERKEKKMPKPRLKATVTPSPVKGKGKVGRPTASKASKEKTPSPKEEDEEPESPPEKKTSTSPPPEKSGDEGSEDEAPSGED

SEQ ID NO: 874431 - protein, 190 aa, Homo sapiens
MPINLRPYCVNENLESLDGYTIEKDSEDEKEDHKNVRQQRQAASKAASKQREMLMEDVGSEEEQEEEDEAPFQEKDSGSDEDFLMEDDDDSDYGSSKKKNKKMVKKSKPERKEKKMPKPRLKATVTPSPVKGKGKVGRPTASKASKEKTPSPKEEDEEPESPPEKKTSTSPPPEKSGDEGSEDEAPSGED

SEQ ID NO: 874432 - protein, 106 aa, Homo sapiens
MEDDDDSDYGSSKKKNKKMVKKSKPERKEKKMPKPRLKATVTPSPVKGKGKVGRPTASKASKEKTPSPKEEDEEPESPPEKKTSTSPPPEKSGDEGSEDEAPSGED

SEQ ID NO: 874433 - protein, 168 aa, Homo sapiens
APASVFIQILKKKVEVVFFDGKSDPCRLRERKLHHTQRWGAPEGLWVLVDRLPGLHALLVLDPEDDDDSDYGSSKKKNKKMVKKSKPERKEKKMPKPRLKATVTPSPVKGKGKVGRPTASKASKEKTPSPKEEDEEPESPPEKKTSTSPPPEKSGDEGSEDEAPSGED

SEQ ID NO: 874434 - protein, 130 aa, Homo sapiens
SKHHSPMAAGDSGGERMNNKFDALKDDDMWGPCIRMKKTANKMVKKSKPERKEKKMPKPRLKATVTPSPVKGKGKVGRPTASKASKEKTPSPKEEDEEPESPPEKKTSTSPPPEKSGDEGSEDEAPSGED

SEQ ID NO: 874435 - protein, 243 aa, Homo sapiens; identical to SEQ ID NO: 874421

SEQ ID NO: 874436 - protein, 243 aa, Homo sapiens; identical to SEQ ID NO: 874421

SEQ ID NO: 874437 - protein, 243 aa, Homo sapiens; identical to SEQ ID NO: 874421

SEQ ID NO: 874438 - protein, 243 aa, Homo sapiens; identical to SEQ ID NO: 874421

SEQ ID NO: 874439 - protein, 243 aa, Homo sapiens; identical to SEQ ID NO: 874421

SEQ ID NO: 874440 - protein, 260 aa, Homo sapiens
MSRPVRNRKVVDYSQFQESDDADEDYGRDSGPPTKKIRSSPREAKNKRRSGKNSQEDSEDSEDKDVKTKKDDSHSAEDSEDEKEDHKNVRQQRQAASKAASKQREMLMEDVGSEEEQEEEDEAPFQEKDSGSDEDFLMEDDDDSDYGSSKKKNKKMVKKSKPERKEKKMPKPRLKATVTPSPVKGKGKVGRPTASKASKEKTPSPKEEDEEPFQEKDSGSDEDFLLEDDDDSDYGSSTKETTKRLGETVHNPWKEDAATK

SEQ ID NO: 874441 - protein, 223 aa, Homo sapiens
MSRPVRNRKVVDYSQFQESDDADEDYGRDSGPPTKKIRSSPREAKNKRRSGKNSQEDSEDSEDKDVKTKKDDSHSAEDSEDEKEDHKNVRQQRQAASKAASKQREMLMEDVGSEEEQEEEDEAPFQEKDSGSDEDFLMEDDDDSDYGSSKKKNKKKNKKQKTPEALNSRGAGQKGVREGAKWAKRGPRRPQFPGHQGEKLRRRNPKKRERANKSAGKPPGTRD

SEQ ID NO: 874442 - protein, 294 aa, Homo sapiens
TVCEKTTEGEDEAPFQEKDSGSDEDFLMEDDDDSDYGSSKKKNKKMVKKSWSLASRLGPVSTANMSRPVRNRKVVDYSQFQESDDADEDYGRDSGPPTKKIRSSPREAKNKRRSGKNSQEDSVGLDCKTKDVETTESKDDLCTPGEEDSEDEKEDHKNVRQQRQAASKAASKQREMLMEDVGSEEEQVHDGTDAGQPFQEKDSGSDEDFLLEDDDDSDYGSSNLCKIRSSPKRHTWTVNLNYLAQRKRTIIMPVIEDARDPQEIPDAHRNGGCDLVLMWPARTDPDCGLNAQLL

SEQ ID NO: 874443 - protein, 127 aa, Homo sapiens
RLGARPGGGGAGGSSVPGALNQRAAEFEKPAARGSAAAVPSLLLPHSGPLLSTVHFHLSRPLLSLSLSVCLSAFISGFDPPLQALGPFFPLPSNLAAIGRKETLEHMWIYIRAPRGGGRAPRDGGRS

SEQ ID NO: 874444 - protein, 243 aa, Homo sapiens; identical to SEQ ID NO: 874421

SEQ ID NO: 874445 - protein, 243 aa, Homo sapiens; identical to SEQ ID NO: 874421

SEQ ID NO: 874446 - protein, 243 aa, Homo sapiens; identical to SEQ ID NO: 874421

SEQ ID NO: 874447 - protein, 156 aa, Homo sapiens
AAAYYYYYCSEFKLLTMYGVMEDVGSEEEQEEEDEAPFQEKDSGSDEDFLMEDDDDSDYGSSKKKNKKMVKKSKPERKEKKMPKPRLKATVTPSPVKGKGKVGRPTASKASKEKTPSPKEEDEEPESPPEKKTSTSPPPEKSGDEGSEDEAPSGED

SEQ ID NO: 874448 - protein, 128 aa, Homo sapiens
TRCSLSSSPFQEKDSGSDEDFLMEDDDDSDYGSSKKKNKKMVKKSKPERKEKKMPKPRLKATVTPSPVKGKGKVGRPTASKASKEKTPSPKEEDEEPESPPEKKTSTSPPPEKSGDEGSEDEAPSGED

SEQ ID NO: 874449 - protein, 79 aa, Homo sapiens
PPHEERCPRLKATVTPSPVKGKGKVGRPTASKASKEKTPSPKEEDEEPESPPEKKTSTSPPPEKSGDEGSEDEAPSGED

SEQ ID NO: 874450 - protein, 243 aa, Homo sapiens; identical to SEQ ID NO: 874421

SEQ ID NO: 874451 - protein, 243 aa, Homo sapiens; identical to SEQ ID NO: 874421

SEQ ID NO: 874452 - protein, 243 aa, Homo sapiens; identical to SEQ ID NO: 874421

SEQ ID NO: 874453 - protein, 308 aa, Homo sapiens
MSRPVRNRKVVDYSQFQESDDADEDYGRDSGPPTKKIRSSPREAKNKRRSGKNSQEDSEDSEDKDVKTKKDDSHSAEDSEDEKEDHKNVRQQRQAASKAASKQREMLMEDVGSEEEQEEEDEAPFQEKDSGSDEDFLMEDDDDSDYGSSKKKNKKMVKKSKPERKEKKMPKPRLKATVTPSPVKGKGKVGRPTASKASKEKTPSPKEEDEEPESPPEKKTSTSPPPEKSGDEGSKIDSEFIFKFAHSTSKSLVNLPVSQRGQLFDTRKNLVERVKFTPKKAKAAPLEASAHTILKSNITDSQPIVIFT

SEQ ID NO: 874454 - protein, 177 aa, Homo sapiens
MSRPVRNRKVVDYSQFQESDDADEDYGRDSGPPTKKIRSSPREAKNKRRSGKNSQEDSEDSEDKDVKTKKDDSHSAEDSEDEKEDHKNVRQQRQAASKAASKQREMLMEDVGSEEEQEEEDEAPFQEKDSGSDEDFLMEDDDDSDYGSSKKKNKKMVKKSKPERKEGSREKKKRSYR

SEQ ID NO: 874455 - protein, 186 aa, Homo sapiens
  misc_feature (175)..(176): Xaa can be any naturally occurring amino acid
MSRPVRNRKVVDYSQFQESDDADEDYGRDSGPPTKKIRSSPREAKNKRRSGKNSQEDSEDSEDKDVKTKKDDSHSAEDSEDEKEDHKNVRQQRQAASKAASKQREMLMEDVGSEEEQEEEDEAPFQEKDSGSDEDFLMEDDDDSDYGSSKKKNKKKKWPLEFFFFFFFFFFMITXXYLTAQFYTEC

SEQ ID NO: 874456 - protein, 32 aa, Homo sapiens
MEGFSVLPASGNKHLHVGPPITLKTTSRDEES

SEQ ID NO: 874457 - protein, 78 aa, Homo sapiens
QAGSRRKLHLRAGGALGRAGPARKCADRAGGLSGRHKALLVPTSCGLCHPMGASLKFQSITGTHPGPAAPGPRDRISC

SEQ ID NO: 874458 - protein, 52 aa, Homo sapiens
KRSCLGQEAAHGADASLAFFLNRVTHFSIPSTEYAKDLLKFGRYISILPDAN

SEQ ID NO: 874459 - protein, 132 aa, Homo sapiens
MLTAAVLSCALLLALPATRGAQMGLAPMEGIRRPDQALLPELPGLGLRAPLKKTTAEQAEEDLLQEAQALAEVLDLQDREPRSSRRCVRLHESCLGQQVPCCDPCATCYCRFFNAFCYCRKLGTAMNPCSRT

SEQ ID NO: 874460 - protein, 60 aa, Homo sapiens
NSCSRPPRLSLTVPHDKDCPSSFPRLNLISVSHNLEDTESSLLQPHTPCRDASCTLVPLL

SEQ ID NO: 874461 - protein, 105 aa, Homo sapiens
QSAGIIGVSHHTQPFLKLFLKHDLKDNFIFNRRELYNHLLAILLSPSHFFFEKSLALLPRLECSGAILVHRNLRLLGSSNSPASASRVAGIIGTHHHAQLIFVFL

SEQ ID NO: 874462 - protein, 342 aa, Homo sapiens
YNATWTPQNISSPNSSDPDVPFSICTWVIDSPPHQQVKITVWALQLTSQDCTQNYLQLQDSPQGHGNSRFQFCGRNASAVPVFYSSMSTAMVIFKSGVVNRNSRMSFTYQIADCNRDYHKAFGNLRSPGWPDNYDNDKDCTVTLTAPQNHTISLFFHSLGIENSVECRNDFLEVRNGSNSNSPLLGKYCGTLLPNPVFSQNNELYLRFKSDSVTSDRGYEIIWTSSPSGCGGTLYGDRGSFTSPGYPGTYPNNTYCEWVLVAPAGRLVTINFYFISIDDPGDCVQNYLTLYDGPNASSPSSGPYCGGDTSIAPFVASSNQVFIKFHADYARRPSAFRLTWDS

SEQ ID NO: 874463 - protein, 148 aa, Homo sapiens
GGPLRLKVWPALAMEKGMGERGPARPPVSWGSQGKNRMELGDTPAVQMRARWPRESSAVATAGSQGRSLRHSGRPMDSPDNPSAVGDFLGKSNRSLVCIAFPPFPEHLLCTGFMLGSVGRAINQICTPWLVRHAWWLKITKPRQLKCS

SEQ ID NO: 874464 - protein, 97 aa, Homo sapiens
PDVDHCRISDSEINSRWIKDFSIRPKTIKTLEENLGNTIQDIGMGEDFMTKTLKAMATKAKIDKWDLIKLKSFCTAEETIRVKGNLENGKNNCDLSI

SEQ ID NO: 874465 - protein, 82 aa, Homo sapiens
GEKPRQVGRLGRIPVRLPREVSQFGDSLRTGREAGGSRVGGESEEGDLPEEYRLVACTPELNAGGRENQAALPPSKGAPLEK

SEQ ID NO: 874466 - protein, 245 aa, Homo sapiens
MLAKVVEGDLAFKGGRDISVSLLTLVVTACGLALFGVSLFVSWKLCWVPWRERGLPSGSKDNNQEPLNYMDTETNEQENSEDFLDPPTPCPDSSMKISHTSPDIPLSTQTGIQENCAHGVRVQRQVTEPTSSARHNSIRRQLNLSNPDFNIQQLQKQEQLTGIGRIKPELYKQRSLDNDDGRRSNSKACGKLNFILKYDCDLEQLIVKIHKAVNLPAKDFSGTSDPYVKIYLLPDRKTKHQTKVH

SEQ ID NO: 874467 - protein, 68 aa, Homo sapiens
MRRGSFFPKQGICGPKKGSKKPHFIIFSLSSCCLALHRDGHWKSQQSGATTGPCLVARRVKRTATGKL

SEQ ID NO: 874468 - protein, 695 aa, Homo sapiens
MILEERPDGAGAGEESPRLQGCDSLTQIQCGQLQSRRAQIHQQIDKELQMRTGAENLYRATSNNRVRETVALELSYVNSNLQLLKEELEELSGGVDPGRHGSEAVTVPMIPLGLKETKELDWSTPLKELISVHFGEDGASYEAEIRELEALRQAMRTPSRNESGLELLTAYYNQLCFLDARFLTPARSLGLFFHWYDSLTGVPAQQRALAFEKGSVLFNIGALHTQIGARQDRSCTEGARRAMEAFQRAAGAFSLLRENFSHAPSPDMSAASLCALEQLMMAQAQECVFEGLSPPASMAPQDCLAQLRLAQEAAQVAAEYRLVHRTMAQPPVHDYVPVSWTALVHVKAEYFRSLAHYHVAMALCDGSRECPPTCPWYCQGPPAQGSQPLCPPAATEGELPTHEQVFLQPPTSSKPRGPVLPQELEERRQLGKAHLKRAILGQEEALRLHALCRVLREVDLLRAVISQTLQRSLAKYAELDREDDFCEAAEAPDIQPKTHQKPEARMPRLSQGKGPDIFHRLGPLSVFSAKNRWRLVGPVHLTRGEGGFGLTLRGDSPVLIAAVIPGSQAAAAGLKEGDYIVSVNGQPCRWWRHAEVVTELKAAGEAGASLQVVSLLPSSRLPSLGDRRPVLLGPRGLLRSQREHGCKTPASTWASPRPLLNWSRKAQQGKTGGCPQPCAPVKPAPPSSLKHPGWP

SEQ ID NO: 874469 - protein, 833 aa, Homo sapiens
MILEERPDGAGAGEESPRLQGCDSLTQIQCGQLQSRRAQIHQQIDKELQMRTGAENLYRATSNNRVRETVALELSYVNSNLQLLKEELEELSGGVDPGRHGSEAVTVPMIPLGLKETKELDWSTPLKELISVHFGEDGASYEAEIRELEALRQAMRTPSRNESGLELLTAYYNQLCFLDARFLTPARSLGLFFHWYDSLTGVPAQQRALAFEKGSVLFNIGALHTQIGARQDRSCTEGARRAMEAFQRAAGAFSLLRENFSHAPSPDMSAASLCALEQLMMAQAQECVFEGLSPPASMAPQDCLAQLRLAQEAAQVAAEYRLVHRTMAQPPVHDYVPVSWTALVHVKAEYFRSLAHYHVAMALCDGSRECPPTCPWYCQGPPAQGSQPLCPPAATEGELPTHEQVFLQPPTSSKPRGPVLPQELEERRQLGKAPMGGVPWGSDGHQRWQGVPHHPHAVCHLLSPLLTSWATYLSLDGLCLMGDGPAQGPQECWAASEQVGDHWEQLIPGPCFARGRALLHSQLLTPVARTPNESGCDEPHSPGVAHSFCHVPGPTGPHGVGHPSAPRAGKAHLKRAILGQEEALRLHALCRVLREVDLLRAVISQTLQRSLAKYAELDREDDFCEAAEAPDIQPKTHQKPEARMPRLSQGKGPDIFHRLGPLSVFSAKNRWRLVGPVHLTRGEGGFGLTLRGDSPVLIAAVIPGSQAAAAGLKEGDYIVSVNGQPCRWWRHAEVVTELKAAGEAGASLQVVSLLPSSRLPSLGDRRPVLLGPRGLLRSQREHGCKTPASTWASPRPLLNWSRKAQQGKTGGCPQPCAPVKPAPPSSLKHPGWP

SEQ ID NO: 874470 - protein, 670 aa, Homo sapiens
MILEERPDGAGAGEESPRLQGCDSLTQIQCGQLQSRRAQIHQQIDKELQMRTGAENLYRATSNNRVRETVALELSYVNSNLQLLKEELEELSGGVDPGRHGSEAVTVPMIPLGLKETKELDWSTPLKELISVHFGEDGASYEAEIRELEALRQAMRTPSRNESGLELLTAYYNQLCFLDARFLTPARSLGLFFHWYDSLTGVPAQQRALAFEKGSVLFNIGALHTQIGARQDRSCTEGARRAMEAFQRAAGAFSLLRENFSHAPSPDMSAASLCALEQLMMAQAQECVFEGLSPPASMAPQDCLAQLRLAQEAAQVAAEYRLVHRTMAQPPVHDYVPVSWTALVHVKAEYFRSLAHYHVAMALCDGSPATEGELPTHEQVFLQPPTSSKPRGPVLPQELEERRQLGKAHLKRAILGQEEALRLHALCRVLREVDLLRAVISQTLQRSLAKYAELDREDDFCEAAEAPDIQPKTHQKPEARMPRLSQGKGPDIFHRLGPLSVFSAKNRWRLVGPVHLTRGEGGFGLTLRGDSPVLIAAVIPGSQAAAAGLKEGDYIVSVNGQPCRWWRHAEVVTELKAAGEAGASLQVVSLLPSSRLPSLGDRRPVLLGPRGLLRSQREHGCKTPASTWASPRPLLNWSRKAQQGKTGGCPQPCAPVKPAPPSSLKHPGWP

SEQ ID NO: 874471 - protein, 742 aa, Homo sapiens
MRTGAENLYRATSNNRVRETVALELSYVNSNLQLLKEELEELSGGVDPGRHGSEAVTVPMIPLGLKETKELDWSTPLKELISVHFGEDGASYEAEIRELEALRQVRLAYWGPGPAACPGLREGQRSLQHRCPPTQIGARQDRSCTEGARRAMEAFQRAAGAFSLLRENFSHAPSPDMSAASLCALEQLMMAQAQECVFEGLSPPASMAPQDCLAQLRLAQEAAQVAAEYRLVHRTMAQPPVHDYVPVSWTALVHVKAEYFRSLAHYHVAMALCDGSRECPPTCPWYCQGPPAQGSQPLCPPAATEGELPTHEQVFLQPPTSSKPRGPVLPQELEERRQLGKAPMGGVPWGSDGHQRWQGVPHHPHAVCHLLSPLLTSWATYLSLDGLCLMGDGPAQGPQECWAASEQVGDHWEQLIPGPCFARGRALLHSQLLTPVARTPNESGCDEPHSPGVAHSFCHVPGPTGPHGVGHPSAPRAGKAHLKRAILGQEEALRLHALCRVLREVDLLRAVISQTLQRSLAKYAELDREDDFCEAAEAPDIQPKTHQKPEARMPRLSQGKGPDIFHRLGPLSVFSAKNRWRLVGPVHLTRGEGGFGLTLRGDSPVLIAAVIPGSQAAAAGLKEGDYIVSVNGQPCRWWRHAEVVTELKAAGEAGASLQVVSLLPSSRLPSLGDRRPVLLGPRGLLRSQREHGCKTPASTWASPRPLLNWSRKAQQGKTGGCPQPCAPVKPAPPSSLKHPGWP

SEQ ID NO: 874472 - protein, 538 aa, Homo sapiens
GTKQQELRCQEAAGMVVGAGGGWVGRSRHHLESGRPSRACHIHRQVAAEYRLVHRTMAQPPVHDYVPVSWTALVHVKAEYFRSLAHYHVAMALCDGSPATEGELPTHEQVFLQPPTSSKPRGPVLPQELEERRQLGKAPMGGVPWGSDGHQRWQGVPHHPHAVCHLLSPLLTSWATYLSLDGLCLMGDGPAQGPQECWAASEQVGDHWEQLIPGPCFARGRALLHSQLLTPVARTPNESGCDEPHSPGVAHSFCHVPGPTGPHGVGHPSAPRAGKAHLKRAILGQEEALRLHALCRVLREVDLLRAVISQTLQRSLAKYAELDREDDFCEAAEAPDIQPKTHQKPEARMPRLSQGKGPDIFHRLGPLSVFSAKNRWRLVGPVHLTRGEGGFGLTLRGDSPVLIAAVIPGSQAAAAGLKEGDYIVSVNGQPCRWWRHAEVVTELKAAGEAGASLQVVSLLPSSRLPSLGDRRPVLLGPRGLLRSQREHGCKTPASTWASPRPLLNWSRKAQQGKTGGCPQPCAPVKPAPPSSLKHPGWP

SEQ ID NO: 874473 - protein, 515 aa, Homo sapiens
MILEERPDGAGAGEESPRLQGCDSLTQIQCGQLQSRRAQIHQQIDKELQMRTGAENLYRATSNNRVRETVALELSYVNSNLQLLKEELEELSGGVDPGRHGSEAVTVPMIPLGLKETKELDWSTPLKELISVHFGEDGASYEAEIRELEALRQAMRTPSRNESGLELLTAYYNQLCFLDARFLTPARSLGLFFHWYDSLTGVPAQQRALAFEKGSVLFNIGALHTQIGARQDRSCTEGARRAMEAFQRAAGAFSLLRENFSHAPSPDMSAASLCALEQLMMAQAQECVFEGLSPPASMAPQDCLAQLRLAQEAAQVAAEYRLVHRTMAQPPVHDYVPVSWTALVHVKAEYFRSLAHYHVAMALCDGSPATEGELPTHEQVFLQPPTSSKPRGPVLPQELEERRQLGKAHLKRAILGQEEALRLHALCRVLREVDLLRAVISQTLQRSLAKYAELDREDDFCEAAEAPDIQPKTHQKPEARMPRLSQGKGPDIFHRLVSTPVPRHRPAWAAWAVWL

SEQ ID NO: 874474 - protein, 413 aa, Homo sapiens
MILEERPDGAGAGEESPRLQGCDSLTQIQCGQLQSRRAQIHQQIDKELQMRTGAENLYRATSNNRVRETVALELSYVNSNLQLLKEELEELSGGVDPGRHGSEAVTVPMIPLGLKETKELDWSTPLKELISVHFGEDGASYEAEIRELEALRQAMRTPSRNESGLELLTAYYNQLCFLDARFLTPARSLGLFFHWYDSLTGVPAQQRALAFEKGSVLFNIGALHTQIGARQDRSCTEGARRAMEAFQRAAGAFSLLRENFSHAPSPDMSAASLCALEQLMMAQAQECVFEGLSPPASMAPQDCLAQLRLAQEAAQVAAEYRLVHRTMAQPPVHDYVPVSWTALVHVKAEYFRSLAHYHVAMALCDGSRECPPHLPMVLPRPPRAGLTASLSPSSDRGRAPHARAGLPAAPHLL

SEQ ID NO: 874475 - protein, 369 aa, Homo sapiens
ALGTQEPAAQVVRAALARLRSAARAAGWLTPRDPQRSGCGDDPGGEAGRHGVGLGSPVASLQGCDSLTQIQCGQLQSRRAQIHQQIDKELQMRTGAENLYRATSNNRVRETVALELSYVNSNLQLLKEELEELSGGVDPGRHGSEAVTVPMIPLGLKETKELDWSTPLKELISVHFGEDGASYEAEIRELEALRQAMRTPSRNESGLELLTAYYNQLCFLDARFLTPARSLGLFFHWYDSLTGVPAQQRALAFEKGSVLFNIGALHTQIGARQDRSCTEGARRAMEAFQRAAGAFSLLRENFSHAPSPDMSAASLCALEQLMMAQAQVHASALAPAGSKHRACPPHPEDLRAMPVPPHAGGCLGHLRCP

SEQ ID NO: 874476 - protein, 747 aa, Homo sapiens
MILEERPDGAGAGEESPRLQGCDSLTQIQCGQLQSRRAQIHQQIDKELQMRTGAENLYRATSNNRVRETVALELSYVNSNLQLLKEELEELSGGVDPGRHGSEAVTVPMIPLGLKETKELDWSTPLKELISVHFGEDGASYEAEIRELEALRQAMRTPSRNESGLELLTAYYNQLCFLDARFLTPARSLGLFFHWYDSLTGVPAQQRALAFEKGSVLFNIGALHTQIGARQDRSCTEGARRAMEAFQRAAGAFSLLRENFSHAPSPDMSAASLCALEQLMMAQAQECVFEGLSPPASMAPQDCLAQLRLAQEAAQVAAEYRLVHRTMAQPPVHDYVPVSWTALVHVKAEYFRSLAHYHVAMALCDGSPATEGELPTHEQVFLQPPTSSKPRGPVLPQELEERRQLGKAHLKRAILGQEEALRLHALCRVLREVDLLRAVISQTLQRSLAKYAELDREDDFCEAAEAPDIQPKTHQKPEARMPRLSQGKGPDIFHRLVSTPVPRHRPAWAAWAVWLCPAHGLRQAIDGGPALPTHLVEPHGVPRCTGWMDVLVRRGLLSVWPSWASDLSAPARGGPLSVFSAKNRWRLVGPVHLTRGEGGFGLTLRGDSPVLIAAVIPGSQAAAAGLKEGDYIVSVNGQPCRWWRHAEVVTELKAAGEAGASLQVVSLLPSSRLPSLGDRRPVLLGPRGLLRSQREHGCKTPASTWASPRPLLNWSRKAQQGKTGGCPQPCAPVKPAPPSSLKHPGWP

SEQ ID NO: 874477 - protein, 515 aa, Homo sapiens; identical to SEQ ID NO: 874473

SEQ ID NO: 874478 - protein, 573 aa, Homo sapiens
MILEERPDGAGAGEESPRLQGCDSLTQIQCGQLQSRRAQIHQQIDKELQMRTGAENLYRATSNNRVRETVALELSYVNSNLQLLKEELEELSGGVDPGRHGSEAVTVPMIPLGLKETKELDWSTPLKELISVHFGEDGASYEAEIRELEALRQAMRTPSRNESGLELLTAYYNQLCFLDARFLTPARSLGLFFHWYDSLTGVPAQQRALAFEKGSVLFNIGALHTQIGARQDRSCTEGARRAMEAFQRAAGAFSLLRENFSHAPSPDMSAASLCALEQLMMAQAQECVFEGLSPPASMAPQDCLAQLRLAQEAAQVAAEYRLVHRTMAQPPVHDYVPVSWTALVHVKAEYFRSLAHYHVAMALCDGSPATEGELPTHEQVFLQPPTSSKPRGPVLPQELEERRQLGKAHLKRAILGQEEALRLHALCRVLREVDLLRAVISQTLQRSLAKYAELDREDDFCEAAEAPDIQPKTHQKPEARMPRLSQGKGPDIFHRLGPLSVFSAKNRWRLVGPVHLTRGEGGFGLTLRGDSPVLIAAVIPGSQAAAGLKEGDYIVSGCTISVEHSRVEDPLTA

SEQ ID NO: 874479 - protein, 114 aa, Homo sapiens
TWGDGRTRGPVCPDPARGRGGAPRWLRCRMLLAFGSHGCPGPHWLCLPAPHGAGAHGTSQGSVCEWGGPGRWGPVAPALQAMRTPSRNESGLELLTAYYNQLCFLDARFLTPAR

SEQ ID NO: 874480 - protein, 127 aa, Homo sapiens
WVAMSWLYYCTLAWVTECDPVSNKIKKPSKLRQPGNSVCFLNWQKLKRTVLICPPSGGSLAAGKSSPGACTFQADRLPLQARGCPPLQARGCPPLQARGCPPLQAPGCPPLQAPGCLTSPSPNCLLL

SEQ ID NO: 874481 - protein, 163 aa, Homo sapiens
ARRRGALADGGERGGHRAGPAALELGLAGTLGQPRASVARASRACPRTRVRASPRTAAWLGGRPYSRRPSAAKGLGAQTRNRHLGLGRRHGQKPTGQPAPPHDSRMAIAQCRSRFASSLPFLLEFCSCRPGYRTTVALSPLTATSASQVQAILLPQPPTTTPG

SEQ ID NO: 874482 - protein, 37 aa, Homo sapiens
MKNLDFDFISSVEMICIYKIFFGSHINDWRRQKESQE

SEQ ID NO: 874483 - protein, 113 aa, Homo sapiens
MLGLVCGPQDLRRSQLQRGPKHGGRRRLKRNIAPVSSGGQSGTSSDDDSLGDPSSRQNQDLLREETGREPESTGGNMRPCSRWAAQLGRGDPGLDRLETLTFTKCWLAFQKRP

SEQ ID NO: 874484 - protein, 150 aa, Homo sapiens
CNLRLLGSSDSPASASHVPGITDARHRARLIFVFLVETRFHHVGQAGLELLTSGDPPTSASQSAGIIGVSHRAWPTSSASKGHSTLEECARRDGVLHSWDAEMLRVKRLGFGGTRLPGFRLSKGVFDFLDRRFFHFLWSGSLTWECGVWV

SEQ ID NO: 874485 - protein, 31 aa, Homo sapiens
MEGGVKRQNHSKFDLKLELAFIYNSRIMQHL

SEQ ID NO: 874486 - protein, 117 aa, Homo sapiens
GSGAQRIVKHIEISFVYFPLVHFPILSAWHRGYTESSSLEQSFNQGDKIGVWGYQRARGCRAEILRNIRGESNFFFFFLRQDLTVSPRLECSAVILAHCNLHLLGSSNSPASASQVA

SEQ ID NO: 874487 - protein, 123 aa, Homo sapiens
SPFHIIQNLSHQHLPPLLPKPCPLWPGWLPQPPPSPPSSYSLPFTSLCPHHHTPHSLTAAAGVRLTLQCKLTAAQLRSPQQLPITLRANPATLPWPSRLPVSWSLQASPIPLSLPLAVSYSLP

SEQ ID NO: 874488 - protein, 69 aa, Homo sapiens
PKMSLDIAKCPLGVKTATGSEPLAYWVRRGWGIGGSEDCKAHSCLSSSQPPWGWMGLERLLAALLAETC

SEQ ID NO: 874489 - protein, 1446 aa, Homo sapiens
EPCALTPGPSHLALTFLPSKPGARPQPEGASWDAGPGGAPSAWADPGEGGPSPMLLPEGLSSQALSTEAPLPATLEPRIVMGEETCQALLSPRAARTALRDQEGGHASPDPPPELCSQGDLSVPSPPPDPDSFFTPPSTPTKTTYALLPACGPHGDARDSEAELRDELLDSPPASPSGSYITADGDSWASSPSCSLSLLAPAEGLDFPSGWGLSPQGSMVDERELHPAGTPEPPSSESSLSADSSSSWGQEGHFFDLDFLANDPMIPAALLPFQGSLIFQVEAVEVTPLSPEEEEEEAVADPDPGGDLAGEGEEDSTSASFLQSLSDLSITEGMDEAFAFRDDTSAASSDSDSASYAEADDERLYSGEPHAQATLLQDSVQKTEEESGGGAKGLQAQDGTVSWAVEAAPQTSDRGAYLSQRQELISEVTEEGLALGQESTATVTPHTLQVAPGLQVEVATRVTPQAGEEETDSTAGQESAAMAMPQPSQEGISEILGQESVTAEKLPTPQEETSLTLCPDSPQNLKEEGGLDLPSGRKPVAAATIVPRQAKEDLTLPQDSAMTPPLPLQDTDLSSAPKPVAAATIVSQQAEEGLTLPQDSVMTPPLPLQDTELSSAPKPVAAATLVSQQAEEGLTLPQDSAMTPPLPLQDTDLSSAPKPVAAATLVSQQAEEGLTLPQDSAMTPPLPLQDTDLSSAPKPVAAATLVSQQAEEGLTLPQDSAMTPPLPLQDTDLSSAPKPVAAATIVSQQAEEGLTLPQDSAMTPPLPLQDTDLSSAPKPVAAATIVSQQAEEGLTLPQDSAMTPPLPLQDTDLSSAPKPVAAATPVSQQAEEGLTLPQDSAMTPPLPLQDTDLSSAPKPVAAATPVSQQAEEGLTLPQDSAMTAPLPLQDTGPTSGPEPLAVATPQTLQAEAGCAPGTEPVATMAQQEVGEALGPRPAPEEKNAALPTVPEPAALDQVQQDDPQPAAEAGTPWAAQEDADSTLGMEALSLPEPASGAGEEIAEALSRPGREACLEARAHTGDGAKPDSPQKETLEVENQQEGGLKPLAQEHGPRSALGGAREVPDAPPAACPEVSQARLLSPAREERGLSGKSTPEPTLPSAVATEASLDSCPESSVGAVSSLDRGCPDAPAPTSAPTSQQPEPVLGLGSVEQPHEVPSVLGTPLLQPPENLAKGQPSTPVDRPLGPDPSAPGTLAGAALPPLEPPAPCLCQDPQEDSVEDEEPPGSLGLPPPQAGVQPAAAAVSGTTQPLGTGPRVSLSPHSPLLSPKVASMDAKDLALQILPPCQVPPPSGPQSPAGPQGLSAPEQQEDEDSLEEDSPRALGSGQHSDSHGESSAELDEQDILAPQTVQCPAQAPAGGSEETIAKAKQSRSEKKARKAMSKLGLRQIQGVTRITIQKSKNILFVIAKPDVFKSPASDTYVVFGEAKIEDLSQQVHKAAAEKQPQ

SEQ ID NO: 874490 - protein, 1422 aa, Homo sapiens
EPCALTPGPSHLALTFLPSKPGARPQPEGASWDAGPGGAPSAWADPGEGGPSPMLLPEGLSSQALSTEAPLPATLEPRIVMGEETCQALLSPRAARTALRDQEGGHASPDPPPELCSQGDLSVPSPPPDPDSFFTPPSTPTKTTYALLPACGPHGDARDSEAELRDELLDSPPASPSGSYITADGDSWASSPSCSLSLLAPAEGLDFPSGWGLSPQGSMVDERELHPAGTPEPPSSESSLSADSSSSWGQEGHFFDLDFLANDPMIPAALLPFQGSLIFQVEAVEVTPLSPEEEEEEAVADPDPGGDLAGEGEEDSTSASFLQSLSDLSITEGMDEAFAFRDDTSAASSDSDSASYAEADDERLYSGEPHAQATLLQDSVQKTEEESGGGAKGLQAQDGTVSWAVEAAPQTSDRGAYLSQRQELISEVTEEGLALGQESTATVTPHTLQVAPGLQVEVATRVTPQAGEEETDSTAGQESAAMAMPQPSQEGISEILGQESVTAEKLPTPQEETSLTLCPDSPQNLKEEGGLDLPSGRKPVAAATIVPRQAKEDLTLPQDSAMTPPLPLQDTDLSSAPKPVAAATIVSQQAEEGLTLPQDSVMTPPLPLQDTELSSAPKPVAAATLVSQQAEEGLTLPQDSAMTPPLPLQDTDLSSAPKPVAAATLVSQQAEEGLTLPQDSAMTPPLPLQDTDLSSAPKPVAAATLVSQQAEEGLTLPQDSAMTPPLPLQDTDLSSAPKPVAAATIVSQQAEEGLTLPQDSAMTPPLPLQDTDLSSAPKPVAAATIVSQQAEEGLTLPQDSAMTPPLPLQDTDLSSAPKPVAAATPVSQQAEEGLTLPQDSAMTPPLPLQDTDLSSAPKPVAAATPVSQQAEEGLTLPQDSAMTAPLPLQDTGPTSGPEPLAVATPQTLQAEAGCAPGTEPVATMAQQEVGEALGPRPAPEEKNAALPTVPEPAALDQVQQDDPQPAAEAGTPWAAQEDADSTLGMEALSLPEPASGAGEEIAEALSRPGREACLEARAHTGDGAKPDSPQKETLEVENQQEGGLKPLAQEHGPRSALGGAREVPDAPPAACPEVSQARLLSPAREERGLSGKSTPEPTLPSAVATEASLDSCPESSVGAVSSLDRGCPDAPAPTSAPTSQQPEPVLGLGSVEQPHEVPSVLGTPLLQPPENLAKGQPSTPVDRPLGPDPSAPGTLAGAALPPLEPPAPCLCQDPQEDSVEDEEPPGSLGLPPPQAGVQPAAAAVSGTTQPLGTGPRVSLSPHSPLLSPKVASMDAKDLALQILPPCQVPPPSGPQSPAGPQGLSAPEQQEDEDSLEEDSPRALGSGQHSDSHGESSAELDEQDILAPQTVQCPAQAPAGGSEETIAKANLMSSRAQPQTLMWSLARPRLRTCPSKCTKPQLRSLRCPQSPQPWSLSQHPGPG

SEQ ID NO: 874491 - protein, 1522 aa, Homo sapiens
EPCALTPGPSHLALTFLPSKPGARPQPEGASWDAGPGGAPSAWADPGEGGPSPMLLPEGLSSQALSTEAPLPATLEPRIVMGEETCQALLSPRAARTALRDQEGGHASPDPPPELCSQGDLSVPSPPPDPDSFFTPPSTPTKTTYALLPACGPHGDARDSEAELRDELLDSPPASPSGSYITADGDSWASSPSCSLSLLAPAEGLDFPSGWGLSPQGSMVDERELHPAGTPEPPSSESSLSADSSSSWGQEGHFFDLDFLANDPMIPAALLPFQGSLIFQVEAVEVTPLSPEEEEEEAVADPDPGGDLAGEGEEDSTSASFLQSLSDLSITEGMDEAFAFRDDTSAASSDSDSASYAEADDERLYSGEPHAQATLLQDSVQKTEEESGGGAKGLQAQDGTVSWAVEAAPQTSDRGAYLSQRQELISEVTEEGLALGQESTATVTPHTLQVAPGLQVEVATRVTPQAGEEETDSTAGQESAAMAMPQPSQEGISEILGQESVTAEKLPTPQEETSLTLCPDSPQNLKEEGGLDLPSGRKPVAAATIVPRQAKEDLTLPQDSAMTPPLPLQDTDLSSAPKPVAAATIVSQQAEEGLTLPQDSVMTPPLPLQDTELSSAPKPVAAATLVSQQAEEGLTLPQDSAMTPPLPLQDTDLSSAPKPVAAATLVSQQAEEGLTLPQDSAMTPPLPLQDTDLSSAPKPVAAATLVSQQAEEGLTLPQDSAMTPPLPLQDTDLSSAPKPVAAATIVSQQAEEGLTLPQDSAMTPPLPLQDTDLSSAPKPVAAATIVSQQAEEGLTLPQDSAMTPPLPLQDTDLSSAPKPVAAATPVSQQAEEGLTLPQDSAMTPPLPLQDTDLSSAPKPVAAATPVSQQAEEGLTLPQDSAMTAPLPLQDTGPTSGPEPLAVATPQTLQAEAGCAPGTEPVATMAQQEVGEALGPRPAPEEKNAALPTVPEPAALDQVQQDDPQPAAEAGTPWAAQEDADSTLGMEALSLPEPASGAGEEIAEALSRPGREACLEARAHTGDGAKPDSPQKETLEVENQQEGGLKPLAQEHGPRSALGGAREVPDAPPAACPEVSQARLLSPAREERGLSGKSTPEPTLPSAVATEASLDSCPESSVGAVSSLDRGCPDAPAPTSAPTSQQPEPVLGLGSVEQPHEVPSVLGTPLLQPPENLAKGQPSTPVDRPLGPDPSAPGTLAGAALPPLEPPAPCLCQDPQEDSVEDEEPPGSLGLPPPQAGVQPAAAAVSGTTQPLGTGPRVSLSPHSPLLSPKVASMDAKDLALQILPPCQVPPPSGPQSPAGPQGLSAPEQQEDEDSLEEDSPRALGSGQHSDSHGESSAELDEQDILAPQTVQCPAQAPAGGSEETIAKAKQSRSEKKARKAMSKLGLRQIQGVTRITIQKSKNILFVIAKPDVFKSPASDTYVVFGEAKIEDLSQQVHKAAAEKFKVPSEPSALVPESAPRPRVRLECKEEEEEEEEEVDEAGLELRDIELVMAQANVSRAKAVRALRDNHSDIVNAIMELTM

SEQ ID NO: 874492 - protein, 1522 aa, Homo sapiens; identical to SEQ ID NO: 874491

SEQ ID NO: 874493 - protein, 114 aa, Homo sapiens
VPLSTGLRILVGMAAPCRCGWTWVELVREARCLDLLMVTGLAVKAHLGSVSTPWSSHVSVTFQHWPDGGNLLRAHSPAPWHSRSQLSLIRTRCPLVRLLVIGFPSSPNVPVISH

SEQ ID NO: 874494 - protein, 101 aa, Homo sapiens
SRKVTQNTATLMFSLGFALLPRLKCNGAIIAYCSLNFLGSSDPPASASQSTGIIEPPAQTGVQWHEHSSLQPQPPGLECPSHFTLLSGWDYRCAPPQPIWG

SEQ ID NO: 874495 - protein, 74 aa, Homo sapiens
IVMSPRAKVQSSFTFLNSPQPKQEELVAPLCCPQPQNPLHVAPGLHRNPSYDADSLIHCLLLLRWGLLFPHGII

SEQ ID NO: 874496 - protein, 247 aa, Homo sapiens
RSFDSGALKASFSWALAEGAFNYTVMALSDSSELTCSTTFSSCTISSLQCGTEYLISVLASNDAGSSKSSSAMTLKTVACAPGRVTIQEDPPGHLSVAWSSVDLGDYYVVFVKSDDGLEVHCNTSLTQCNFLSECGFTYFISVFAYNKAGQSPLGDIFNYTTAPCCPSDINPVLVSSDRVEIVWSPVRGAELYETKAVDGYNMVECNDTTPACTLSALECDTKYNITVYSFNEVRGSNMSCTPQFIT

SEQ ID NO: 874497 - protein, 80 aa, Homo sapiens
MGLRREGQEQRWKQRTGLMPLSDVYWGEECRWWSRAIPGQEVLKRWPAEFAFPLSSSHPSLHRKTPVYGEALGWVGSGGE

SEQ ID NO: 874498 - protein, 114 aa, Homo sapiens
FSNYHYISLIRSMLFAPSLLIPPPTTNKHSIRVRVRCGTGGTEILSLISSTLTRLWLTRVTIQSSQKRGKGSTFLKKLSGINYITQCGTSLTSFACPNLRTCIRLRLSLKLGLK

SEQ ID NO: 874499 - protein, 104 aa, Homo sapiens
LAVGCGRRLNVPGIVAPLAEDASPAKEAGSRGSGVGSRHRQQLPDQPCCAQLPQAVTLNHHVTISGACQSPSTTCPPSCRGRKSSSPRGSVGPLHMGLRSGVGA

SEQ ID NO: 874500 - protein, 91 aa, Homo sapiens
VWVSHHSRHPGSLRPLVLLAQGLQPSSCPTKPLLARAFQGLGPGLEGGCFRFCQLPCLPTSSPSPGLGLTGHWFLSFPAPCPSGPHMSGPQ

SEQ ID NO: 874501 - protein, 184 aa, Homo sapiens
SGGDYRREPLCPAPATSFKTKSSQEFSFLGFLIFLLPSSLNPLHSGVCPHHSIETALIKVTEDLCTAKSSSLLSVLSLGKVAAFYPAGHFLPLETLSSLLLEYDAHLVFFLSLSLVLSPLQIPLYLSTSNVERHEGLVLEPTLFLYITNLVKSLILVVVNTVCMLHVQLDCNLDLFFFWATSPV

SEQ ID NO: 874502 - protein, 68 aa, Homo sapiens
MRSGKLLQNSVLSFEKARPGNRIKQKGRVGGQGLDLWGPNSVSKTYERNYHCIKNRREDLFFGVLVVS

SEQ ID NO: 874503 - protein, 41 aa, Homo sapiens
MPPSGLAPLTLPAPHPQVHLLAQTYGAWVHLDRAQLMNVVL

SEQ ID NO: 874504 - protein, 288 aa, Homo sapiens
MAAAAYVDHFAAECLVSMSSRAVVHGPREGPESRPEGAAVAATPTLPRVEERRDGKDSASLFVVARILADLNQQAPAPAPAERREGAAARKARTPCRLPPPAPEPTSPGAEGAAAAPPSPAWSEPEPEAGLEPEREPGPAGSGEPGLRQRVRRGRSRADLESPQRKHKCHYAGCEKVYGKSSHLKAHLRTHTGERPFACSWQDCNKKFARSDELARHYRTHTGEKKFSCPICEKRFMRSDHLTKHARRHANFHPGMLQRRGGGSRTGSLSDYSRSDASSPTISPASSP

SEQ ID NO: 874505 - protein, 264 aa, Homo sapiens
MAAAAYVDHFAAECLVSMSSRAVVHGPREGPESRPEGAAVAATPTLPRVEERRDGKDSASLFVVARILADLNQQAPAPAPAERREGAAARKARTPCRLPPPAPEPTSPGAEGAAAAPPSPAWSEPEPEAGLEPEREPGPAGSGEPGLRQRVRRGRSRADLESPQRKHKCHYAGCEKVYGKSSHLKAHLRTHTGDKEDKEDKEGDPGGWRACQGHRPTVFRPLGSKLFPGHLQAMSTRPPVSVAGKGCVSTPRPSDPVLKVSLSL

SEQ ID NO: 874506 - protein, 117 aa, Homo sapiens
DLETEVERGGAGVTKHHSLLRTASVYACGPIIILKGALSNLRNVPARRINDLVSVATGLGQIPSSLSLLTCHPWGQVRKRISLSLYLGAAMHTHSHTPFFPDPGGTGEGQAVPRSTR

SEQ ID NO: 874507 - protein, 83 aa, Homo sapiens
HEAPAAGPVLQPEQSHYACFLIKGLASFLNSNKNTETCYYIRNIGRAQWLTPVIPALWEAKAGRLQGQEIETILANTVKPRLY

SEQ ID NO: 874508 - protein, 327 aa, Homo sapiens
MSFLGGFFGPICEIDIVLNDGETRKMAEMKTEDGKVEKHYLFYDGESVSGKVNLAFKQPGKRLEHQGIRIEFVGQIELFNDKSNTHEFVNLVKELALPGELTQSRSYDFEFMQVEKPYESYIGANVRLRYFLKVTIVRRLTDLVKEYDLIVHQLATYPDVNNSIKMEVGIEDCLHIEFEYNKSKYHLKDVIVGKIYFLLVRIKIQHMELQLIKKEITGIGPSTTTETETIAKYEIMDGAPVKGESIPIRLFLAGYDPTPTMRDVNKKFSVRYFLNLVLVDEEDRRYFKQQEIILWRKAPEKLRKQRTNFHQRFESPESQASAEQPEM

SEQ ID NO: 874509 - protein, 207 aa, Homo sapiens
MTENPFQERYFLKVTIVRRLTDLVKEYDLIVHQLATYPDVNNSIKMEVGIEDCLHIEFEYNKSKYHLKDVIVGKIYFLLVRIKIQHMELQLIKKEITGIGPSTTTETETIAKYEIMDGAPVKGESIPIRLFLAGYDPTPTMRDVNKKFSVRYFLNLVLVDEEDRRYFKQQEIILWRKAPEKLRKQRTNFHQRFESPESQASAEQPEM

SEQ ID NO: 874510 - protein, 66 aa, Homo sapiens
LLLIITSSDELSILYVHMDHNMLLYEFLDMTRVGSRVLQEMHDVASQFERRSYIGFLDILYWIKYA

SEQ ID NO: 874511 - protein, 247 aa, Homo sapiens
MSFLGGFFGPICEIDIVLNDGETRKMAEMKTEDGKVEKHYLFYDGESVSGKVNLAFKQPGKRLEHQGIRIEFVGQIELFNDKSNTHEFVNLVKELALPGELTQSRSYDFEFMQVEKPYESYIGANVRLRYFLKVTIVRRLTDLVKEYDLIVHQLATYPDVNNSIKMEVGIEDCLHIEFEYNKSKYHLKDVIVGKIYFLLVRIKIQHMELQLIKKEITGIGKLKRVCKLKFFVLVDIFKILKYCLNII

SEQ ID NO: 874512 - protein, 216 aa, Homo sapiens
MQVEKPYESYIGANVRLRYFLKVTIVRRLTDLVKEYDLIVHQLATYPDVNNSIKMEVGIEDCLHIEFEYNKSKYHLKDVIVGKIYFLLVRIKIQHMELQLIKKEITGIGPSTTTETETIAKYEIMDGAPVKGESIPIRLFLAGYDPTPTMRDVNKKFSVRYFLNLVLVDEEDRRYFKQQEIILWRKAPEKLRKQRTNFHQRFESPESQASAEQPEM

SEQ ID NO: 874513 - protein, 307 aa, Homo sapiens
  misc_feature (296)..(296): Xaa can be any naturally occurring amino acid
MSFLGGFFGPICEIDIVLNDGETRKMAEMKTEDGKVEKHYLFYDGESVSGKVNLAFKQPGKRLEHQGIRIEFVGQIELFNDKSNTHEFVNLVKELALPGELTQSRSYDFEFMQVEKPYESYIGANVRLRYFLKVTIVRRLTDLVKEYDLIVHQLATYPDVNNSIKMEVGIEDCLHIEFEYNKSKYHLKDVIVGKIYFLLVRIKIQHMELQLIKKEITGIGPSTTTETETIAKYEIMDGAPVKGESIPIRLFLAGYDPTPTMRDVNNHIMHDVIVTNLFFGFFLFFETGSRSAAQAXVQWLNYDLLQP

SEQ ID NO: 874514 - protein, 230 aa, Homo sapiens
MSFLGGFFGPICEIDIVLNDGETRKMAEMKTEDGKVEKHYLFYDGESVSGKVNLAFKQPGKRLEHQGIRIEFVGQIELFNDKSNTHEFVNLVKELALPGELTQSRSYDFEFMQVEKPYESYIGANVRLRYFLKVTIVRRLTDLVKEYDLIVHQLATYPDVNNSIKMEVGIEDCLHIEFEYNKSKYHLKDVIVGKIYFLLVRIKIHLLGFRWFQKGSLDWAQFHTKGNIAI

SEQ ID NO: 874515 - protein, 109 aa, Homo sapiens
SVDPFPTQRWWGCGLGGESCRGPWTSAALDPLCSQLHPVPWGPKTCPVLQMNEKHKHRQDLKQHRTVCNPKSGMCYGQWPMAWVILRVQGRQALPKEAAGRMCLIQSWY

SEQ ID NO: 874516 - protein, 110 aa, Homo sapiens
MGSRRFTCCAAEPRLPSMMCPCGGIIGKQPFSDSQRTNELQKEIRQGRIAFGEKPLTRLALVFANNVSLNCCQIFFSLCRIHQSSYAKEHHCTALLKIHTIKWTLTCKKK

SEQ ID NO: 874517 - protein, 156 aa, Homo sapiens
TAQDARPFLGRPRRPRPKLHPFPPPCRAPEALWRLRARTKGGPCKRTCSAGSAGPTKRPGRIRVPGAAAPPCGRGGAAQGNAGGARVWNGLGTSPPRGRVRRQGVWRPGRVTPQPSRCLGSGFLCFAVYSSAPRSCLRCTRRFANVLSFLYNPSRQ

SEQ ID NO: 874518 - protein, 173 aa, Homo sapiens
DSGAAGLCGVDSGAAGLCGVDSGAAGLCGVDSGAAGLCGVDSGAAGLCGVDSGAAGLCGVDSGAAGLCGVDSGAAGRCGVDSGAAGLCGVDRQWSSWAVWCSQLLLGCFSCCFRPKFGQCVTVLNNVGSCNTTASICVSKHRKGDVLCSDVTMATTSLAIGICQFCYNFMEPL

SEQ ID NO: 874519 - protein, 140 aa, Homo sapiens
DSGAAGLCGVDSGAAGLCGVDSGAAGLCGVDSGAAGLCGVDSGAAGLCGVDSGAAGLCGVDSGAAGLCGVDSGAAGRCGVDSGAAGLCGVDRQWSSWAVWCSQLLLGCFSCCFRPKFGQCVTVLNNVGSCNTTASICVSQ

SEQ ID NO: 874520 - protein, 81 aa, Homo sapiens
ITLRAGRCSEGPSQGQGQEAWAEPSPYADGQPVTSHKPRGFLGRISIVTGHWVCRHTSPDFLLFYSLAEHPSPACWLPGTE

SEQ ID NO: 874521 - protein, 33 aa, Homo sapiens
MIRRILLGRPGRGEGAGAEWRGQRAGAATGAGA

SEQ ID NO: 874522 - protein, 51 aa, Homo sapiens
WKGASAACTCKKVGPNCPSLHRTTASQQQRPDKLQSCLLRTGERGSALSPF

SEQ ID NO: 874523 - protein, 248 aa, Homo sapiens
PRGSGAAQDSPSPGSRPCLGGASGSRSRALGLSPQARLARRSPQCREDPEDAPQAALLRASSQGPGMRRCRRCARWPHRCPGPQSGPRSHFSPWPRTLGPAPALCVRTPLRPGPSSALGPLSACPSVPDYTASPPAGDSARSIVAASRAAGSGSTPGAGSKDCSPPPHSHSAAAAGESGDIGPGSGAVEAPGRGARRPTRQREDGGGAVGCFGVSRHRGREAQMSHSSHCGSRSCSAAAARPSLLQLA

SEQ ID NO: 874524 - protein, 111 aa, Homo sapiens
NESLPEIMPHCNHALLGLSDPPASASLKVHLHLNKDGCAPRYVFVGFHPIVLEQRTNGRKLLKKRRAFLWLLQEQLQISVLKPGGNMWPRSHSGELQCSLLGISVLIWIQG

SEQ ID NO: 874525 - protein, 110 aa, Homo sapiens
PTSSDRGRREAQVSWLIRSEVQEAGPVLLVLVGAPTSPTGGCLGPPVTCRWLVRAALVGFLSPSLRTMGTLALTGQSSNPRLSLPLARVLCCGRGPFSTHLWLLLSPTHL

SEQ ID NO: 874526 - protein, 77 aa, Homo sapiens
  misc_feature (13)..(13): Xaa can be any naturally occurring amino acid
SDRGGANGRDGLXGTERPLWLLGGCGMMGEWTRRGILGMWSLKASRAVPQARDEWGEVKAEDAELGVIRISAECLMC

SEQ ID NO: 874527 - protein, 105 aa, Homo sapiens
GVRGSPVLPAVSPHRDPHPSPVHLTESYQWGPPTAFKYPPFTPCPGADKPSPSWAGLQAPMWGTAGFRGGTRGGTPVHLSLRGYTGILLSPGESEAAPQREQDPS

SEQ ID NO: 874528 - protein, 69 aa, Homo sapiens
ATSPIHIQSQKPFTPTNAQRPPQQPSTPHTTTTFTHMHPMTKVLYTCNPEIRRASHICPISKALNIHTH

SEQ ID NO: 874529 - protein, 105 aa, Homo sapiens
PTPDQGWGGLPGAHSAGTPPENTSAARPLPQSTTTPPGPLEDPLRFTTGPSSRWSDHRLVEWALGPPGDQGAGGGGQLIGRGAGAQCGARPTPRCPFPALASQAP

SEQ ID NO: 874530 - protein, 81 aa, Homo sapiens
ALTAALGASAEAPQGGQTPCLRAHSHWGGKGEGGMAAFCLHPPPQNPTVGSAAAASRAVPREARGVGLGTGDPFQPFPAPP

SEQ ID NO: 874531 - protein, 144 aa, Homo sapiens
MRSPRMRVCAKSVLLSHWLFLAYVLMVCCKLMSASSQHLRGHAGHHQIKQGTCEVVAVHRCCNKNRIEERSQTVKCSCFPGQVAGTTRAQPSCVEASIVIQKWWCHMNPCLEGEDCKVLPDYSGWSCSSGNKVKTTKASIDKMQ

SEQ ID NO: 874532 - protein, 140 aa, Homo sapiens
MRSPRMRVCAKSVLLSHWLFLAYVLMVCCKLMSASSQHLRGHAGHHQIKQGTCEVVAVHRCCNKNRIEERSQTVKCSCFPGQVAGTTRAQPSCVEASIVIQKWWCHMNPCLEGEDCKVLPDYSGWSCSSGNKVKTTKVTR

SEQ ID NO: 874533 - protein, 38 aa, Homo sapiens
PAKLKGIKQRFAAVLHALRQASSKASHLQSMISAAMFF

SEQ ID NO: 874534 - protein, 346 aa, Homo sapiens
QEKSSGAGSLGNSRPSFLNSALWDVWDGEEQRPPETPPPAQMPSAGGAQKPEGLETPKGANRKKNLPPKVPITPMPQYSIMETPVLKKELDRFGVRPLPKRQMVLKLKEIFQYTHQTLDSDSEDESQSSQPLLQAPHCQTLASQTYKPSRAGVHAQQEATTGPGAHRPKGPAKTKGPRHQRKHHESITPPSRSPTKEAPPGLNDDAQIPASQESVATSVDGSDSSLSSQSSSSCEFGAAFESAGEEEGEGEVSASQAAVQAADTDEALRCYIRSKPALYQKVLLYQPFELRELQAELRQNGLRVSSRRLLDFLDTHCITFTTAATRREKLQGRRRQPRGKKKVERN

SEQ ID NO: 874535 - protein, 346 aa, Homo sapiens; identical to SEQ ID NO: 874534

SEQ ID NO: 874536 - protein, 281 aa, Homo sapiens
QEKSSGAGSLGNSRPSFLNSALWDVWDGEEQRPPETPPPAQMPSAGGAQKPEGLETPKGANRKKNLPPKVPITPMPQYSIMETPVLKKELDRFGVRPLPKRQMVLKLKEIFQYTHQTLDSDSEDESQSSQPLLQAPHCQTLASQTYKPSRAGVHAQQEATTGPGAHRPKGPAKTKGPRHQRKHHESITPPSRSPTKEAPPGLNDDAQIPASQESVATKQTCSLADSILWVKAASSLRSSVEEDEGQERRKPWFLHPCECPRLFQIQCSQFYMMCNKPKRLY

SEQ ID NO: 874537 - protein, 356 aa, Homo sapiens
MWSWPGQKDMLWFGQPGPGGWNRKCLRPFTLPRGQHPQPSYGFPQVNEVVFSPGESHCATCSEDGSVRVWALASMELVIQFQVLNQSCLCLAWSPPCCGRPEQQRLAAGYGDGSLRIFSVSRTAMELKMHPHPVALTTVAFSTDGQTVLSGDKDGLVAVSHPCTGTTFRVLSDHQGAPISTICVTCKECEDLGVEGTDLWLAASGDQRVSVWASDWLRNHCELVDWLSFPMPATTETQGHLPPSLAAFCPWDGALLMYVGPGVYKEVIIYNLCQKQVVEKIPLPFFAMSLSLSPGTHLLAVGFAECMLRLVDCAMGTAQDFAGHDNAVHLCRFTPSARLLFTAARNEILVWEVPGL

SEQ ID NO: 874538 - protein, 356 aa, Homo sapiens; identical to SEQ ID NO: 874537

SEQ ID NO: 874539 - protein, 356 aa, Homo sapiens; identical to SEQ ID NO: 874537

SEQ ID NO: 874540 - protein, 282 aa, Homo sapiens
MELVIQFQVLNQSCLCLAWSPPCCGRPEQQRLAAGYGDGSLRIFSVSRTAMELKMHPHPVALTTVAFSTDGQTVLSGDKDGLVAVSHPCTGTTFRVLSDHQGAPISTICVTCKECEDLGVEGTDLWLAASGDQRVSVWASDWLRNHCELVDWLSFPMPATTETQGHLPPSLAAFCPWDGALLMYVGPGVYKEVIIYNLCQKQVVEKIPLPFFAMSLSLSPGTHLLAVGFAECMLRLVDCAMGTAQDFAGHDNAVHLCRFTPSARLLFTAARNEILVWEVPGL

SEQ ID NO: 874541 - protein, 183 aa, Homo sapiens [sequence omitted]

SEQ ID NO: 874542 - protein, 410 aa, Homo sapiens
ARGTYTKIGTIQRRLAWPLRKDDTQIREAFHIFLDSPRSSAGTHTGAGIAPFRHVELAGARRHMLWFGQPGPGGWNRKCLRPFTLPRGQHPQPSYGFPQVNEVVFSPGESHCATCSEDGSVRVWALASMELVIQFQVLNQSCLCLAWSPPCCGRPEQQRLAAGYGDGSLRIFSVSRTAMELKMHPHPVALTTVAFSTDGQTVLSGDKDGLVAVSHPCTGTTFRVLSDHQGAPISTICVTCKECEDLGVEGTDLWLAASGDQRVSVWASDWLRNHCELVDWLSFPMPATTETQGHLPPSLAAFCPWDGALLMYVGPGVYKEVIIYNLCQKQVVEKIPLPFFAMSLSLSPGTHLLAVGFAECMLRLVDCAMGTAQDFAGHDNAVHLCRFTPSARLLFTAARNEILVWEVPGL

SEQ ID NO: 874543 - protein, 356 aa, Homo sapiens; identical to SEQ ID NO: 874537

SEQ ID NO: 874544 - protein, 393 aa, Homo sapiens
MWSWPGQKDMLWFGQPGPGGWNRKCLRPFTLPRGQHPQPSYGFPQVNEVVFSPGESHCATCSEDGSVRVWALASMELVIQFQVLNQSCLCLAWSPPCCGRPEQQRLAAGYGDGSLRIFSVSRTAMELKMHPHPVALTTVAFSTDGQTVLSGDKDGLVAVSHPCTGTTFRVLSDHQGAPISTICVTCKECEDLGVEGTDLWLAASGDQRVSVWASDWLRNHCELVDWLSFPMPATTETQGHLPPSLAAFCPWDGALLMYVGPGVYKEVIIYNLCQKQVVEKIPLPFFAMSLSLSPGTHLLAVGFAGLHRPPGCSSRPPATRSLCGRSPASEMQQGLWWWASRLVMPGTWTQAWQRRQVVNGLMLGQARIHVNRLEQAVVNLAPCEYFHTCCPFA

SEQ ID NO: 874545 - protein, 189 aa, Homo sapiens
MTEYKLVVVGAGGVGKSALTIQLIQNHFVDEYDPTIEDSYRKQVVIDGETCLLDILDTAGQEEYSAMRDQYMRTGEGFLCVFAINNSKSFADINLYREQIKRVKDSDDVPMVLVGNKCDLPTRTVDTKQAHELAKSYGIPFIETSAKTRQGVEDAFYTLVREIRQYRMKKLNSSDDGTQGCMGLPCVVM

SEQ ID NO: 874546 - protein, 189 aa, Homo sapiens; identical to SEQ ID NO: 874545

SEQ ID NO: 874547 - protein, 189 aa, Homo sapiens; identical to SEQ ID NO: 874545

SEQ ID NO: 874548 - protein, 189 aa, Homo sapiens; identical to SEQ ID NO: 874545

SEQ ID NO: 874549 - protein, 189 aa, Homo sapiens; identical to SEQ ID NO: 874545

SEQ ID NO: 874550 - protein, 189 aa, Homo sapiens; identical to SEQ ID NO: 874545

SEQ ID NO: 874551 - protein, 125 aa, Homo sapiens [sequence omitted]

SEQ ID NO: 874552 - protein, 76 aa, Homo sapiens
LLCTPSIHTLNITKREKAIYFRIKLEVVWSLLNTQCCHAKRGSSPTWDATVKYSLGQVSRAQRPTFRVAQTGSKLF

SEQ ID NO: 874553 - protein, 306 aa, Homo sapiens
AGGRAGGRSWARGQARSSRSDCAPPPGRSGRLPMVRASCRLGSARTPSPARRPPGVRASQSRGGAAGTVSAWRRWCWRWPWRTAPSDGWRLPPGCLPGTDGVVPRPPAARSAAARPRETPGHTQLPPGARRRPRLESEMAFNDCFSLNYPGNPCPGDLIEVFRPGYQHWALYLGDGYVINIAPVDGIPASFTSAKSVFSSKALVKMQLLKDVVGNDTYRINNKYDETYPPLPVEEIIKRSEFVIGQEVAYNLLVNNCEHFVTLLRYGEGVSEQANRAISTVEFVTAAVGVFSFLGLFPKGQRAKYY

SEQ ID NO: 874554 - protein, 94 aa, Homo sapiens
RTRSRGWHHVLLCTPAEPEIMGKTAHFCFVHFALGSESYSHYHHIPWHPIPHSTSEDYSGGIQGTLDILPMSLVILISVGPWVLTYETALLADY

SEQ ID NO: 874555 - protein, 66 aa, Homo sapiens
GTCKGPEARWSLAPGSNGLEGQRAVLTVWEVEVVLAGAAAVVAASVGQSRDLGDKIEGGGKERVRS

SEQ ID NO: 874556 - protein, 130 aa, Homo sapiens
GSASTRGCEEGRRVPRGTGSTCLRTDGGSLCSEKTQTPEGGCETERPVSVRLALFICLLPRRLQPLIPAHPVRKQTAASPTATRRGRLPRAGQAGQAAHLRRPTISWALYATLQKGSCEVLAIEAHLLVF

SEQ ID NO: 874557 - protein, 46 aa, Homo sapiens
IRQSETKGLVLEALCWWPWEEVSQSFSSAEISLDPVERKVSQRLCV

SEQ ID NO: 874558 - protein, 135 aa, Homo sapiens
SSPCHNYNQNPKGTDLPHCGCHKAQFLPSAAAVTSQVTVLPSKDVPEACACHTNMLICPKLPAELCPSPKVPLSNKSIYWSQTLDSVSDKCSPIIQRLTNVWISFLLFFFFKKHSMALFPRLECSGGIIAHCRNS

SEQ ID NO: 874559 - protein, 42 aa, Homo sapiens
MQGCRWALAHWVLGLWPVQEGKTIQVYGETASKPRWLPVEKQ

SEQ ID NO: 874560 - protein, 123 aa, Homo sapiens
MKLLLLALPMLVLLPQVIPAYSGEKKCWNRSGHCRKQCKDGEAVKDTCKNLRACCIPSNEDHRRVPATSPTPLSDSTPGIIDDILTVRFTTDYFEVSSKKDMVEESEAGRGTETSLPNVHHSS

SEQ ID NO: 874561 - protein, 171 aa, Homo sapiens
RNSASGIWLSSAMASLEVSRSPRRSRRELEVRSPRQNKYSVLLPTYNERENLPLIVWLLVKSFSESGINYEIIIIDDGSPDGTRDVAEQLEKIYGSDRILLRPREKKLGLGTAYIHGMKHATGNYIIIMDADLSHHPKFIPEFIRGSKRRVILILSLELATKEMEVYMAGI

SEQ ID NO: 874562 - protein, 171 aa, Homo sapiens; identical to SEQ ID NO: 874561

SEQ ID NO: 874563 - protein, 190 aa, Homo sapiens
FPSTRSLITYIIIMDADLSHHPKFIPEFIRKQKEGNFDIVSGTRYKGNGGVYGWDLTHTNTIISDGVLPCCPGWSLLGSSDPAILASWDYRCEPPRLARSDCFIWQPVGPIFLTQILLRPGASDLTGSFRLYRKRSSREINTNTTVFLKATSSRWEMIVRARQLNYTIGEVFQYHLWIVFMVNPSWEEMK

SEQ ID NO: 874564 - protein, 171 aa, Homo sapiens; identical to SEQ ID NO: 874561

SEQ ID NO: 874565 - protein, 171 aa, Homo sapiens; identical to SEQ ID NO: 874561

SEQ ID NO: 874566 - protein, 171 aa, Homo sapiens; identical to SEQ ID NO: 874561

SEQ ID NO: 874567 - protein, 171 aa, Homo sapiens; identical to SEQ ID NO: 874561

SEQ ID NO: 874568 - protein, 171 aa, Homo sapiens; identical to SEQ ID NO: 874561

SEQ ID NO: 874569 - protein, 187 aa, Homo sapiens
RNSASGIWLSSAMASLEVSRSPRRSRRELEVRSPRQNKYSVLLPTYNERENLPLIVWLLVKSFSESGINYEIIIIDDGSPDGTRDVAEQLEKIYGSDRILLRPREKKLGLGTAYIHGMKHATGNYIIIMDADLSHHRKQKEGNFDIVSGTRYKGNGGVYGWDLTHTNTIISRGANFFNSDLAETRSI

SEQ ID NO: 874570 - protein, 171 aa, Homo sapiens; identical to SEQ ID NO: 874561

SEQ ID NO: 874571 - protein, 171 aa, Homo sapiens; identical to SEQ ID NO: 874561

SEQ ID NO: 874572 - protein, 171 aa, Homo sapiens; identical to SEQ ID NO: 874561

SEQ ID NO: 874573 - protein, 171 aa, Homo sapiens; identical to SEQ ID NO: 874561

SEQ ID NO: 874574 - protein, 100 aa, Homo sapiens
RNSASGIWLSSAMASLEVSRSPRRSRRELEVRSPRQNKYSVLLPTYNERENLPLIVWLLVKSFSESGINYEIIIIDDGSPDGTRDVAEQLEKIYGSDRIF

SEQ ID NO: 874575 - protein, 171 aa, Homo sapiens; identical to SEQ ID NO: 874561

SEQ ID NO: 874576 - protein, 80 aa, Homo sapiens
FPSTRSLITYIIIMDADLSHHPKFIPEFIRKQKEGNFDIVSGTRYKGNGGVYGWDLTHTNTIISRGANFFNSDLAETRSI

SEQ ID NO: 874577 - protein, 101 aa, Homo sapiens
DRVYGESKLGGNDIGTSPVGPIFLTQILLRPGASDLTGSFRLYRKRSSREINTNTTVFLKATSSRWEMIVRARQLNYTIGEVFQYHLWIVFMVNPSWEEMK

SEQ ID NO: 874578 - protein, 171 aa, Homo sapiens; identical to SEQ ID NO: 874561

SEQ ID NO: 874579 - protein, 171 aa, Homo sapiens; identical to SEQ ID NO: 874561

SEQ ID NO: 874580 - protein, 188 aa, Homo sapiens
RNSASGIWLSSAMASLEVSRSPRRSRRELEVRSPRQNKYSVLLPTYNERENLPLIVWLLVKSFSESGINYEIIIIDDGSPDGTRDVAEQLEKIYGSDRILLRPREKKLGLGTAYIHGMKHATGNYIIIMDADLSHHPKFIPEFISDGVLPCCPGWSLLGSSDPAILASWDYSRGANFFNSDLAETRSI

SEQ ID NO: 874581 - protein, 142 aa, Homo sapiens
RNSASGIWLSSAMASLEVSRSPRRSRRELEVRSPRQNKYSVLLPTYNERENLPLIVWLLVKSFSESGINYEIIIIDDGSPDGTRDVAEQLEKIYGSDRILLRPREKKLGLGTAYIHGMKHATGNYIIIMDADLSHHVSGMFL

SEQ ID NO: 874582 - protein, 724 aa, Homo sapiens
MPRNSGAGYGCPHGDPSMLDSRETPQESRQDMIVRTTQEKLKTSSLTDRQPLSKESLNHALELSVPEKVNNAQWDAPEEALWTTRADGRVRLRIDPSCPQLPYTVHRMFYEALDKYGDLIALGFKRQDKWEHISYSQYYLLARRAAKGFLKLGLKQAHSVAILGFNSPEWFFSAVGTVFAGGIVTGIYTTSSPEACQYIAYDCCANVIMVDTQKQLEKILKIWKQLPHLKAVVIYKEPPPNKMANVYTMEEFMELGNEVPEEALDAIIDTQQPNQCCVLVYTSGTTGNPKGVMLSQDNITWTARYGSQAGDIRPAEVQQEVVVSYLPLSHIAAQIYDLWTGIQWGAQVCFAEPDALKGSLVNTLREVEPTSHMGVPRVWEKIMERIQEVAAQSGFIRRKMLLWAMSVTLEQNLTCPGSDLKPFTTRLADYLVLAKVRQALGFAKCQKNFYGAAPMMAETQHFFLGLNIRLYAGYGLSETSGPHFMSSPYNYRLYSSGKLVPGCRVKLVNQDAEGIGEICLWGRTIFMGYLNMEDKTCEAIDEEGWLHTGDAGRLDADGFLYITGRLKELIITAGGENVPPVPIEEAVKMELPIISNAMLIGDQRKFLSMLLTLKCTLDPDTSDQTDNLTEQAMEFCQRVGSRATTVSEIIEKKDEAVYQAIEEGIRRVNMNAAARPYHIQKWAILERDFSISGGELGPTMKLKRLTVLEKYKGIIDSFYQEQKM

SEQ ID NO: 874583 - protein, 664 aa, Homo sapiens
ISSSRKLGRREARDRETEEALWTTRADGRVRLRIDPSCPQLPYTVHRMFYEALDKYGDLIALGFKRQDKWEHISYSQYYLLARRAAKGFLKLGLKQAHSVAILGFNSPEWFFSAVGTVFAGGIVTGIYTTSSPEACQYIAYDCCANVIMVDTQKQLEKILKIWKQLPHLKAVVIYKEPPPNKMANVYTMEEFMELGNEVPEEALDAIIDTQQPNQCCVLVYTSGTTGNPKGVMLSQDNITWTARYGSQAGDIRPAEVQQEVVVSYLPLSHIAAQIYDLWTGIQWGAQVCFAEPDALKGSLVNTLREVEPTSHMGVPRVWEKIMERIQEVAAQSGFIRRKMLLWAMSVTLEQNLTCPGSDLKPFTTRLADYLVLAKVRQALGFAKCQKNFYGAAPMMAETQHFFLGLNIRLYAGYGLSETSGPHFMSSPYNYRLYSSGKLVPGCRVKLVNQDAEGIGEICLWGRTIFMGYLNMEDKTCEAIDEEGWLHTGDAGRLDADGFLYITGRLKELIITAGGENVPPVPIEEAVKMELPIISNAMLIGDQRKFLSMLLTLKCTLDPDTSDQTDNLTEQAMEFCQRVGSRATTVSEIIEKKDEAVYQAIEEGIRRVNMNAAARPYHIQKWAILERDFSISGGELGPTMKLKRLTVLEKYKGIIDSFYQEQKM

SEQ ID NO: 874584 - protein, 245 aa, Homo sapiens
MDEMSEQAESWMTSRGEGNLGEHLSSGCCHQPPSRCELLWRACHCFLAPRKGASPAVLGFRVVVEAWVVVQLGHLDYILCRGPGLASPELIITAGGENVPPVPIEEAVKMELPIISNAMLIGDQRKFLSMLLTLKCTLDPDTSDQTDNLTEQAMEFCQRVGSRATTVSEIIEKKDEAVYQAIEEGIRRVNMNAAARPYHIQKWAILERDFSISGGELGPTMKLKRLTVLEKYKGIIDSFYQEQKM

SEQ ID NO: 874585 - protein, 177 aa, Homo sapiens
MDEMSEQAESWMTSRGEGNLELIITAGGENVPPVPIEEAVKMELPIISNAMLIGDQRKFLSMLLTLKCTLDPDTSDQTDNLTEQAMEFCQRVGSRATTVSEIIEKKDEAVYQAIEEGIRRVNMNAAARPYHIQKWAILERDFSISGGELGPTMKLKRLTVLEKYKGIIDSFYQEQKM

SEQ ID NO: 874586 - protein, 746 aa, Homo sapiens
MPRNSGAGYGCPHGDPSMLDSRETPQESRQDMIVRTTQEKLKTSSLTDRQPLSKESLNHALELSVPEKVNNAQWDAPEEALWTTRADGRVRLRIDPSCPQLPYTVHRMFYEALDKYGDLIALGFKRQDKWEHISYSQYYLLARRAAKGFLKLGLKQAHSVAILGFNSPEWFFSAVGTVFAGGIVTGIYTTSSPEACQYIAYDCCANVIMVDTQKQLEKILKIWKQLPHLKAVVIYKEPPPNKMANVYTMEEFMELGNEVPEEALDAIIDTQQPNQCCVLVYTSGTTGNPKGVMLSQDNITWTARYGSQAGDIRPAEVQQEVVVSYLPLSHIAAQIYDLWTGIQWGAQVCFAEPDALKGSLVNTLREVEPTSHMGVPRVWEKIMERIQEVAAQSGFIRRKMLLWAMSVTLEQNLTCPGSDLKPFTTRLADYLVLAKVRQALGFAKCQKNFYGAAPMMAETQHFFLGLNIRLYAGYGLSETSGPHFMSSPYNYRLYSSGKLVPGCRVKLVNQDAEGIGEICLWGRTIFMGYLNMEDKTCEAIDEEGWLHTGDAGRLDADGFLYITGRLKELIITAGGENVPPVPIEEAVKMELPIISNAMLIGDQRKFLSMLLTLKCTLDPDTSDQTDNLTEQAMEFCQRVGSRATTVSEIIEKKDEAVYQAIEEGIRRVNMNAAARPYHIQKWAILERDFSISGGELGPTMKLKRLTVLEKYKAWSKSPMWRSIITALSRRAVGFAMSLPAMSGAVP

SEQ ID NO: 874587 - protein, 724 aa, Homo sapiens; identical to SEQ ID NO: 874582

SEQ ID NO: 874588 - protein, 732 aa, Homo sapiens
MPEVLLLRSASSILRTAFLSRWLPGGPRCVHKLSFVRNLQCRQGVRLNVRSSSLTDRQPLSKESLNHALELSVPEKVNNAQWDAPEEALWTTRADGRVRLRIDPSCPQLPYTVHRMFYEALDKYGDLIALGFKRQDKWEHISYSQYYLLARRAAKGFLKLGLKQAHSVAILGFNSPEWFFSAVGTVFAGGIVTGIYTTSSPEACQYIAYDCCANVIMVDTQKQLEKILKIWKQLPHLKAVVIYKEPPPNKMANVYTMEEFMELGNEVPEEALDAIIDTQQPNQCCVLVYTSGTTGNPKGVMLSQDNITWTARYGSQAGDIRPAEVQQEVVVSYLPLSHIAAQIYDLWTGIQWGAQVCFAEPDALKGSLVNTLREVEPTSHMGVPRVWEKIMERIQEVAAQSGFIRRKMLLWAMSVTLEQNLTCPGSDLKPFTTRLADYLVLAKVRQALGFAKCQKNFYGAAPMMAETQHFFLGLNIRLYAGYGLSETSGPHFMSSPYNYRLYSSGKLVPGCRVKLVNQDAEGIGEICLWGRTIFMGYLNMEDKTCEAIDEEGWLHTGDAGRLDADGFLYITGRLKELIITAGGENVPPVPIEEAVKMELPIISNAMLIGDQRKFLSMLLTLKCTLDPDTSDQTDNLTEQAMEFCQRVGSRATTVSEIIEKKDEAVYQAIEEGIRRVNMNAAARPYHIQKWAILERDFSISGGELGPTMKLKRLTVLEKYKGIIDSFYQEQKM

SEQ ID NO: 874589 - protein, 505 aa, Homo sapiens
MQIWKQLPHLKAVVIYKEPPPNKMANVYTMEEFMELGNEVPEEALDAIIDTQQPNQCCVLVYTSGTTGNPKGVMLSQDNITWTARYGSQAGDIRPAEVQQEVVVSYLPLSHIAAQIYDLWTGIQWGAQVCFAEPDALKGSLVNTLREVEPTSHMGVPRVWEKIMERIQEVAAQSGFIRRKMLLWAMSVTLEQNLTCPGSDLKPFTTRLADYLVLAKVRQALGFAKCQKNFYGAAPMMAETQHFFLGLNIRLYAGYGLSETSGPHFMSSPYNYRLYSSGKLVPGCRVKLVNQDAEGIGEICLWGRTIFMGYLNMEDKTCEAIDEEGWLHTGDAGRLDADGFLYITGRLKELIITAGGENVPPVPIEEAVKMELPIISNAMLIGDQRKFLSMLLTLKCTLDPDTSDQTDNLTEQAMEFCQRVGSRATTVSEIIEKKDEAVYQAIEEGIRRVNMNAAARPYHIQKWAILERDFSISGGELGPTMKLKRLTVLEKYKGIIDSFYQEQKM

SEQ ID NO: 874590 - protein, 755 aa, Homo sapiens
MPRNSGAGYGCPHGDPSMLDSRETPQESRQDMIVRTTQEKLKTSSLTDRQPLSKESLNHALELSVPEKVNNAQWDAPEEALWTTRADGRVRLRIDPSCPQLPYTVHRMFYEALDKYGDLIALGFKRQDKWEHISYSQYYLLARRAAKGFLKLGLKQAHSVAILGFNSPEWFFSAVGTVFAGGIVTGIYTTSSPEACQYIAYDCCANVIMVDTQKQLEKILKIWKQLPHLKAVVIYKEPPPNKMANVYTMEEFMELGNEVPEEALDAIIDTQQPNQCCVLVYTSGTTGNPKGVMLSQDNITWTARYGSQAGDIRPAEVQQEVVVSYLPLSHIAAQIYDLWTGIQWGAQVCFAEPDALKGSLVNTLREVEPTSHMGVPRVWEKIMERIQEVAAQSGFIRRKMLLWAMSVTLEQNLTCPGSDLKPFTTRLADYLVLAKVRQALGFAKCQKNFYGAAPMMAETQHFFLGLNIRLYAGYGLSETSGPHFMSSPYNYRLYSSGKLVPGCRVKLVNQDAEGIGEICLWGRTIFMGYLNMEDKTCEAIDEEGWLHTGDAGRLDADGFLYITGRLKELIITAGGENVPPVPIEEAVKMELPIISNAMLIGDQRKFLSMLLTLKCTLDPDTSDQTDNLTEQAMEFCQRVGSRATTVSEIIEKKDEAVYQAIEEGIRRVNMNAAARPYHIQKWAILERDFSISGGELGPTMKLKRLTVLEKYKAKHAASILAAWSKSPMWRSIITALSRRAVGFAMSLPAMSGAVP

SEQ ID NO: 874591 - protein, 43 aa, Homo sapiens
LRNSYAVFPVNLGMSHPKYTASPKPKWLPHRCQSWTTGFESRP

SEQ ID NO: 874592 - protein, 102 aa, Homo sapiens
SPMSSNAQEKKETSPPVKKWTLGMSDSPKQVTRTLRSMINTSDKSIYHLQPRDKSCQVDCLSTPFRDKDENCNHLSPSSCPLQVPSTTQQVFNKDVLSSFNT

SEQ ID NO: 874593 - protein, 76 aa, Homo sapiens
AVLPPSPSRATASEATWRPDLLDDGPLASPDRTVQGLRPTPHLDFSNWSWLPTGTKGPGMGKTWVPPAPPHLFAQR

SEQ ID NO: 874594 - protein, 438 aa, Homo sapiens
MVMNPKQVFLSVLIFGVAGLLLFMYLQVWIEEQHTGRVEKRREQKVTSGWGPVKYLRPVPRIMSTEKIQEHITNQNPKFHMPEDVREKKENLLLNSERSTRLLTKTSHSQGGDQALSKSTGSPTEKLIEKRQGAKTVFNKFSNMNWPVDIHPLNKSLVKDNKWKKTEETQEKRRSFLQEFCKKYGGVSHHQSHLFHTVSRIYVEDKHKILYCEVPKAGCSNWKRILMVLNGLASSAYNISHNAVHYGKHLKKLDSFDLKGIYTRLNTYTKAVFVRDPMERLVSAFRDKFEHPNSYYHPVFGKAIIKKYRPNACEEALINGSGVKFKEFIHYLLDSHRPVGMDIHWEKVSKLCYPCLINYDFVGKFETLEEDANYFLQMIGAPKELKFPNFKDRHSSDERTNAQVVRQYLKDLTRTERQLIYDFYYLDYLMFNYTTPFL

SEQ ID NO: 874595 - protein, 438 aa, Homo sapiens; identical to SEQ ID NO: 874594

SEQ ID NO: 874596 - protein, 358 aa, Homo sapiens
MPEDVREKKENLLLNSERSTRLLTKTSHSQGGDQALSKSTGSPTEKLIEKRQGAKTVFNKFSNMNWPVDIHPLNKSLVKDNKWKKTEETQEKRRSFLQEFCKKYGGVSHHQSHLFHTVSRIYVEDKHKILYCEVPKAGCSNWKRILMVLNGLASSAYNISHNAVHYGKHLKKLDSFDLKGIYTRLNTYTKAVFVRDPMERLVSAFRDKFEHPNSYYHPVFGKAIIKKYRPNACEEALINGSGVKFKEFIHYLLDSHRPVGMDIHWEKVSKLCYPCLINYDFVGKFETLEEDANYFLQMIGAPKELKFPNFKDRHSSDERTNAQVVRQYLKDLTRTERQLIYDFYYLDYLMFNYTTPFL

SEQ ID NO: 874597 - protein, 148 aa, Homo sapiens
CIQCDCPAVTGSRPGQTCSLPQSRGERCIHPQRGTRCSSGTPASSRPGAHCSFGTPASSSTAGALSPWPGRSPLSESPVHELCLFFGVLLSYSYEELLQSVDANPFPILFTVTTIWPVHSFYFPLVYGDFNNVALFQFANVFLYAFSY

SEQ ID NO: 874598 - protein, 98 aa, Homo sapiens
CIQCDCPAVTGSRPGQTCSLPQSRGERCIHPQRGTRCSSGTPASSRPGAHCSFGTPASSSTAGALSPWPATKEETTSSSSHSRRTPGNKDGMRIEKQS

SEQ ID NO: 874599 - protein, 48 aa, Homo sapiens
LIDIYRTLHPKSTRSLSNSSNISLYHYTATYLTGWHAGFLLQGHDIVI

SEQ ID NO: 874600 - protein, 69 aa, Homo sapiens
RMQGLGCKGLWMQSVLWMQKCLVILYVFHKMQVSLRVYHRLRDAIKHTLVVLVKQIKQVTPEMCTQEYV

SEQ ID NO: 874601 - protein, 109 aa, Homo sapiens
MAEDKVGAACLGPVAGTPEPEGADKDDLLLLSEIFNASSLEEGEFSKEWAAVFGDGKVKEPVPTMALGEPDPKAQTGSGFLPSQLLDQNMKDLQASLQGRKGGDRNWGT

SEQ ID NO: 874602 - protein, 46 aa, Homo sapiens
MVVLFDRARSFGRDAHGTVREEGDTRLASQISRINSGDQWGDRCHS

SEQ ID NO: 874603 - protein, 119 aa, Homo sapiens
MQLGKTILAILHRPYQTADSHPPITVPTTDPGHRPGCKPQLQKLVYGVKSQDSSYCGEEGREGVGEGHERGFRMVRFCFLIWVVVTGCVLFVILSRDVHLGFAIFSVKYFNKRHLFFKN

SEQ ID NO: 874604 - protein, 87 aa, Homo sapiens
AAARGARLQGAGACSGLEQAGGARLNGGRLSEGGKPFLPPPQAPEDRLADISSRYTDPPPHQETDVQTPRKEQANWGSFHPPRARGE

SEQ ID NO: 874605 - protein, 101 aa, Homo sapiens
LKPQAAENKWRRREGKKTKALVRTKPLISAKVGSIRFPFITWTKRHSHHPELRHSPTQFHVAGTKAASILKDVSDHSQGPLIIHIHSPGSPKGIRAEKALQ

SEQ ID NO: 874606 - protein, 125 aa, Homo sapiens
RQPIFSYDKDGIWLMSKVARSSSESDVQLWETEEDDMTEGDLGYGLGRKPGGIYEIEFSHRSRKRSDGKNFSPPPFPRKGEERNEASFQYSKHKSQQDTFPQVSRISNYRRQSSTGKNAELSMKN

SEQ ID NO: 874607 - protein, 81 aa, Homo sapiens
LRDREGKTDVKMTFPMPGTGDLAPLSSRPPPSWQTGGLQGPAGPDSNSCSSSRQGPQLSQPGPRDLQHILRACCSLTERTR

SEQ ID NO: 874608 - protein, 74 aa, Homo sapiens
YKLIGGTCILEGKTQTASHLAAVCGTGQQEDKQLLLDLGLWEARKLGFALGTFLWKIGRTKSSLMSLKFSIIGK

SEQ ID NO: 874609 - protein, 45 aa, Homo sapiens
MGQHRKGCSLPLIWGAHDRPEGQTNSIGVCGLIFICTSTLVGMPG

SEQ ID NO: 874610 - protein, 247 aa, Homo sapiens
MAPPSRHCLLLISTLGVFALNCFTKGQKNSTLIFTRENTIRNCSCSADIRDCDYSLANLMCNCKTVLPLAVERTSYNGHLTIWFTDTSALGHLLNFTLVQDLKLSLCSTNTLPTEYLAICGLKRLRINMEAKHPFPEQSLLIHSGGDSDSREKPMWLHKGWQPCMYISFLDMALFNRDSALNHIVLKTLPALPTTFLTFLTLEPSQCQATKAMLSHLFTSIITVSSCLELWQMMNNLQKESGNKAVR

SEQ ID NO: 874611 - protein, 88 aa, Homo sapiens
SLSSRCDQLEERVSVMEDEMNEMKQEEKFREKRVKRNEQSLQEIWDYVKRPNLRLIGVPESDGENGTKLENTLQDLYQAREALSIRAT

SEQ ID NO: 874612 - protein, 82 aa, Homo sapiens
DRGVYPPGYRSTSSYDKIYNFFPLSGHGEQVRSPPRLLLVGEPYLLSPSVPPIWPQSLRDSGSPNYFSHRKLGSISVQVHLM

SEQ ID NO: 874613 - protein, 160 aa, Homo sapiens
MAAVCVMKDIKPEKISDPSGTGGKILDYWGPSKKLLGDMNFLRDLKEYDKDNIPVTVMQKIRSEYLMNPEFDPPKVAKASSAAEGLCKWIMAMEVYDRVAKVVAPKKARLSEAQKSLAETMELLNQKRAELAEVEHHLENLQMTFLEKTEEKAALEDQVE

SEQ ID NO: 874614 - protein, 109 aa, Homo sapiens
MPRRRVNLSHVLPAWAPCCRGVSATHSAGISGVPGTQTPTRSNRRLPGVHSPGRNPENKRQLPPEDMASSVRQTPSAFPTPLTIRPALLKRGAGLEQSQDTRTRCTQAS

SEQ ID NO: 874615 - protein, 98 aa, Homo sapiens
GRVGSDCCASNQRDSVGVGPSEPEMGSYYIAQAEVQWLLTAVIIMHCSFEFLGLSDLPTLASCVAETTGNKLKEKEETKMGRKCKRGILIYAFFITTV

SEQ ID NO: 874616 - protein, 115 aa, Homo sapiens
APRRFWHFLPLGSEAGPVVDSKEHRVSVLGTGLAPAGLATTQICSLVSSLTCAPQFPPIPLPVTEMIKCLVPCLVHPGSSSRCRSVASLLPPALCPHVHTCPCLAVSSLVGWVRL

SEQ ID NO: 874617 - protein, 139 aa, Homo sapiens
EEPCLPQKEPATDVFTAPNSRAAENGAPDPPEPEPDTALLQARSTAECWPEGGSVPACLPLFRGQTVPASSQPSSHSFQWLRNLPGCPKSKGNNVFVVHKPSAVPSREGSESGPGPSSGSPSEESPPGPGGGLEDALPF

SEQ ID NO: 874618 - protein, 73 aa, Homo sapiens
PFASGNAGCFQGIPLSSDGYWSSLRHLLTSGLFHNVFRAQFSRGACQTLQACLLQWPSFGLSIEELLHPQGEL

SEQ ID NO: 874619 - protein, 35 aa, Homo sapiens
MSQQDDEFAQQDDEVAQQDDEKQDDEFAQQDDEFA

SEQ ID NO: 874620 - protein, 144 aa, Homo sapiens
PFLSLALCRSHVECRPCPWMRLRGSPYLIVSPLALLSLLGLVPAPLGNVLRPSNLEQNNFDSAPFPVQILVLACLWVSLGHCFCCQSASSSWPLAHVLPVCPLSWPLCESFPCPPGLRHPALPPTVCGSPLLAHLTVSPVWEPL

SEQ ID NO: 874621 - protein, 52 aa, Homo sapiens
CDLLSSSPKPGSSCDTLSSSPIPGSSCDLLSSSPNPGFSCDTLSLYPIPGSS

SEQ ID NO: 874622 - protein, 106 aa, Homo sapiens
GPFSGVLKHCCGVCLLCTREGMGRVAVCSTAHGQPFAYGVYCCGVPFLTIITPAVLPKLTHGPPAWHHHNCSSVCSLTFSSYWAEKPWRQRLSTHTPPPTSPLGFG

SEQ ID NO: 874623 - protein, 101 aa, Homo sapiens
PLSFFSWDPAWLSWFSGFSGESRGWKPEYGNLDSVSERCCGGSLSLIKLDLFLRERNSRGISRNHDQNRGKWWPHESATKQVTIVKTSAHCCLETGPRLSQ

SEQ ID NO: 874624 - protein, 106 aa, Homo sapiens
TLSQGKQKEKKTSTAGSGRYKSGKKETRQGEKLSYLPMEECGKGLTLVCMLDLSMEQGSPCGPIKCFSFIRLKSTKGKYNAHYFRNILSPAPPSGINSKYTLVDSM

SEQ ID NO: 874625 - protein, 120 aa, Homo sapiens
MALKLEHLLPRTGLQLHDLQTVTSATRPSNWNISSCQISSCMTLKLEHQLLLEYSATRPSNQNSSSPSLQLNDPQARTSAPPQVFSCKTLNLEHQLLPESSAARSSIQNISSSPGLQLQD

SEQ ID NO: 874626 - protein, 134 aa, Homo sapiens
LLNWQAGGWGLQLSLMWLHRGPLRPPGLRWTPWAFLEACSWGPALSLLGSGHSLPGTHEQAAWSRGCGQHGQSPTQKCKSSKEPLAQAPPWDSPAAPPHQGFADVLERPTLEPFGVLAPPVPAAHRSRCWKGSG

SEQ ID NO: 874627 - protein, 243 aa, Homo sapiens
LLNWQAGGWGLQLSLMWLHRGPLRPPGLRWTPWAFLEACSWGPALSLLGSGHSLPGTHEQAAWSRGCGQHGQSPTQKCKSSKEPLAQAPPWDSPAAPPHQGFADVLERPTLEPFGVLAPPVPSALVEVAATSPPQGAPRGILWDRCPQIQVLEGQRVRFPSQPQHPSHLAPRGGCGWRPDSRPLLPTPSGLSSFFPLDAQCWPWRTVSWRMAVGEAVFVPLQHPPLLHGSPIPKLLLSLAVKC

SEQ ID NO: 874628 - protein, 102 aa, Homo sapiens
KLELSLSGGRGIVLFLQTSLSVRSPLNSGIPGPCHLFTIFQNKTTIYLEAISNLITYNISGLALFPDSRLEHSATFLVIPAWKFTLNMPKLKCPVFPHRETC

SEQ ID NO: 874629 - protein, 95 aa, Homo sapiens
PQRERVRQGEETDRGKERERERQRQRQRKEQREKQKEREGEKDTKEKQKEKHTETKEETKTRKQEEKWREWEKMQNIRDSPGGRGPKFLGKAVLF

SEQ ID NO: 874630 - protein, 119 aa, Homo sapiens
AAEKGAVWVSLGSTLTAFALWPLKHKMQTTSLSAREMEQGLKNPEISDQVEASLTHWMTWGKSIHLSEPQAPVHVECDESWSVVSQGFSKLSASDIQGSCAHILEEIHIMNWFELPSAH

SEQ ID NO: 874631 - protein, 67 aa, Homo sapiens
AQLTSRFMLLHPVSRSMPSDTARTVMVLLFHIYDELQEWGRTEDLDLPCDSAKGANVVLLRPSTCQD

SEQ ID NO: 874632 - protein, 147 aa, Homo sapiens
ARGRALGSNDPMQSILNSLEQQHEEEKRSALGGQRLMYEHELEQLRRRLSPEKQNCRSMDRFSFHSPSAQQRLRQWAEEREATLNNSLMRLREQIVKANLLVREANYIAEELDKRTEYKVTLQIPASSLDANRKRGSLLSEPAIQVR

SEQ ID NO: 874633 - protein, 145 aa, Homo sapiens
MCFGKPLCPASAQKTQCHLLLLFLCHSRTFSRSEPPPASVRARPLSWQLIRRRAPDSFPAGPRARPGPMMEGGHQPRACPSRRDSPGPGGGDPWKSPLFPAPDSGSEILRSQAPVLQAEAGPPSGRSRDSCPWPSMRGRCVESPG

SEQ ID NO: 874634 - protein, 168 aa, Homo sapiens
HKCPECGKRFLRSSDLYRHQRLHTGERPYECTVCKKRFTRRSHLIGHQRTHSEEETYKCLECGKSFCHGSSLKRHLKTHTGEKPHRCHNCGKSFSRLTALTLHQRTHTEERPFKCNYCGKSFRQRPSLVIHLRIHTGEKPYKCTHCSKSFRQRAGLIMHQVTHFRGLI

SEQ ID NO: 874635 - protein, 57 aa, Homo sapiens
MAGGGPAVLSAPEQKSPLEGNLPAVSSILSPPLRDLGRAVWWHLKLESVSFFPTAPP

SEQ ID NO: 874636 - protein, 123 aa, Homo sapiens
TLGACMWQERGPAPLRLQHPSPLTVYLPCHATHKAVHRRQDIHQAATTASPHRPNTQQRAKPSRNTCMLTHARTHMHTHAHPHMHIHARSHTCTLTNMHTCAHTHAHTCTHALTQCSHACTHM

SEQ ID NO: 874637 - protein, 411 aa, Homo sapiens
  misc_feature (32)..(32): Xaa can be any naturally occurring amino acid
  misc_feature (216)..(217): Xaa can be any naturally occurring amino acid
MWAPRCRRFWSRWEQVAALLLLLLLLGVPPLXLALPPIRYSHAGICPNDMNPNLWVDAQSTCRRECETDQECETYEKCCPNVCGTKSCVAARYMDVKGKKGPVGMPKEATCDHFMCLQQGSECDIWDGQPVCKCKDRCEKEPSFTCASDGLTYYNRCYMDAEACSKGITLAVVTCRYHFTWPNTSPPPPETTMHPTTASPETPELDMAAPALLNNXXVHQSVTMGETVSFLCDVVGRPRPEITWEKQLEDRENVVMRPNHVRGNVVVTNIAQLVIYNAQLQDAGIYTCTARNVAGVLRADFPLSVVRGHQAAATSESSPNGTAFPAAECLKPPDSEDCGEEQTRWHFDAQANNCLTFTFGHCHRNLNHFETYEACMLACMSGPLAACSLPALQGPCKAYAPRWAYNSQTGQ

SEQ ID NO: 874638 - protein, 108 aa, Homo sapiens
WLSSNSVPTLSSRRCLPQLEGLVRKTAPCHTSHKPKPLELLINWLQVGVPMTPSLGSTNLLKQLTELRELTYVYRFIIKDIAEDTGEEMHRVKYGKTGMELPCPPRGH

SEQ ID NO: 874639 - protein, 481 aa, Homo sapiens
TQETPLKPVSQLPGPAGAPTGRRGQAEDPGSVMASALRPPRVPKPKGVLPSHYYESFLEKKGPCDRDYKKFWAGLQGLTIYFYNSNRDFQHVEKLNLGAFEKLTDEIPWGSSRDPGTHFSLILRNQEIKFKVETLECREMWKGFILTVVELRVPTDLTLLPGHLYMMSEVLAKEEARRALETPSCFLKVSRLEAQLLLERYPECGNLLLRPSGDGADGVSVTTRQMHNGTHVVRHYKVKREGPKYVIDVEQPFSCTSLDAVVNYFVSHTKKALVPFLLDEDYEKVLGYVEADKENGENVWVAPSAPGPGPAPCTGGPKPLSPASSQDKLPPLPPLPNQEENYVTPIGDGPAVDYENQDVASSSWPVILKPKKLPKPPAKLPKPPVGPKPVEKGFHHVAQAGLELLTSSDPPTSASQSAGITGVSHHTWPHLSSLPEPKVFNGGLGRKLPVSSAQPLFPTAGLADMTAELQKKLEKRRALEH

SEQ ID NO: 874640 - protein, 354 aa, Homo sapiens
TQETPLKPVSQLPGPAGAPTGRRGQAEDPGSVMASALRPPRVPKPKGVLPSHYYESFLEKKGPCDRDYKKFWAGLQGLTIYFYNSNRDFQHVEKLNLGAFEKLTDEIPWGSSRDPGTHFSLILRNQEIKFKVETLECREMWKGFILTVVELRVPTDLTLLPGHLYMMSEVLAKEEARRALETPSCFLKVSRLEAQLLLERYPECGNLLLRPSGDGADGVSVTTRQMHNGTHVVRHYKVKREGPKYVIDVEQPFSCTSLDAVVNYFVSHTKKALVPFLLDEDYEKVLGYVEADKENGENVWVAPSAPGPEPKVFNGGLGRKLPVSSAQPLFPTAGLADMTAELQKKLEKRRALEH

SEQ ID NO: 874641 - protein, 390 aa, Homo sapiens
TQETPLKPVSQLPGPAGAPTGRRGQAEDPGSVMASALRPPRVPKPKGVLPSHYYESFLEKKGPCDRDYKKFWAGLQGLTIYFYNSNRDFQHVEKLNLGAFEKLTDEIPWGSSRDPGTHFSLILRNQEIKFKVETLECREMWKGFILTVVELRVPTDLTLLPGHLYMMSEVLAKEEARRALETPSTHVVRHYKVKREGPKYVIDVEQPFSCTSLDAVVNYFVSHTKKALVPFLLDEDYEKVLGYVEADKENGENVWVAPSAPGPGPAPCTGGPKPLSPASSQDKLPPLPPLPNQEENYVTPIGDGPAVDYENQDVASSSWPVILKPKKLPKPPAKLPKPPVGPKPEPKVFNGGLGRKLPVSSAQPLFPTAGLADMTAELQKKLEKRRALEH

SEQ ID NO: 874642 - protein, 435 aa, Homo sapiens
TQETPLKPVSQLPGPAGAPTGRRGQAEDPGSVMASALRPPRVPKPKGVLPSHYYESFLEKKGPCDRDYKKFWAGLQGLTIYFYNSNRDFQHVEKLNLGAFEKLTDEIPWGSSRDPGTHFSLILRNQEIKFKVETLECREMWKGFILTVVELRVPTDLTLLPGHLYMMSEVLAKEEARRALETPSCFLKVSRLEAQLLLERYPECGNLLLRPSGDGADGVSVTTRQMHNGTHVVRHYKVKREGPKYVIDVEQPFSCTSLDAVVNYFVSHTKKALVPFLLDEDYEKVLGYVEADKENGENVWVAPSAPGPGPAPCTGGPKPLSPASSQDKLPPLPPLPNQEENYVTPIGDGPAVDYENQDVASSSWPVILKPKKLPKPPAKLPKPPVGPKPEPKVFNGGLGRKLPVSSAQPLFPTAGLADMTAELQKKLEKRRALEH

SEQ ID NO: 874643 - protein, 435 aa, Homo sapiens; identical to SEQ ID NO: 874642

SEQ ID NO: 874644 - protein, 410 aa, Homo sapiens
TQETPLKPVSQLPGPAGAPTGRRGQAEDPGSVMASALRPPRVPKPKGVLPSHYYESFLEKKGPCDRDYKKFWAGLQGLTIYFYNSNRDFQHVEKLNLGAFEKLTDEIPWGSSRDPGTHFSLILRNQEIKFKVETLECREMWKGFILTVVELRVPTDLTLLPGHLYMMSEVLAKEEARRALETPSCFLKVSRLEAQLLLERYPECGNLLLRPSGDGADGVSVTTRQMHNGTHVVRHYKVKREGPKYVIDVEQPFSCTSLDAVVNYFVSHTKKALVPFLLDEDYEKVLGYVEADKENGENVWVAPSAPGPGPAPCTGGPKPLSPASSQDKLPPLPPLPNQEENYVTPIGDGPAVDYENQDVASSSWPVILKPKKLPKPPAKLPKPPVGPKPGLADMTAELQKKLEKRRALEH

SEQ ID NO: 874645 - protein, 242 aa, Homo sapiens
MSSYFVNPLFSKYKAGESLEPAYYDCRFPQSVGRSHALVYGPGGSAPGFQHASHHVQDFFHHGTSGISNSGYQQNPCSLSCHGDASKFYGYEALPRQSLYGAQQEASVVQYPDCKSSANTNSSEGQGHLNQNSSPSLMFPWMRPHAPGRRSGRQTYSRYQTLELEKEFLFNPYLTRKRRIEVSHALGLTERQVKIWFQNRRMKWKKENNKDKLPGARDEEKVEEEGNEEEEKEEEEKEENKD

SEQ ID NO: 874646 - protein, 92 aa, Homo sapiens
TGCQVGMNDDIRDSDLPDWRDRTPWCLEISWTTVSSQSCSPLLTSPRLENCQPAIFDGRLLEEMDNEKRIRLLAVCHWYLTCACRGMCGTHR

SEQ ID NO: 874647 - protein, 68 aa, Homo sapiens
RSPMSWVQVGPRNTPMVGSAFAGSHPAAVLTGVEAEGQALTVDTHALCDQQVDWPADCLTQMTDRQTD

SEQ ID NO: 874648 - protein, 108 aa, Homo sapiens
IECSGTISAHCNLRLLGSSNSPASASQIAGITGASHHAQLIFVFLVETVFHHVSQAGLKVLTSSDPPALASQSAGNTGKSHTVPSLRALSSDLSFPLLLKLLYPEAEA

SEQ ID NO: 874649 - protein, 219 aa, Homo sapiens
FEADIDATTTETYMGEWKNDKRSGFGVSERSSGLRYEGEWLDNLRHGYGCTTLPDGHREEGKYRHNVLVKDTKRRMLQLKSNKVRQKVEHSVEGAQRAAAIARQKAEIAASRTSHAKAKAEAAEQAALAANQESNIARTLARELAPDFYQPGPEYQKRRLLQEILENSESLLEPPDRGAGAAGLPQPPRESPQLHERETPRPEGGSPSPAGTPPQPKRP

SEQ ID NO: 874650 - protein, 79 aa, Homo sapiens
DHTDVLGLQRASTDVRALCACCLYTRLVSWTLKTGQGVVCVIRSAEHSLLKMWFECFLQGHMCLIPDRQEPPGGCLLFV

SEQ ID NO: 874651 - protein, 118 aa, Homo sapiens
MVKRHSLSSGRVSRSASLSSYPLSRSLWIISFTDPVLERRGIALSRTVRECQELLDLRLRGWVFLYLMCTKFPASSCQEFKGVRIIDHIAIIEAAPDTVLRASYALPQRSCSRGTPVV

SEQ ID NO: 874652 - protein, 118 aa, Homo sapiens; identical to SEQ ID NO: 874651

SEQ ID NO: 874653 - protein, 88 aa, Homo sapiens
SCRPQIHGPPTTCILSGEESQALSTSRGPEGSRGHKPCKATGAKLPKALGAQPSHPCALDVGQGFKKGDFGAVGLNDWPFGFGVSWDR

SEQ ID NO: 874654 - protein, 154 aa, Homo sapiens
MTHCCSPCCQPTCCRTTCCRTTCWKPTTVTTCSSTPCCQPSCCVSSCCQPCCRPTCCQNTCCQPTCVTSCCQPSCCSTPCCQPTCCGSSCDQSSSCAPVYCRRTCYYPTTVCLPGCLNQSCGSNCCQPCCRPACCETTCFQPTCVYSCCQPFCC

SEQ ID NO: 874655 - protein, 78 aa, Homo sapiens
PVVEPRRGPWLGVAFQISRLLFPTDSVVWTLPRESGAPEGGGAGLPGASVALHPRASTSVAAVGGCMLCQADGWPRGT

SEQ ID NO: 874656 - protein, 85 aa, Homo sapiens
QSPNSAQSPNSAQSPNSAQSPNSAQSPNSAQSPNSAQSPNSAQSPNTALSLRNQSFSELMISPLHSSLGDRVPGVLSGCSPRMPG

SEQ ID NO: 874657 - protein, 54 aa, Homo sapiens
DTAKPYHWVSKRAAKCNSQSLHFKDKVIKTCAFGTSFLPLVHDTQLVFCSFYSF

SEQ ID NO: 874658 - protein, 103 aa, Homo sapiens
PSLPGSTNSPHLSFPSSWDHRCPPPSLANFKNFLEMESCHVAQDGLELLGSSNPPASTSQSARIIGVSHCTQLQVAFLILPVIREGGRWIEPETSFSFSAGAE

SEQ ID NO: 874659 - protein, 823 aa, Homo sapiens
MKRHRPVSSSDSSDESPSTSFTSGSMYRIKSKIPNEHKKPAEVFRKDLISAMKLPDSHHINPDSYYLFADTWKEEWEKGVQVPASPDTVPQPSLRIIAEKVKDVLFIRPRKYIHCSSPDTTEPGYINIMELAASVCRYDLDDMDIFWLQELNEDLAEMGCGPVDENLMEKTVEVLERHCHENMNHAIETEEGLGIEYDEDVICDVCRSPDSEEGNDMVFCDKCNVCVHQACYGILKVPEGSWLCRSCVLGIYPQCVLCPKKGGALKTTKTGTKWAHVSCALWIPEVSIACPERMEPITKISHIPPSRWALVCNLCKLKTGACIQCSIKSCITAFHVTCAFEHGLEMKTILDEGDEVKFKSYCLKHSQNRQKLGEAEYPHHRAKEQSQAKSEKTSLRAQKLRELEEEFYSLVRVEDVAAELGMPTLAVDFIYNYWKLKRKSNFNKPLFPPKEDEENGLVQPKEESIHTRMRMFMHLRQDLERVRNLCYMISRREKLKLSHNKIQEQIFGLQVQLLNQEIDAGLPLTNALENSLFYPPPRITLKLKMPKSTPEDHRNSSTETDQQPHSPDSSSSVHSIRNMQVPQESLEMRTKSYPRYPLESKNNRLLASLSHSRSEAKESSPAWRTPSSECYHGQSLGKPLVLQAALHGQSSIGNGKSQPNSKFAKSNGLEGSWSGNVTQKDSSSEMFCDQEPVFSPHLVSQGSFRKSTVEHFSRSFKETTNRWVKNTEDLQCYVKPTKNMSPKEQFWGRQVLRRSAGRAPYQENDGYCPDLELSDSEAESDGNKEKVRVRKDSSDRENPPHDSRRDCHGKSKTHPLSHSSMQR

SEQ ID NO: 874660 - protein, 107 aa, Homo sapiens
EAGTGKGPQAPEAGLGRLQSPVIHGSSSLSLHRPVRSFLGRQDTLQREPSDELVRPLVGTSIAWVSAEPLALSPVSRGGSPLGPSIPTAAGAGAFPALQVDIACFLT

SEQ ID NO: 874661 - protein, 70 aa, Homo sapiens
MQGWLSSTAGRAPRKDSAAAVSKPAAGGTQRDPLLDIPAGQRSLGDETGDGAAVPAAPSGDITGVLPDLT

SEQ ID NO: 874662 - protein, 74 aa, Homo sapiens
EIFYSLGFLDSNCPWFLCYLPDYSSVSIIDSVPQSALLNVAVRCSVRGLCCSLNVSPPKSKYWKLNPQCNSVET

SEQ ID NO: 874663 - protein, 39 aa, Homo sapiens
MCSVKLLLCAPRGLRILTLFVSPRTLRVCTGPFSERCPD

SEQ ID NO: 874664 - protein, 116 aa, Homo sapiens
RSDERMPVKDWARFWHIVVKAPQEAGGGAGLTPTQGSIFPPIIFFLVLILHCCHRWGLRSRTCLQKPHSLCPLPGLYPSLPQTAWSWCIWTVAAGTCVRAVSQVIFFFKNNVCLFF

SEQ ID NO: 874665 - protein, 117 aa, Homo sapiens
SEFGNKKYGSNKVGVGVVATGATGRSAQWEEFCLLSKGEEGRPLPQWHPMALTSLSDACWYTKLDVAEWDVRWEALRGSPGGHVAAIRAFWWQHQGHISNRPRGGHCTSHWTVRENT

SEQ ID NO: 874666 - protein, 86 aa, Homo sapiens
ASLGCGSTWSCSHLAAARPPGSRASTLHPSPSLPPAFAPAPPEHSPSWQPCAQMHVQQPLPAHRDTGPMPVHVEQPVNYRANKQAS

SEQ ID NO: 874667 - protein, 122 aa, Homo sapiens
MPLLSSMRGCIWEMQVDTHSRFLKWDTVVELILCFSPCHRAPTLTCGFLGELRMDTLLGCELCMMAIVRSGWAQPEPMELAKRKDRTEFLGSPTAAVYHRVPLSSPLLGLNQTDQVHLGQSS

SEQ ID NO: 874668 - protein, 69 aa, Homo sapiens
PALPPPVPENALSQCYIPTHNRTHTRHVPFLHLSWRMHIPSAEMLPSLFCYICSFRKVLDLCEGWFGEE

SEQ ID NO: 874669 - protein, 261 aa, Homo sapiens
SDCSLRHSRGFHSWTRPPPLGLASKPPQLSALEGAQRRETSPFRTTPPLQVASSDRKAGGGETQRNRGRRDRRGARCSGEREAQTRQPRTESHPALIVTKQREAREHVAGTERTSGNEKRTDGRENNARTDGDGRRAQAAQPTRRTSLQRHRTVLTSLLRQSDEESIGSGLTSEELRPAPRNDETPAHAKTRAEASVPPERGQDQGSKRYTQHLIHIKPQKYQFTMNHYYMKITDPVLERPKIGHHITLASEYTKLFTSTS

SEQ ID NO: 874670 - protein, 155 aa, Homo sapiens
MDFSTPSVFDQQRGDSSEEVDLTMVYQAASNGDVNALTAVIREDPSILECCDSEGCTPLMHAVSGRQADTVKLLLKMGANINMQDAYGRTSLCLATYLGWLEGCVSLLRNGAKHNIPDKNGRLPLHAATAEPDMRLLTVLLQQSNISEINHQDNE

SEQ ID NO: 874671 - protein, 40 aa, Homo sapiens
MPPSPHSFRTLAKSPRAAAAQGLTRTASHWPLPSQKSVPG

SEQ ID NO: 874672 - protein, 321 aa, Homo sapiens
RECVYFLPFFIRAPKISRNGQWLFTFTTPFPFANKALPGWEGIVPACFWRKKILTPSTGTMELLQVTILFLLPSICSSNSTGVLEAANNSLVVTTTKPSITTPNTESLQKNVVTPTTGTTPKGTITNELLKMSLMSTATFLTSKDEGLKATTTDVRKNDSIISNVTVTSVTLPNAVSTLQSSKPKTETQSSIKTTEIPGSVLQPDASPSKTGTLTSIPVTIPENTSQSQVIGTEGGKNASTSATSRSYSSIILPVVIALIVITLSVFVLVGLYRMCWKADPGTPENGNDQPQSDKESVKLLTVKTISHESGEHSAQGKTKN

SEQ ID NO: 874673 - protein, 321 aa, Homo sapiens; identical to SEQ ID NO: 874672

SEQ ID NO: 874674 - protein, 321 aa, Homo sapiens; identical to SEQ ID NO: 874672

SEQ ID NO: 874675 - protein, 321 aa, Homo sapiens; identical to SEQ ID NO: 874672

SEQ ID NO: 874676 - protein, 321 aa, Homo sapiens; identical to SEQ ID NO: 874672

SEQ ID NO: 874677 - protein, 190 aa, Homo sapiens
MSLMSTATFLTSKDEGLKATTTDVRKNDSIISNVTVTSVTLPNAVSTLQSSKPKTETQSSIKTTEIPGSVLQPDASPSKTGTLTSIPVTIPENTSQSQVIGTEGGKNASTSATSRSYSSIILPVVIALIVITLSVFVLVGLYRMCWKADPGTPENGNDQPQSDKESVKLLTVKTISHESGEHSAQGKTKN

SEQ ID NO: 874678 - protein, 238 aa, Homo sapiens
RECVYFLPFFIRAPKISRNGQWLFTFTTPFPFANKALPGWEGIVPACFWRKKILTPSTGTMELLQVTILFLLPSICSSNSTGVLEAANNSLVVTTTKPSITTPNTESLQKNVVTPTTGTTPKGTITNELLKMSLMSTATFLTSKDEGLKATTTDVRKNDSIISNVTVTSVTLPNAVSTLQSSKPKTETQSSIKTTEIPGTPENGNDQPQSDKESVKLLTVKTISHESGEHSAQGKTKN

SEQ ID NO: 874679 - protein, 201 aa, Homo sapiens
RECVYFLPFFIRAPKISRNGQWLFTFTTPFPFANKALPGWEGIVPACFWRKKILTPSTGTMELLQVTILFLLPSICSSNSTGVLEAANNSLVVTTTKPSITTPNTESLQKNVVTPTTGTTPKGTITNELLKMSLMSTATFLTSKDEGLKATTTDVRKNDSIISNVTVTSVTLPNAVSTLQSSKPKKVVFYNQMHHLLKLVH

SEQ ID NO: 874680 - protein, 73 aa, Homo sapiens
MANVLMTLMTEEKTQTQRRNQCEDQAEIRMTWLQTEDAVDHQKLEEANNGFSLDLLAGVLWPCPHVHLRLMAS

SEQ ID NO: 874681 - protein, 107 aa, Homo sapiens
MVGGQLQAFWKHGVQVWALGSDQHAYEEHERPLPLYITSRAVDRPKVRELILMLRASQVAWVYGACSGGDTALVEVILRVSQLDLLHPGMSPWGVSGRLVLGPRLPP

SEQ ID NO: 874682 - protein, 120 aa, Homo sapiens
SGSSSLCLRCNSQDGFVGAWGFPFSLMGHGHRGEDSGPEDNTFPNPGIGTFLGQGCQCPRGDMGTEKQGERREPLGADPAPPLIFPTASPGGSSCFPLGGEERDVRKSSSRLHPRAPTLI

SEQ ID NO: 874683 - protein, 273 aa, Homo sapiens
MNWSIFEGLLSGVNKYSTAFGRIWLSLVFIFRVLVYLVTAERVWSDDHKDFDCNTRQPGCSNVCFDEFFPVSHVRLWALQLILVTCPSLLVVMHVAYREVQEKRHREAHGENSGRLYLNPGKKRGGLWWTYVCSLVFKASVDIAFLYVFHSFYPKYILPPVVKCHADPCPNIVDCFISKPSEKNIFTLFMVATAAICILLNLVELIYLVSKRCHECLAARKAQAMCTGHHPHGTTSSCKQDDLLSGDLIFLGSDSHPPLLPDRPRDHVKKTIL

SEQ ID NO: 874684 - protein, 273 aa, Homo sapiens; identical to SEQ ID NO: 874683

SEQ ID NO: 874685 - protein, 273 aa, Homo sapiens; identical to SEQ ID NO: 874683

SEQ ID NO: 874686 - protein, 155 aa, Homo sapiens
AVVSTQSAHYGRGKLLQPRCCAVGKGEGFVNPGARFCLPEAAAVRRPPGEATVIMSDQEAKPSTEDLGDKKEGEYIKLKVIGQDSSEIHFKVKMTTHLKKLKESYCQRQGVPMNSLRFLFEGQRIADNHTPKELGMEEEDVIEVYQEQTGGHSTV

SEQ ID NO: 874687 - protein, 155 aa, Homo sapiens; identical to SEQ ID NO: 874686

SEQ ID NO: 874688 - protein, 155 aa, Homo sapiens; identical to SEQ ID NO: 874686

SEQ ID NO: 874689 - protein, 155 aa, Homo sapiens; identical to SEQ ID NO: 874686

SEQ ID NO: 874690 - protein, 155 aa, Homo sapiens; identical to SEQ ID NO: 874686

SEQ ID NO: 874691 - protein, 127 aa, Homo sapiens
AVVSTQSAHYGRGKLLQPRCCAVGKGEGFVNPGARFCLPEAAAVRRPPGEATVIMSDQESLNPESLVRRHGEKWSQAHTMMADKGREADNLFFLRRSLALSPSLECSGAISTRCNLRLPGSRGKTFN

SEQ ID NO: 874692 - protein, 130 aa, Homo sapiens
AVVSTQSAHYGRGKLLQPRCCAVGKGEGFVNPGARFCLPEAAAVRRPPGEATVIMSDQDSSEIHFKVKMTTHLKKLKESYCQRQGVPMNSLRFLFEGQRIADNHTPKELGMEEEDVIEVYQEQTGGHSTV

SEQ ID NO: 874693 - protein, 155 aa, Homo sapiens; identical to SEQ ID NO: 874686

SEQ ID NO: 874694 - protein, 183 aa, Homo sapiens
AVVSTQSAHYGRGKLLQPRCCAVGKGEGFVNPGARFCLPEAAAVRRPPGEATVIMSDQEAKPSTEDLGDKKEGEYIKLKVIGQDSSEIHFKVKMTTHLKKLKESYCQRQGVPMNSLRFLFEGQRIADNHTPKEGGSFNSLDILFIFFLFPQSFFIFKNSSFVTVVFKTGIENWHPISLKHLVI

SEQ ID NO: 874695 - protein, 131 aa, Homo sapiens
AVVSTQSAHYGRGKLLQPRCCAVGKGEGFVNPGARFCLPEAAAVRRPPGEATVIMSDQEAKPSTEDLGDKKEGEYIKLKVIGQDSSEIHFKVKMTTHLKKLKESYCQRQLGMEEEDVIEVYQEQTGGHSTV

SEQ ID NO: 874696 - protein, 143 aa, Homo sapiens
SSGINAECPLRPGGEGFVNPGARFCLPEAAAVRRPPGEATVIMSDQEAKPSTEDLGDKKEGEYIKLKVIGQDSSEIHFKVKMTTHLKKLKESYCQRQGVPMNSLRFLFEGQRIADNHTPKELGMEEEDVIEVYQEQTGGHSTV

SEQ ID NO: 874697 - protein, 155 aa, Homo sapiens; identical to SEQ ID NO: 874686

SEQ ID NO: 874698 - protein, 213 aa, Homo sapiens
  misc_feature (111)..(111): Xaa can be any naturally occurring amino acid
AVVSTQSAHYGRGKLLQPRCCAVGKGEGFVNPGARFCLPEAAAVRRPPGEATVIMSDQEAKPSTEDLGDKKEGEYIKLKVIGQDSSEIHFKVKMTTHLKKLKESYCQRQFXTGQRQAGWFPQSFGKKFFSQKIFSPKKGGGIFNVSNKKSFHTNYFKVKNCGGGKKKEGGEEERGGFFPQKKRGGKKRGGAQIRKYFFEKRGGGKKYILGGEK

SEQ ID NO: 874699 - protein, 155 aa, Homo sapiens; identical to SEQ ID NO: 874686

SEQ ID NO: 874700 - protein, 155 aa, Homo sapiens; identical to SEQ ID NO: 874686

SEQ ID NO: 874701 - protein, 143 aa, Homo sapiens; identical to SEQ ID NO: 874696

SEQ ID NO: 874702 - protein, 155 aa, Homo sapiens; identical to SEQ ID NO: 874686

SEQ ID NO: 874703 - protein, 155 aa, Homo sapiens; identical to SEQ ID NO: 874686

SEQ ID NO: 874704 - protein, 112 aa, Homo sapiens
AVVSTQSAHYGRGKLLQPRCCAVGKGEGFVNPGARFCLPEAAAVRRPPGEATVIMSDQEAKPSTEDLGDKKEGEYIKLKVIGQDSSEIHFKVKMTTHLKKLKESYCQRQVSL

SEQ ID NO: 874705 - protein, 155 aa, Homo sapiens; identical to SEQ ID NO: 874686

SEQ ID NO: 874706 - protein, 155 aa, Homo sapiens; identical to SEQ ID NO: 874686

SEQ ID NO: 874707 - protein, 155 aa, Homo sapiens; identical to SEQ ID NO: 874686

SEQ ID NO: 874708 - protein, 176 aa, Homo sapiens
AVVSTQSAHYGRGKLLQPRCCAVGKGEGFVNPGARFCLPEAAAVRRPPGEATVIMSDQEAKPSTEDLGDKKEGEYIKLKVIGQDSSEIHFKGVPMNSLRFLFEGQRIADNHTPKETGDLGWGADLTSVGLEPRPGVYSTGNPTFLLTGFIGNRFVFFLVAPRETVFKAAFLTFSGT

SEQ ID NO: 874709 - protein, 146 aa, Homo sapiens
DEIHGKNVGLEGGHECKFWICSLLLCDLGQLTFFEPWFLLRMGVTPSMIVVKIKYNEDVTAWSLINCHNMLRHIVSTYVTYVETICETESHSAPQAGVQWCDLGSLQPLPPGFKPFFCLSLPSSWDYRHLPPHPDNFCIFSRDGIS

SEQ ID NO: 874710 - protein, 108 aa, Homo sapiens
PPASLWVSATSFQAGSKQLPLTPKLCFQSHLEIGINRPGFWILGKGSWWPSLDSCPSLDQDLGHFGCLPIPNLRWSGTGLVEDVSFPSNHNVRVSEGAFLEKRGRDIW

SEQ ID NO: 874711 - protein, 76 aa, Homo sapiens
AAAYYYYYCSEFKLLTMYGVMPDLMKTPLKNQPSSSPKPISKLLYLHKQYLEPWIPKIHIIASGEWLFCPLCWNNK

SEQ ID NO: 874712 - protein, 33 aa, Homo sapiens
NSEESPVLPRSPSETELYCLWQWPHLSALILAF

SEQ ID NO: 874713 - protein, 52 aa, Homo sapiens
MREKGSVPRPLFGLQVAVLSLSLHIVFPLYLSVATVVLLIRIRSHWIQPTLM

SEQ ID NO: 874714 - protein, 34 aa, Homo sapiens
MCLFPLLACEPPENRDGDLSTEATTVSPAPAQHP

SEQ ID NO: 874715 - protein, 75 aa, Homo sapiens
QCKLSMRPWGADPEAPAELHVVDKGLYCSMPGTLSSGPRQRGPQRSNSRGHSGAPGTRPVPFTVFLTGALTPAAG

SEQ ID NO: 874716 - protein, 115 aa, Homo sapiens
MHTCTCAQLTNKHICTHMQYTHMQTGRCTGMGTHAQGMHVQVCRHTHLHAHTRTCTCTHTSAHRHQRHTCSCTRIHTDMHTYACTRHDRMAREQPCTWSLFCVYREPAPLTVCMT

SEQ ID NO: 874717 - protein, 166 aa, Homo sapiens
YWPSSVSRGFCPEAVCSLSVLEVLLLVSGWPAQSLTLRRAQSYFQSLLCSFSLCKFPGVETAPARQGTAFYCFENESQLWAFRLGIWCGSSGRPIAGPLGELCVGSAPGPAAPGSKHSPKTMLPCTVLGQPSKRWLAEGAQCVTNMCKTVPYLWWKQRALKGPRGQ

SEQ ID NO: 874718 - protein, 153 aa, Homo sapiens
TLLGTKSRSGQWHVTSELLTGAKHSTATVDVAWAQSTPLPPREGQGPLEILQLDFEMENFTSQSVKRRIMWHIDYRGHGALPDLERAVTELTVIQRDVQAILPLAMDTEIINTAILTGRTVAIPVKVIAIEVNGLVLDISALVECESDNEDII

SEQ ID NO: 874719 - protein, 46 aa, Homo sapiens
PIWSASPPRAPRSSTPCPGGAVREDTYPVGTQGVPSPALAQGGPQG

SEQ ID NO: 874720 - protein, 206 aa, Homo sapiens
MAANYSSTSTRREHVKVKTSSQPGFLERLSETSGGMFVGLMAFLLSFYLIFTNEGRALKTATSLAEGLSLVVSPDSIHSVAPENEGRLVHIIGALRTSKLLSDPNYGVHLPAVKLRRHVEMYQWVETEESREYTEDGQVKKETRYSYNTEWRSEIINREKLRPRDWPQKPQGHGKRRSIMATRPFVQWKFPLVGSSQGEKQSRPST

SEQ ID NO: 874721 - protein, 107 aa, Homo sapiens
MAANYSSTSTRREHVKVKTSSQPGFLERLSETSGGMFVGLMAFLLSFYLIFTNEGRALKTATSLAEGRNSEIEEAMEPVSHAFVSFPKKNVFSCTGSHCLHFTLPQL

SEQ ID NO: 874722 - protein, 147 aa, Homo sapiens
MFVGLMAFLLSFYLIFTNEGRALKTATSLAEGLSLVVSPDSIHSVAPENEGRLVHIIGALRTSKLLSDPNYGVHLPAVKLRRHVEMYQWVETEESREYTEDGQVKKETRYSYNTEWRSEIINRKNFDREIGHKNPSAMAVESFMATA

SEQ ID NO: 874723 - protein, 35 aa, Homo sapiens
FHPLSDGDGVSAPLSDGERVSTPLSGGERVSTPLS

SEQ ID NO: 874724 - protein, 135 aa, Homo sapiens
LSAFEYPGPKRKLYSAVPGRLFVAVKPYQPQVDGEIPLHRGDRVKVLSIGEGGFWEGSARGHIGWFPAECVEEVQCKPRDSQAETRADRSKKLFRHYTVGSYDSFDTSRWNGCEGRGQASHQVARSSKHSRFEFV

SEQ ID NO: 874725 - protein, 149 aa, Homo sapiens
LSAFEYPGPKRKLYSAVPGRLFVAVKPYQPQVDGEIPLHRGDRVKVLSIGEGGFWEGSARGHIGWFPAECVEEVQCKPRDSQAETRADRSKKLFRHYTVGSYDSFDTSRRSLALSPRLECDGAILDGAISAHCNLGLPVSAVLLPQPPE

SEQ ID NO: 874726 - protein, 71 aa, Homo sapiens
LLPDMAAGFPQNKMEATVSLMTYPRKVFLIFATFYLLETNHKVQLHSRQELRSTSRREEYQTIVDMQSCTT

SEQ ID NO: 874727 - protein, 105 aa, Homo sapiens
PRELIGEALPQGSYSSPEQSLICRSVCRHMLGQPGTQPRVWLKFLPSAWDVGVGRRVHSLHILFRHQSRQELDFPGSSPSSHFLICVALSEVLLSEPVSASVKRE

SEQ ID NO: 874728 - protein, 126 aa, Homo sapiens
GAQTCREGEGCGPQVGPWGLPQFVMGARSGGFQEALSNMGVSWRYSASGAGLRGCGQTLWVDTSPSLLDLSHQVLKSRSSIISLLTKFRRLIVYWGKKIKLCRRLTLWLCRGALQGQDPCPPLGHV

SEQ ID NO: 874729 - protein, 69 aa, Homo sapiens
PAGLALSWQLLLGGTKRIHHNTPRAVPWSQPERGNGGNLLFILLISAPVCLLRASMSRPWVQSLKGNSD

SEQ ID NO: 874730 - protein, 73 aa, Homo sapiens
SDYCIKQCKFKKILLEGKEYSIPLILLSLTGFFYSFDFYWAAWFNIKFLFLQLPENTAPLLNSVLLCGRLMLI

SEQ ID NO: 874731 - protein, 229 aa, Homo sapiens
MRQGRSQPTPPGHKKTSTHPESTTESQTKKRHAHENNSTTAALTTHSGQQKKQRAREIPESKHHTGDATQRTHSKHHTQHTHSPAAETITDPRTHSGSHNNEQQQPAQHHARPASDPATNQRVGPAHHHRASAGWREGGGRGEAHGCHERRSREDVETRDGEDHERAPRSHAKQTPGNTTGHASSPRDPQGRRRATTQRDETYTNRTRGERGQQVQLSRAGQTRRVLKQ

SEQ ID NO: 874732 - protein, 139 aa, Homo sapiens
MKLKQKEMQKINETNSWFFEKINKIDRPLARLTKKRRGKIQISSIRNEMGDITTDTTEIQKIIQGYYEHIYVHKLENMEDMDKFLERDNPPSLNQKELETLNRPLTSSEIEMVIKKLPARKSPGPDGFKLNSARHSKKN

SEQ ID NO: 874733 - protein, 102 aa, Homo sapiens
RRPASCLTNKSSFPFKCRPLNTVKGRGGSCFLRRASGSPASLFQWKRGLSVLRNRESADASAMTNFFAAFIAPCKSFCDLSLPFGFTLLTGLGACPQKASSY

SEQ ID NO: 874734 - protein, 120 aa, Homo sapiens
GRTDQDEHDGTRRPLPPPGPSSPDTASKTADGCPCPKSEDPGVVSSLPTPTACAYSVETCGQARGLPGRAWLRSGTREPGQGPASASPAPRYPGTLRTQAPPSPEPSQRDRPTPRTPRGT

SEQ ID NO: 874735 - protein, 456 aa, Homo sapiens
MSHNTQTNIIFHSPGNEMKTKAPPVGEVTVTAADIMAVDVAEYHLSVIKSPPGWEVGVYAAGALALLGIAAVSLWKLWTSGSFPSPSPFPNYDYRYLQQKYGESCAEAREKRVPAWNAQRASTRGPPSRKGSLSIEDTFESISELGPLELMGRELDLAPYGTLRKSQSADSLNSISSVSNTFGQDFTLGQVEVSMEYDTASHTLNVAVMQGKDLLEREEASFESCFMRVSLLPDEQIVGISRIQRNAYSIFFDEKFSIPLDPTALEEKSLRFSVFGIDEDERNVSTGVVELKLSVLDLPLQPFSGWLYLQDQNKAADAVGEILLSLSYLPTAERLTVVVVKAKNLIWTNDKTTADPFVKVYLLQDGRKMSKKKTAVKRDDPNPVFNEAMIFSVPAIVLQDLSLRVTVAESSSDGRGDNVGHVIIGPSASGMGTTHWNQMLATLRRPVSMWHAVRRN

SEQ ID NO: 874736 - protein, 456 aa, Homo sapiens; identical to SEQ ID NO: 874735

SEQ ID NO: 874737 - protein, 73 aa, Homo sapiens
MCRIDQKTKRGFAEIMLSARYLAPKPQEMEAQRASLVASRKGQSFKQGPSNGQLPWPAPGCLQKAWRKAFAKV

SEQ ID NO: 874738 - protein, 111 aa, Homo sapiens
NHPPSLYCCSVCFGQGVGERPCAVGLVACSGTAMGTWQLKTDGSRTKETFALEAQPNSPGHRHRWHLEHGLPQSGGRACVVQRAQPGTKKEMRPLSSMSPCPDTYLGRNFF

SEQ ID NO: 874739 - protein, 30 aa, Homo sapiens
MAAEQKKLLLWKHTHTHTHTLTAENLVPGS

SEQ ID NO: 874740 - protein, 145 aa, Homo sapiens
MLTRLVLSAHLSSTTSPPWTHAAISWELDNVLMPSPRIWPQVTPTGRSASVRSEGNTSSLWNFSAGQDVHAIVTRTCESVLSSAVYTHGCGCVRSATNITCQSSGQQRQAARQEEENSICKAHDSREGRLGYPLSAHQPGSGGPN

SEQ ID NO: 874741 - protein, 265 aa, Homo sapiens
RVPGFGGMQSMPMEVPMNAMQRPVRPGMGWTEDLPPMGGPSNFAQNTMPYPGGQGEAERFMTPRVREELLRHQLLEKRSMGMQRPLGMAGSGMGQSMEMERMMQAHRQMDPAMFPGQMAGGEGLAGTPMGMEFGGGRGLLSPPMGQSGLREVDPPMGPGNLNMNMNVNMNMNMNLNVQMTPQQQMLMSQKMRGPGDLMGPQGLSPEEMARVRAQNSSGVMGGPNKMLTACTALPKSRNSRDPPVDSSWRHMGHLHKANVTTDNGP

SEQ ID NO: 874742 - protein, 110 aa, Homo sapiens
MGPGNLNMNMNVNMNMNMNLNVQMTPQQQMLMSQKMRGPGDLMGPQGLSPEEMARVRAQNSSGVMGGPNKMRLPAQPFPSSRNSRDPPVDSSWRHMGHLHKANVTTDNGP

SEQ ID NO: 874743 - protein, 119 aa, Homo sapiens
TTVQPQLPLCRGHASSPTWPHASLQQPYNVWLIVLITDGHLPKPTSSGSDTAGVQTEPFCPNPMLSTHLCTATPLLPPSALSLIKCFKMKAESTVGLRKHQFSTVKKVSFRKINLNKIL

SEQ ID NO: 874744 - protein, 44 aa, Homo sapiens
MSAHTSHTPCTSHRPLHAQLLHACLTHTLHTCLLHTHLTYRPCT

SEQ ID NO: 874745 - protein, 128 aa, Homo sapiens
RGRRQDGDESVFRLRAGRRPAVQHPPGGRDFGLVIPRCCDSAHDSSWSPLAPRKYLSNDSMNLPPDRPGLLSLSVSPEVETTPPALASGLPCALPWTVGCSGSDAVTALCPSLRGLACICSILWDPAW

SEQ ID NO: 874746 - protein, 75 aa, Homo sapiens
GEDAKMATSQYFDFAQGGGPQYSPEVETTPPALASGLPCALPWTVGCSGSDAVTALCPSLRGLACICSILWDPAW

SEQ ID NO: 874747 - protein, 188 aa, Homo sapiens
CPGDTQFSATSTTVGWCYTLNTLARLFCPSAPRNLARGVVLPTYLSPPPPSGGVFPHKDSSSMQVVSPTNNSVYIHALRLLPFKNNASLLLGPPCAQKKGGPRKMGPPRESIFRAPPPFFFFFFFFVFFFFFFFFCVFLFLHPPLYPCPSHHVLATLPVQKWRPLPRPLHLGFLVPCLGQLAAVEVTL

SEQ ID NO: 874748 - protein, 77 aa, Homo sapiens
MALPMGGHRHLTAVCCSPGVSPGKEVRRQLQPATESVPQEEEVAGSEVPECTALNPGPLALPLAPGTGALMPWPRSF

SEQ ID NO: 874749 - protein, 108 aa, Homo sapiens
NTSSTFSLVSAWFPGEGCLGGAVQFQDAKLKDGDESLNLGNVEKSGEEKLEVLPCIPPPIHVREVPLCLLFFLGLSTTMKNPLGKGIRSLRRSTDLSMSRALQTVISY

SEQ ID NO: 874750 - protein, 107 aa, Homo sapiens [sequence omitted]

SEQ ID NO: 874751 - protein, 45 aa, Homo sapiens
MCGGEALGISARERGHWLEKGLWERWGREPGVDGRRLDGHGVCGR

SEQ ID NO: 874752 - protein, 103 aa, Homo sapiens
MTNVSSNNRTISPLTTRPPFSLISPTLGSHAAPNPARSSPEKHRPFSLSTPPPKNFRCPNTSTLFCFIFLINIRRQECQASEPKLSHRIPCDLHAYISPDGLK

SEQ ID NO: 874753 - protein, 196 aa, Homo sapiens
APALRGHREPAGGRLPRLVGGSGPRTVPGAAIDARGEASRIKILEQNSELPQRVCGWNGLRTLCIAKRVLSKEEYACWLQSHLEAESSLENSEELLFLVCRFAWRPSCHLLGATGIEDRLQDGVPETISKLLSSGPADLGLTGDKQETAVNIAYACKLLDHDEEVITLNASLPGGVCSPARPVPMLRAVQRPPESP

SEQ ID NO: 874754 - protein, 182 aa, Homo sapiens
IHTGEKPYECRECEKAFCCSSHLTPHQRIHTMEKQYECNKCLKVFSSLSFLVQHQSIHTEEKPFECQKCRKSFNQLESLNMHLRNHIRLKCDFYLMNAIYVGKPLVIGHPCFNITEFILERNLTNVLNVGRPSAVVQTLPYIREFILEKSHINVVSVGKLLAKAQILLPIKEYIMERNPIVW

SEQ ID NO: 874755 - protein, 451 aa, Homo sapiens
LCLVRPACLHSCLHHVHQGTQKSYKVSTSGPRAFSSHSYTSGPGAHISSSSFSQVGSSCFRGGLGGGCGGASGMGGITAVTVNQSLLSPLVLEVDPDIQAVCTQEKEQIKTLNNKFASFIDKVRFLEQQNKMLETKWSLLQQQKTAGSNMDNMFKSYINNLRRQLETLGQEKLKLEAELGNMQGLVEDFKNKYEDEINKRTEMENEFVLIKKDVDEAYMNKVELESRLEGLTDEINFLRQLYEEEIRELQSWISDTSVVLSMDNSRSLDMNSVIAEVKAQYEEIANRSQAEAESMYQIKDEELQSLAGKHGDNLRCTKTKISEMNRNISRLQAENEGLKGQRAFLEAAIADAEQCGELAIKDANAKLSELEAALQRAKQDMAWQLREYQELMNVRLALDIEIATYKKLLEGEESRLESGMQNMSIHTKTTSGYASGLSSACGGLTSPGLSY

SEQ ID NO: 874756 - protein, 320 aa, Homo sapiens
RGGRVAAAALRSRWARGDAAAAGSREGRGRMNRAKPTTVRRPSAAAKPSGHPPPGDFIALGSKGQANESKTASTLLKPAPSGLPSERKRDAAAALSSASALTGLTKRPKLSSTPPLSALGRLAEAAVAEKRAISPSIKEPSVVPIEVLPTVLLDEIEAAELEGNDDRIEGVLCGAVKQLKVTRAKPDSTLYLSLMYLAKIKPNIFATEGVIEALCSLLRRDASINFKAKGNSLVSVLACNLLMAAYEEDENWPEIFVKVYIEDSLGERIWVDSPHCKTFVDNIQTAFNTRMPPRSVLLQGEAGRVAGDLGAGSSPHPSLT

SEQ ID NO: 874757 - protein, 42 aa, Homo sapiens
LTISLSVRHSTPHGHSIIPFCMCKCRRPAHTSLRVSWQGHPA

SEQ ID NO: 874758 - protein, 60 aa, Homo sapiens [sequence omitted]

SEQ ID NO: 874759 - protein, 74 aa, Homo sapiens
SGGTQEAAVQGGLCIFWVSSLPPCGWGFRQQPSGLLLWSAGAASRAISPPYLRVLHWPPGRPLLAKAHTAVWGS

SEQ ID NO: 874760 - protein, 107 aa, Homo sapiens
SLCHLDLECSGAISAYCNLCLLGSNDSPISAFQVAGTIGACHHTQLIFVFLVEMGFCPVGQAGLALLTSGDMPASASQSVGITGQRSWPGILFTPHPSKDRQRLLLI

SEQ ID NO: 874761 - protein, 67 aa, Homo sapiens
TDQYEPKDIIYLICTKFMTVIFFTIFEPGLAVSPKVERRGVIRIHCNYKLLDSKQSSHLSLPRQLGL

SEQ ID NO: 874762 - protein, 75 aa, Homo sapiens
SSSAIPHVNVFYVWPKTILLPVWPREAKRLDTPGPGHVALLHSPFTRHLQDSCKTAAHCSLGVISTAHSTVQHTA

SEQ ID NO: 874763 - protein, 111 aa, Homo sapiens
GIWDCHCVVAQVASNSRNYFNLKHRSGCGNQLEKDFSSPKTKAGGCGSRCRGEDGKHQLSIALVVENREMVKKRAPLKGWDPKDGGGVERKTLLHKENLSLGCVHCTWVPY

SEQ ID NO: 874764 - protein, 75 aa, Homo sapiens
MTKKRRNNGRAKKGRGHVQPIRCTNCARCMPKDKAIKKFVIRNIVEAAAVRDISEASIFDAYLLPKLYVKLHYCV

SEQ ID NO: 874765 - protein, 58 aa, Homo sapiens
MEAEVREQAKQRQMRIGNEVYVGTKMQVFVKKKKLCKARIESRLHSQQPIFFFQISTW

SEQ ID NO: 874766 - protein, 97 aa, Homo sapiens
RLGLHVPWNWQELGTGRSLSHSESGWQLPACRCSCPSHGCGPRHPCALGAWEQVGTPPSQVQLQPPKPQLQTGASRSTEQAGVLPHIPHSCTGPNCH

SEQ ID NO: 874767 - protein, 143 aa, Homo sapiens [sequence omitted]

SEQ ID NO: 874768 - protein, 154 aa, Homo sapiens
AQRASPALPTAALSEGLGHPEPRHESYPGFGAGLQEGAGQAGAARQGLPLEKGPDSIIKRTKEALALQCVEHGLSPGMASYTYNPLEPRVLPLHATTFSEIDLTSSSDVFSIQEVKHRDIWTLRTAVWIFLFDLCLHGVPQKAESQIKYICYIF

SEQ ID NO: 874769 - protein, 76 aa, Homo sapiens
NSSVLLSGLFMADRAGRKWILTDKATGGFIFGERRKQLEDRVTVRLSFQALLPAWMVGFLYCAVPLTRSPDSFSNH

SEQ ID NO: 874770 - protein, 104 aa, Homo sapiens
ASFTKRLSWLMGECQAPPRDREAQCRLWSYPDLTVKTHHPEWGPGQASAQAGPAQRLDSDSLCLSHRPETLLLPAEAVPCLPWRPGFLEKLCARGREFPSNLSH

SEQ ID NO: 874771 - protein, 132 aa, Homo sapiens [sequence omitted]

SEQ ID NO: 874772 - protein, 158 aa, Homo sapiens
MAAATHNKQKAKTGANPQHRARRQKRVPLTQKGQTKRRGRHPADRQRSQSDKTTTVSDKQAETGATAEPKSRAEEGDDMMKESMSEEARGKEADGGQQETEQHTAKDTRNRKAEPERRTDSQTTRETEEGESNRATDKRTRRATSLETNEEQPRASAT

SEQ ID NO: 874773 - protein, 107 aa, Homo sapiens
AKAERLDSLRQGQLAQQVGPETRLLFVSGGKSLMVKGSWNPKPRSLKGNLVDTRNHCKSLTGKNRLKVAVQRGCLWKQFFVGWNQEGRNLKQEERNGRCGDSHLSSQ

SEQ ID NO: 874774 - protein, 189 aa, Homo sapiens
SRPRPRTPSRGPSDLRFRGEAGLRRVFLKKAGGSVSFSDVAVGFTQEEWQHLDSAQRTPYRDMMLENYSLLLSVGYCITKPEVVCKLEHGQVLWILEEESPSQSHLDCCIDDDLMEKRQENQDQHLQKVDFVNNKTLTMDRNGVLGKTFSLDTNPILSRKIRGNCDSSGMNLNNISELIISNRSSFVRN

SEQ ID NO: 874775 - protein, 520 aa, Homo sapiens
MDPAGAADPSVPPNPLTHLSLQDRSEMQLQSEADRRSLPGTWTRSSPEHTTILRGGVRRCLQQQCEQTVRILHAKVAQKSYGNEKRFFCPPPCVYLSGPGWRVKPGQDQAHQAGETGPTVCGYMGLDSASGSATETQKLNFEQQPDSREFGCAKTLYISDADKRKHFRLVLRLVLRGGRELGTFHSRLIKVISKPSQKKQSLKNTDLCISSGSKVSLFNRLRSQTVSTRYLSVEDGAFVASARQWAAFTLHLADGHSAQGDFPPREGYVRYGSLVQLVCTVTGITLPPMIIRKVAKQCALLDVDEPISQLHKCAFQFPGSPPGGGGTYLCLATEKVVQFQASPCPKEANRALLNDSSCWTIIGTESVEFSFSTSLACTLEPVTPVPLISTLELSGGGDVATLELHGENFHAGLKVWFGDVEAETMYRYGVEPAVLVCVVPDVAAFCSDWRWLRAPITIPMSLVRADGLFYPSAFSFTYTPEYSVRPGHPGVPEPATDADALLESIHQEFTRTNFHLFIQT

SEQ ID NO: 874776 - protein, 272 aa, Homo sapiens
MDPAGAADPSVPPNPLTHLSLQDRSEMQLQSEADRRSLPGTWTRSSPEHTTILRGGVRRCLQQQCEQTVRILHAKVAQKSYGNEKRFFCPPPCVYLSGPGWRVKPGQDQGEGGIKGCLAACSVGRTTRLGPRRGGSQAQSPRALWRRALSLPGTCVLPSPCRASSRPFPAHQAGETGPTVCGYMGLDSASGSATETQKLNFEQQPDSREFGCAKTLYISDADKRKHFRLVLRLVLRGGRELGTFHSRLIKVISKPSQKKQSLKNTDREQGGA

SEQ ID NO: 874777 - protein, 41 aa, Homo sapiens
MLGAVESTGNKAQGRFILLWQVAITKLSLGYRGEECCFLPA

SEQ ID NO: 874778 - protein, 123 aa, Homo sapiens
MAAKGAGGDAPGRGLAGSGTKLPKAAASVNCAWQGGSHTGSDPRRWLPRGDWRQCLPPMWASGLGSPELCPAAGCTERGGLLNGPCPRGASGKEIHLHPQNTPCPLEALGAGCPSNREKPHAV

SEQ ID NO: 874779 - protein, 123 aa, Homo sapiens; identical to SEQ ID NO: 874778

SEQ ID NO: 874780 - protein, 102 aa, Homo sapiens
QHPLKHEFPQAEAALYLTPSASTAAGETAQPASPLGTICSHNQGAMLPKTWNLEPGNTKIPELGCTKIPEPGCTKVLESISTKVPEPHPSTVTSGPAQQKSK

SEQ ID NO: 874781 - protein, 103 aa, Homo sapiens
CHMQGPLLQAWLFCSSEAQGLPAFSNNTGTCFPFSLSPWMPPEPSLQACPLLDLSTKTSLHQSLSPPRLSFPPLFPTLHVSLWATFPNGFCHHLSSADTQISF

SEQ ID NO: 874782 - protein, 1037 aa, Homo sapiens
VVWVEFRRSMARSSPYLRQLQGPLLPPRDLVEEDDDYLNDDVEEDEESVFIDAEELCSGGVKAGSLPGCLRVSICDENTQETCKVFGRFPITGAWWRVKVQVKPVVGSRSYQYQVQGFPSYFLQSDMSPPNQKHICALFLKECEVSSDDVNKFLTWVKEVSNYKNLNFENLRETLRTFHKETGRKDQKQPTQNGQEELFLDNEMSLPLENTIPFRNVMTALQFPKIMEFLPVLLPRHFKWIIGSGSKEMLKEIEEILGTHPWKLGFSKITYREWKLLRCEASWIAFCQCESLLQLMTDLEKNALIMYSRLKQICREDGHTYVEVNDLTLTLSNHMSFHAASESLKFLKDIGVVTYEKSCVFPYDLYHAERAIAFSICDLMKKPPWHLCVDVEKVLASIHTTKPENSSDDALNESKPDEVRLENPVDVVDTQDNGDHIWTNGENEINAEISEVQLDQDQVEVPLDRDQVAALEMICSNPVTVISGKGGCGKTTIVSRLFKHIEQLEEREVKKACEDFEQDQNASEEWITFTEQSQLEADKAIEVLLTAPTGKAAGLLRQKTGLHAYTLCQVTLDSYPVLNLVNLLKDLFETLKSRNCAIELKTNHRAESQLIVDNATRISRRQFPKFDAELNISDNPTLPISIQDKTFIFVRLPEEDASSQSSKTNHHSCLYSAVKTLLQENNLQNAKTSQFIAFRRQDCDLINDCCCKHYTGHLTKDHQSRLVFGIGDKICCTRNAYLSDLLPENISGSQQNNDLDASSEDFSGTLPDFAKNKRDFESNVRLCNGEIFFITNDVTDVTFGKRRSLTINNMAGLEVTVDFKKLMKYCRIKHAWARTIHTFQGSEEQTVVYVVGKAGRQHWQHVYTAVTRGRCRVYVIAEESQLRNAIMKNSFPRKTRLKHFLQSKLSSSGAPPADFLSPRKSSGDSGGPSTPSASPLPVVTDHAMTNDVTWSEASSPDERTLTFAERWQLSSPDGVDTDDDLPKSRASKRTCGVNDDESPSKIFMVGESPQVSSRLQNLRLNNLIPRQLFKPTDNQET

SEQ ID NO: 874783 - protein, 1052 aa, Homo sapiens
VVWVEFRRSMARSSPYLRQLQGPLLPPRDLVEEDDDYLNDDVEEDEESVFIDAEELCSGGVKAGSLPGCLRVSICDENTQETCKVFGRFPITGAWWRVKVQVKPVVGSRSYQYQVQGFPSYFLQSDMSPPNQKHICALFLKECEVSSDDVNKFLTWVKEVSNYKNLNFENLRETLRTFHKETGRKDQKQPTQNGQEELFLDNEMSLPLENTIPFRNVMTALQFPKIMEFLPVLLPRHFKWIIGSGSKEMLKEIEEILGTHPWKLGFSKITYREWKLLRCEASWIAFCQCESLLQLMTDLEKNALIMYSRLKQICREDGHTYVEVNDLTLTLSNHMSFHAASESLKFLKDIGVVTYEKSCVFPYDLYHAERAIAFSICDLMKKPPWHLCVDVEKVLASIHTTKPENSSDDALNESKPDEVRLENPVDVVDTQDNGDHIWTNGENEINAEISEVQLDQDQVEVPLDRDQVAALEMICSNPVTVISGKGGCGKTTIVSRLFKHIEQLEEREVKKACEDFEQDQNASEEWITFTEQSQLEADKAIEVLLTAPTGKAAGLLRQKTGLHAYTLCQVTLDSYPVLNLVNLLKDLFETLKSRNCAIELKTNHRAESQLIVDNATRISRRQFPKFDAELNISDNPTLPISIQDKTFIFVRLPEEDASSQSSKTNHHSCLYSAVKTLLQENNLQNAKTSQFIAFRRQDCDLINDCCCKHYTGHLTKDHQSRLVFGIGDKICCTRNAYLSDLLPENISGSQQNNDLDASSEDFSGTLPDFAKNKRDFESNVRLCNGEIFFITNDVTDVTFGKRRSLTINNMAGLEVTVDFKKLMKYCRIKHAWARTIHTFQGSEEQTVVYVVGKAGRQHWQHVYTAVTRGRCRVYVIAEESQLRNAIMKNSFPRKTRLKHFLQSKLSSSGAPPADFLSPRKSSGDSGGPSTPSASPLPVVTDHAMTNDVTWSEASSPDERTLTFAERWQLSSPDGVDTDDDLPKSRASKRTCGVNDDESPSKIFMVGESPQVSSRLQNLRLNNLIPRQLFKPTGSGGSVEGLLQKVLDKHWKI

SEQ ID NO: 874784 - protein, 95 aa, Homo sapiens
VVWVEFRRSMARSSPYLRQLQGPLLPPRDLVEEDDDYLNDDVEEDEESVFIDAEELCSGGVKAGSLPGCLRGEEGVCPGDGVGGSKVALPILALP

SEQ ID NO: 874785 - protein, 65 aa, Homo sapiens
PLRVLLNPTGTLEPMSIILLGVIPPKGPENWGIHAPISTRLWPRLCPGVFRFLAFLACCMRGQSG

SEQ ID NO: 874786 - protein, 423 aa, Homo sapiens
MRLLAFLSLLALVLQETGTASLPRKERKRREEQMPREGDSFEVLPLRNDVLNPDNYGEVIDLSNYEELTDYGDQLPEVKVTSLAPATSISPAKSTTAPGTPSSNPTMTRPTTAGLLLSSQPNHGLPTCLVCVCLGSSVYCDDIDLEDIPPLPRRTAYLYARFNRISRIRAEDFKGLTKLKRIDLSNNLISSIDNDAFRLLHALQDLILPENQLEALPVLPSGIEFLDVRLNRLQSSGIQPAAFRAMEKLQFLYLSDNLLDSIPGPLPLSLRSVHLQNNLIETMQRDVFCDPEEHKHTRRQLEDIRLDGNPINLSLFPSAYFCLPRLPIGRFTCSEPFHSSQVISWTSGHHILQQPPSHTPPSCAAGSMDKGLHAGGGGLLLSPQLSRLPSTAGDKEAQGPPPSCLIVLRVTKKPKDHLLPASL

SEQ ID NO: 874787 - protein, 413 aa, Homo sapiens
MRLLAFLSLLALVLQETGTASLPRKERKRREEQMPREGDSFEVLPLRNDVLNPDNYGEVIDLSNYEELTDYGDQLPEVKVTSLAPATSISPAKSTTAPGTPSSNPTMTRPTTAGLLLSSQPNHGLPTCLVCVCLGSSVYCDDIDLEDIPPLPRRTAYLYARFNRISRIRAEDFKGLTKLKRIDLSNNLISSIDNDAFRLLHALQDLILPENQLEALPVLPSGIEFLDVRLNRLQSSGIQPAAFRAMEKLQFLYLSDNLLDSIPGPLPLSLRSVHLQNNLIETMQRDVFCDPEEHKHTRRQLEDIRLDGNPINLSLFPSAYFCLPRLPIGRFTCSEPFHSSQVISWTSGHHILQQPPSHTPPSCAAGSMDKGLHAGGGGLLLSPQLSRLPSTAGDKEAQGPPPSCLIVIKFPTL

SEQ ID NO: 874788 - protein, 62 aa, Homo sapiens
MEVSPVQSRLMSPKQYKDLGREWIGTGLKKSESKGTGLLVPSAGHTNEITRSLLPPLCHGAM

SEQ ID NO: 874789 - protein, 143 aa, Homo sapiens
GIRAVLKAPGVGAVVTRSAQGGTHGRGCAAGGQGANEGPGVPGQGLRLPPGDNGKENCVARFVPLVRSPRGSLEGPLSSFGPSDPQRLCLPHPGLPPQSLGGQASAPLLCCSFPQRTASALSTSRPCTCPHLSTPQAQLGPLF

SEQ ID NO: 874790 - protein, 101 aa, Homo sapiens
SGTAGSGAGRWLFARVVSTSSEGVHVLWAAPQMELGLPWTEYWVIRLQTAILKTSSPRLVQEIHCSVSAFLPSLLSNDSSRFSTEESLVPHGMCATGHSPP

SEQ ID NO: 874791 - protein, 69 aa, Homo sapiens
LIRKEKIWYAEVAKTYSKNESSIHRIVKKEKEIHAVLVIYCGSWDLSPWDKGVLWSYHTIQQPQSLVMT

SEQ ID NO: 874792 - protein, 109 aa, Homo sapiens
FRALSSRIAAGVFTVLPAGTHASDRSPIAYEMRRYHMSIPKYRPPLGLFPKAIAKGTVSVPGPVSCINCSAPGVAIQAVTATVARHRPGQALPPPPPSPLVDVDMIVCD

SEQ ID NO: 874793 - protein, 66 aa, Homo sapiens
  misc_feature (51)..(51): Xaa can be any naturally occurring amino acid
GNIKKDVDIRPAALKLEEAPESSGGLLETGCAHTCNPSTLGGQGGVDHKVXEIETILAKTVKPRVY

SEQ ID NO: 874794 - protein, 82 aa, Homo sapiens
MSHQEGSTDGLPDLGTESLFSSPEEQSGAVAATEASSDIDIATSELSVTVTGDGSDSRDGGFPNDASTENRSSDQESASEDI

SEQ ID NO: 874795 - protein, 55 aa, Homo sapiens
SSFLPSRGLGVCVPIASSPGGLENQWGHVGEGKKKTVLNSLDKRQCIPNVIKADG

SEQ ID NO: 874796 - protein, 275 aa, Homo sapiens
MSSLHKSRIADFQDVLKEPSIALEKLRELSFSGIPCEGGLRCLCWKILLNYLPLERASWTSILAKQRELYAQFLREMIIQPGIAKANMGVSREDVTFEDHPLNPNPDSRWNTYFKDNEVLLQIDKDVRRLCPDISFFQRATDYPCLLILDPQNEFETLRKRVEQTTLKSQTVARNRSGVTNQEQNIKPQFFAFRWLTLLLSQEFLLPDVIRIWDSLFADDNRFDFLLLVCCAMLMLIREQLLEGDFTVNMRLLQDYPITDVCQILQKAKELQDSK

SEQ ID NO: 874797 - protein, 324 aa, Homo sapiens
MIIQPGIAKANMGVSREDVTFEDHPLNPNPDSRWNTYFKDNEVLLQIDKDVRRLCPDISFFQRATDYPCLLILDPQNEFETLRKRVEQTTLKSQTVARNRSGVTNMSSPHKNSVPSSLNEYEVLPNGCEAHWEVVERILFIYAKLNPGIAYVQGMNEIVGPLYYTFATDPNSEWKEHAEADTFFCFTNLMAEIRDNFIKSLDDSQCGITYKMEKVYSTLKDKDVELYLKLQEQNIKPQFFAFRWLTLLLSQEFLLPDVIRIWDSLFADDNRFDFLLLVCCAMLMLIREQLLEGDFTVNMRLLQDYPITDVCQILQKAKELQDSK

SEQ ID NO: 874798 - protein, 400 aa, Homo sapiens
MSSLHKSRIADFQDVLKEPSIALEKLRELSFSGIPCEGGLRCLCWKILLNYLPLERASWTSILAKQRELYAQFLREMIIQPGIAKANMGVSREDVTFEDHPLNPNPDSRWNTYFKDNEVLLQIDKDVRRLCPDISFFQRATDYPCLLILDPQNEFETLRKRVEQTTLKSQTVARNRSGVTNMSSPHKNSVPSSLNEYEVLPNGCEAHWEVVERILFIYAKLNPGIAYVQGMNEIVGPLYYTFATDPNSEWKEHAEADTFFCFTNLMAEIRDNFIKSLDDSQCGITYKMEKVYSTLKDKDVELYLKLQEQNIKPQFFAFRWLTLLLSQEFLLPDVIRIWDSLFADDNRFDFLLLVCCAMLMLIREQLLEGDFTVNMRLLQDYPITDVCQILQKAKELQDSK

SEQ ID NO: 874799 - protein, 400 aa, Homo sapiens; identical to SEQ ID NO: 874798

SEQ ID NO: 874800 - protein, 69 aa, Homo sapiens
WAWSAPLLPPSCSLPEHAEADTFFCFTNLMAEIRDNFIKSLDDSQCGITYKMEKVYSTLKDKDVELYLK

SEQ ID NO: 874801 - protein, 400 aa, Homo sapiens; identical to SEQ ID NO: 874798

SEQ ID NO: 874802 - protein, 366 aa, Homo sapiens
RNIKLAGRGGGRLWSQLLGRMRQENGVDPGVGACSEQRSLHCTSAWATVQDSISKTKTKTKNNAYGESWGLLADGMAKTSTLSNKIISCSLFDRRLCPDISFFQRATDYPCLLILDPQNEFETLRKRVEQTTLKSQTVARNRSGVTNMSSPHKNSVPSSLNEYEVLPNGCEAHWEVVERILFIYAKLNPGIAYVQGMNEIVGPLYYTFATDPNSEWKEHAEADTFFCFTNLMAEIRDNFIKSLDDSQCGITYKMEKVYSTLKDKDVELYLKLQEQNIKPQFFAFRWLTLLLSQEFLLPDVIRIWDSLFADDNRFDFLLLVCCAMLMLIREQLLEGDFTVNMRLLQDYPITDVCQILQKAKELQDSK

SEQ ID NO: 874803 - protein, 320 aa, Homo sapiens
VTLRFPNVNKRRKDVTFEDHPLNPNPDSRWNTYFKDNEVLLQIDKDVRRLCPDISFFQRATDYPCLLILDPQNEFETLRKRVEQTTLKSQTVARNRSGVTNMSSPHKNSVPSSLNEYEVLPNGCEAHWEVVERILFIYAKLNPGIAYVQGMNEIVGPLYYTFATDPNSEWKEHAEADTFFCFTNLMAEIRDNFIKSLDDSQCGITYKMEKVYSTLKDKDVELYLKLQEQNIKPQFFAFRWLTLLLSQEFLLPDVIRIWDSLFADDNRFDFLLLVCCAMLMLIREQLLEGDFTVNMRLLQDYPITDVCQILQKAKELQDSK

SEQ ID NO: 874804 - protein, 72 aa, Homo sapiens
VTGYVDHAPRVPGGRRRRRQRRRQRRRRRRRLGGPEVNTMSSLHKSRPSFSVSTSLPVSFHLLPRVGLCLAS

SEQ ID NO: 874805 - protein, 86 aa, Homo sapiens
PLKSRMWHVMEIHRVPKSRNPQPWGSPGNSRNEKNLVEWTGIGIDTVAPRAMAVETASNQPRGHSLILSGPCKTWALPRWESLYSQ

SEQ ID NO: 874806 - protein, 105 aa, Homo sapiens
MRLRGPSGLPWAAAPSLAPRAPRGLRGGGRGRCACPPGSALHLPPPCPAAPAAPRPPRSLLQPDFLFAAADPAHFPGREAAEGRELLGGSPARSAPPPASPISLR

SEQ ID NO: 874807 - protein, 113 aa, Homo sapiens
CTYGRCGGAHGLCESISVGPACQAVRGHLCVKGVKLSCSILGSSWGPPHPTAPRQQSTGCSTYLCDKDSRTPLQILPQILSDKATLAASSREGTWDRKRQRGTSSPTAAEWQL

SEQ ID NO: 874808 - protein, 149 aa, Homo sapiens
SLLGGDRACSVECLPISHSSKGRLLTFVLVKGQRTCCVLERLSVRVENPCCVLERLSVRVESPCCVLERLSVRVESPCCVLERLSVRVENPCCVLERLSVRVESPCCVLERLSVRVESPCCVLERLSARVESPCCVLERLSLRVESPCC

SEQ ID NO: 874809 - protein, 105 aa, Homo sapiens [sequence omitted]

SEQ ID NO: 874810 - protein, 43 aa, Homo sapiens
MQDPLLRPPVSCGDTLTKGKAILGQRVSPVEERSTTHSVLLKT

SEQ ID NO: 874811 - protein, 81 aa, Homo sapiens
IHVIYIEPNDGDDTVACTSAPCLLPCAKMLRQYGFLSSLIHCTNSMQGSVPGAVGDEEVDAALLCPRRPYRPAEHRRQRHG

SEQ ID NO: 874812 - protein, 666 aa, Homo sapiens
MAMTWIVFSLWPLTVFMGHIGGHSLFSCEPITLRMCQDLPYNTTFMPNLLNHYDQQTAALAMEPFHPMVNLDCSRDFRPFLCALYAPICMEYGRVTLPCRRLCQRAYSECSKLMEMFGVPWPEDMECSRFPDCDEPYPRLVDLNLAGEPTEGAPVAVQRDYGFWCPRELKIDPDLGYSFLHVRDCSPPCPNMYFRREELSFARYFIGLISIICLSATLFTFLTFLIDVTRFRYPERPIIFYAVCYMMVSLIFFIGFLLEDRVACNASIPAQYKASTVTQGSHNKACTMLFMILYFFTMAGSVWWVILTITWFLAAVPKWGSEAIEKKALLFHASAWGIPGTLTIILLAMNKIEGDNISGVCFVGLYDVDALRYFVLAPLCLYVVVGVSLLLAGIISLNRVRIEIPLEKENQDKLVKFMIRIGVFSILYLVPLLVVIGCYFYEQAYRGIWETTWIQERCREYHIPCPYQVTQMSRPDLILFLMKYLMALIVGIPSVFWVGSKKTCFEWASFFHGRRKKEIVNESRQVLQEPDFAQSLLRDPNTPIIRKSRGTSTQGTSTHASSTQLAMVDDQRSKAGSIHSKVSSYHGSLHRSRDGRYTPCSYRGMEERLPHGSMSRLTDHSRHSSSHRLNEQSRHSSIRDLSNNPMTHITHGTSMNRVIEEDGTSA

SEQ ID NO: 874813 - protein, 666 aa, Homo sapiens; identical to SEQ ID NO: 874812

SEQ ID NO: 874814 - protein, 143 aa, Homo sapiens
MAMTWIVFSLWPLTVFMGHIGGHSLFSCEPITLRMCQDLPYNTTFMPNLLNHYDQQTAALAMEPFHPMVNLDCSRDFRPFLCALYAPICMEYGRVTLPCRRLCQRAYSECSKLMEMFGVPWPEDMECSRFPDCDEPYSIQIGA

SEQ ID NO: 874815 - protein, 123 aa, Homo sapiens
FKRIRHCNIQHASKVLLLYGWRGEKQTVRRKATLKKQTKTTSQIFMWLLQSMVLQLIFPPHNVSLFFNCFLKNKYCFHFIFYLFFEMEFCSCCPLPRLECNGMISAHRDLRLWGSSDSPASAS

SEQ ID NO: 874816 - protein, 94 aa, Homo sapiens
ENRLKLGSGGCSESRSCHCTPAWATRMKLHLKKKRENDNEQSPLENYEEFQDSNSRALNGAQGPSAHKALGSSPQVARLCCRPYGSLRNYAPRS

SEQ ID NO: 874817 - protein, 73 aa, Homo sapiens
LGTGGRTRVSPGSTKWDVRTPVPITLGESILSSLGLIHEARASLQRPDVLTASDTHHTRNTSGGTSLSPAHTL

SEQ ID NO: 874818 - protein, 248 aa, Homo sapiens
RKHQGHFLLGTLSRYAVQVAEGMGYLESKRFIHRDLAARNLLLATRDLVKIGDFGLMRALPQNDDHYVMQEHRKVPFAWCAPESLKTRTFSHASDTWMFGVTLWEMFTYGQEPWIGLNGSQILHKIDKEGERLPRREDCPQDIYNVMLQCLGSQARGQTHVCALRDFLLEAQPTIHAGLQDFEEPDKACTSMIEYDVITVIVGKGRGTTGGKWPRTHGPLVVWGPSLANVVTSGGRDCRAKDIKQPLQ

SEQ ID NO: 874819 - protein, 66 aa, Homo sapiens
LLHVMDKKTGAQRGEVTSSRPPSRTVTELGSHGNPGFLAVEEGEVTDVCELHAPQFAGGGHPSFPQ

SEQ ID NO: 874820 - protein, 137 aa, Homo sapiens
FSQVTGTGLVWLASCRSSQPGAQFFLGEHLCLQVTPLWSLPEVQLGSKCGPFPSTSRLFQHREAAFVSPPSPLSRALVPPGPCCLGLSCPPGKTCPSTEEERVQVPTWLEVVLAPSRAFRPMPTGCRHERVSSPVLS

SEQ ID NO: 874821 - protein, 545 aa, Homo sapiens
MAREPRKNAALDAQSAEDQTGLLTVKVEKEEASALTAEVRAPCSPARGPERSRQRFRGFRYPEAAGPREALSRLRELCGQWLQPEMHSKEQILELLVLEQFLTILPGNLQSWVREQHPESGEEVVVLLEYLERQLDEPAPQVPVGDQGQELLCCKMALLTQTQGSQSSQCQPMKALFKHESLGSQPLHDRVLQVPGLAQGGCCREDAMVASRLTPGSQGLLKMEDVALTLTPGWTQLDSSQVNLYRDEKQENHSSLVSLGGEIQTKSRDLPPVKKLPEKEHGKICHLREDIAQIPTHAEAGEQEGRLQRKQKNAIGSRRHYCHECGKSFAQSSGLTKHRRIHTGEKPYECEDCGKTFIGSSALVIHQRVHTGEKPYECEECGKVFSHSSNLIKHQRTHTGEKPYECDDCGKTFSQSCSLLEHHKIHTGEKPYQCNMCGKAFRRNSHLLRHQRIHGDKNVQNPEHGESWESQGRTESQWENTEAPVSYKCNECERSFTRNRSLIEHQKIHTGEKPYQCDTCGKGFTRTSYLVQHQRSHVGKKTLSQ

SEQ ID NO: 874822 - protein, 513 aa, Homo sapiens
MAREPRKNAALDAQSAEDQTGLLTVKVEKEEASALTAEVRAPCSPARGPERSRQRFRGFRYPEAAGPREALSRLRELCGQWLQPEMHSKEQILELLVLEQFLTILPGNLQSWVREQHPESGEEVVVLLEYLERQLDEPAPQVERTGLVSERCGLFPPEIPDRSEGHSFKVQEFFISFCTVNLLGSKGLLKMEDVALTLTPGWTQLDSSQVNLYRDEKQENHSSLVSLGGEIQTKSRDLPPVKKLPEKEHGKICHLREDIAQIPTHAEAGEQEGRLQRKQKNAIGSRRHYCHECGKSFAQSSGLTKHRRIHTGEKPYECEDCGKTFIGSSALVIHQRVHTGEKPYECEECGKVFSHSSNLIKHQRTHTGEKPYECDDCGKTFSQSCSLLEHHKIHTGEKPYQCNMCGKAFRRNSHLLRHQRIHGDKNVQNPEHGESWESQGRTESQWENTEAPVSYKCNECERSFTRNRSLIEHQKIHTGEKPYQCDTCGKGFTRTSYLVQHQRSHVGKKTLSQ

SEQ ID NO: 874823 - protein, 118 aa, Homo sapiens
GETGFHHIGQAILKLLTSGDPPSWASQNAGITDRSHHTWPGTFYKCHTTCSVQPRLPPLCQRISCRVPRHQPHMAARKGSTHLRLVPAECLPGSGPGRAGPGPAWWHQAALEIRVGEQ

SEQ ID NO: 874824 - protein, 117 aa, Homo sapiens
KCSSRVGVTQFSRCHLSSLSLARKGNSLTPCASPVRRCLALLQLTPGAPLPLSCTHCPKIPSEMNLVPQLEMQKSSVFCVAHAESCRLELFLFGHLGTAPDFHSLYYFCHRFFFYVF

SEQ ID NO: 874825 - protein, 93 aa, Homo sapiens
LTPLPQAAAQNRTEDWSTETRFCLRSVVLEAGAGHVCPSFLYSQTLIAGPILCPQTSSRAMGSPAAIGQRHGREPVAMAEVTVGTERRFELQT

SEQ ID NO: 874826 - protein, 113 aa, Homo sapiens
YEWGRSAGNGLDELPEGPALPQNHPPRKAHAHLHLFLFLKRQGLPLLPRLQCSGTITAHCSLKLLDSSDPPTSASQVAWTIGVSHCPWPQFHLHENGKPLFRSKDGKGTSCRK

SEQ ID NO: 874827 - protein, 117 aa, Homo sapiens
SRRRLSVFVSSLSSRRLVSPRLSGLSLCLCLSVSLSTSLSVSLCLCLSLCLCVSLSVSVSLSLSLCLSVSLCLSVSVSLSLSPPTALCPSAKLLQNSSLDSSSQGICSWCQPTPPMQ

SEQ ID NO: 874828 - protein, 112 aa, Homo sapiens [sequence omitted]

SEQ ID NO: 874829 - protein, 80 aa, Homo sapiens
CDYDCPAEPTFKQDTILTNAKTEEGFSQRIHFATVLCVCLAIRESEEGGVQPDTSHEHSCLLPRALATRWHHAATRVPPV

SEQ ID NO: 874830 - protein, 105 aa, Homo sapiens
CAQNQVGIGRPAELKEAIKPKEILEPPEIDLDASMRKLVIVRAGCPIRLFAIVRGRPAPKVTWRKVGIDNVVRKGQVDLVDTMAFLVIPNSTRDDSGKYSLTLVN

SEQ ID NO: 874831 - protein, 66 aa, Homo sapiens
KPFRSPAQPDDGIDEAEASNLLFDEPIPRKRKNSMKVMFKCLWKNCGKVLSTAAGIQKHIRTIHLG

SEQ ID NO: 874832 - protein, 71 aa, Homo sapiens
DPRRADGNRSRRKQRGPEGRGREDDPNRPGCSQSGTVRGRHPVPSRTQDGDGDGVRLGKDRAGELRGGMLQ

SEQ ID NO: 874833 - protein, 378 aa, Homo sapiens
MDSQELKTLINYYCQERYFHHVLLVASEGIKRYGSDPVFRFYHAYGTLMEGKTQEALREFEAIKNKQDVSLCSLLALIYAHKMSPNPDREAILESDARVKEQRKGAGEKALYHAGLFLWHIGRHDKAREYIDRMIKISDGSKQGHVLKAWLDITRGKEPYTKKALKYFEEGLQDGNDTFALLGKAQCLEMRQNYSGALETVNQIIVNFPSFLPAFVKKMKLQLALQDWDQTVETAQRLLLQDSQNVEALRMQALYYVCREGDIEKASTKLENLGNALDAMEPQNAQLFYNITLAFSRTCGRSQLILQKIQTLLERAFSLNPQQSEFATELGYQMILQGRVKEALKWYKTAMTLDETSVSALVGFIQCQLIEGQLQDAD

SEQ ID NO: 874834 - protein, 57 aa, Homo sapiens
SRDPDYHLTYPPPCAKEYHLYQFHSFLTLQLLKIMHHSWHHIWALTMFYSQLSVSTG

SEQ ID NO: 874835 - protein, 466 aa, Homo sapiens
QKIAVDCVIDLTRAEGENRPIATLDLTLEPVTPSQREPTSLQTCASLSGKAVMEGQVDRSSQPTARRLINSDPVDLDLVEENTFVGPPPATSISGGSVYPTEPNCSSATFTGNLSFLASLQLSSDVSSLSPTSNNSSSSSSNQKVPLPCPQQDVSRPPQALPCPLRASPCPPRALSCPSQTMQCKLPALTHPPQEVPCPRQNIPSPPQDSLWHPQHSPSPPQDSLGLPQDVPGPPQSILHPQDVAYLQDMPQSPGDVPRSPGTMPPSPDVPQSTGDMLGSPGDVPQSPSYVSPSPDAPQSPGGMPHLPGDVLYSPGDMPHSSGDVTHSPRDIPHLPGDRPDFTQNDVQNRDMPMDISAASPPSCSPSPQSETPLEKVPWLSVMETPARKEISLSEPAKPGSAHVQSRTPQGGLYNRPCLHRLKYFLRPPVHHLFFQTLIPDKDTREQGSKIRTHPSSKTKNGNKYH

SEQ ID NO: 874836 - protein, 70 aa, Homo sapiens
FVTSLRLKMCPRAIVERARRLGSLQSRVLGATPTVMTVRSLRTLPSVLRVAGTRLLPGESLCFRARQIQV

SEQ ID NO: 874837 - protein, 422 aa, Homo sapiens
KKHKKHKSDKHLYEEYVEKPLKLVLKVGGNEVTELSTGSSGHDSSLFEDKNDHDKHKDRKRKKRKKGEKQIPGEEKGRKRRRVKEDKKKRDRDRVENEAEKDLQCHAPVRLDLPPEKPLTSSLAKQEEVEQTPLQEALNQLMRQLQRKDPSAFFSFPVTDFIAPGYSMIIKHPMDFSTMKEKIKNNDYQSIEELKDNFKLMCTNAMIYNKPETIYYKAAKKLLHSGMKILSQERIQSLKQSIDFMADLQKTRKQKDGTDTSQSGEDGGCWQREREDSGDAEAHAFKSPSKENKKKDKDMLEDKFKSNNLEREQEQLDRIVKESGGKLTRRLVNSQCEFERRKPDGTTTLGLLHPVDPIVGEPGYCPVRLGMTTGRLQSGVNTLQGFKEDKRNKVTPVLYLNYGPYSSYAPHYDSTFANYQQG

SEQ ID NO: 874838 - protein, 178 aa, Homo sapiens
KKHKKHKSDKHLYEEYVEKPLKLVLKVGGNEVTELSTGSSGHDSSLFEDKNDHDKHKDRKKKKKKKKTFGLRAPAGPREESFLKHTLAVGARGGPSVGIGETVGQRGSPEETAGHGHMRAWGFLHQFKNAPGGKREGFLVKKFPKRGDSGEAQKGDLYKRGGPKGKPAKFKFSPSRGG

SEQ ID NO: 874839 - protein, 367 aa, Homo sapiens
MIVFVFEEAGVVPRAARGEFGGRKRRRVKEDKKKRDRDRVENEAEKDLQCHAPVRLDLPPEKPLTSSLAKQEEVEQTPLQEALNQLMRQLQRKDPSAFFSFPVTDFIAPGYSMIIKHPMDFSTMKEKIKNNDYQSIEELKDNFKLMCTNAMIYNKPETIYYKAAKKLLHSGMKILSQERIQSLKQSIDFMADLQKTRKQKDGTDTSQSGEDGGCWQREREDSGDAEAHAFKSPSKENKKKDKDMLEDKFKSNNLEREQEQLDRIVKESGGKLTRRLVNSQCEFERRKPDGTTTLGLLHPVDPIVGEPGYCPVRLGMTTGRLQSGVNTLQGFKEDKRNKVTPVLYLNYGPYSSYAPHYDSTFANYQQG

SEQ ID NO: 874840 - protein, 431 aa, Homo sapiens
TNTSTRSPDFNRRAFLSFLFFFEEYVEKPLKLVLKVGGNEVTELSTGSSGHDSSLFEDKNDHDKHKDRKRKKRKKGEKQIPGEEKGRKRRRVKEDKKKRDRDRVENEAEKDLQCHAPVRLDLPPEKPLTSSLAKQEEVEQTPLQEALNQLMRQLQRKDPSAFFSFPVTDFIAPGYSMIIKHPMDFSTMKEKIKNNDYQSIEELKDNFKLMCTNAMIYNKPETIYYKAAKKLLHSGMKILSQERIQSLKQSIDFMADLQKTRKQKDGTDTSQSGEDGGCWQREREDSGDAEAHAFKSPSKENKKKDKDMLEDKFKSNNLEREQEQLDRIVKESGGKLTRRLVNSQCEFERRKPDGTTTLGLLHPVDPIVGEPGYCPVRLGMTTGRLQSGVNTLQGFKEDKRNKVTPVLYLNYGPYSSYAPHYDSTFANYQQG

SEQ ID NO: 874841 - protein, 107 aa, Homo sapiens
RDCATALQPGLQSETPSQKKRKEVNMVFMNLISISASSCYCNYHGLSGLNNIYFSLFWKLSPRSRHWQIPCLFLLADGHLLAVSTCGGEITCLMSFLRRALISSSGL

SEQ ID NO: 874842 - protein, 87 aa, Homo sapiens
ANSFTRGINTEVVLAGMEIWTEGDLIDVTVDLQITLRNFNHWRQEMLFHRAKHDVAHMIVGHHPGQNMGQAFLSGACSSGFAAAVVI

SEQ ID NO: 874843 - protein, 267 aa, Homo sapiens
IGSTGIKMSNRVVRWEASHSGNWYTASGPQLNAQLEGWLSQVKSTKRPARAIIAPHAGYTYCGSCATHAYKQVDPSITQGIFILGPSHHVSLSQCALSSVDIYRTPLHDLRIDQKIYRELWKTGMFERMSLQTKMNTVIEMHLPCTAKAMEIHKDEFTIIPVLVGALSESKEQEFGKLFSKYLADPSNFFVVSSDFCHWGQRFRYSYYDESQGETYRSIEHLDKMGMSIIEQLDPVSFSNYLRKHHNTICGRHPFRVLNAITELQKN

SEQ ID NO: 874844 - protein, 71 aa, Homo sapiens
GQRAEQVTVEGAPLRGSSQGRPQGCDISKEPRGGEEAKGQACPRAHHIKPGETAAPGLDPQPSVRPIWKEE

SEQ ID NO: 874845 - protein, 73 aa, Homo sapiens
ISALSGPFLFSYLPPGLKAGKGGTEMGLQFLIPRARVLPFSHLGHPTSPETQQCGRGSLGLQMDGPGCIWLCH

SEQ ID NO: 874846 - protein, 140 aa, Homo sapiens
QWSATTAWNPQYWSLCHPAGVSRSAPDHPQRPGHLWFWGPEALGSPSCWCDLLQLLPARQGELRAELALCPGGWTLAGHGPEEGARPPRVSVLRSAGTGPPPAGEATRVGHLLLPDPSSQGAYPPLQGWCYSPEGQRGSS

SEQ ID NO: 874847 - protein, 628 aa, Homo sapiens
MSRSGDRTSTFDPSHSDNLLHGLNLLWRKQLFCDVTLTAQGQQFHCHKAVLASCSQYFRSLFSSHPPLGGGVGGQDGLGAPKDQQQPPQQQPSQQQQPPPQEEPGTPSSSPDDKLLTSPRAINNLVLQGCSSIGLRLVLEYLYTANVTLSLDTVEEVLSVSKILHIPQVTKLCVQFLNDQISVQNYKQVCKIAALHGLEETKKLANKYLVEDVLLLNFEEMRALLDSLPPPVESELALFQMSVLWLEHDRETRMQYAPDLMKRLRFALIPAPELVERVQSVDFMRTDPVCQKLLLDAMNYHLMPFRQHCRQSLASRIRSNKKMLLLVGGLPPGPDRLPSNLVQYYDDEKKTWKILTIMPYNSAHHCVVEVENFLFVLGGEDQWNPNGKHSTNFVSRYDPRFNSWIQLPPMQERRASFYACRLDKHLYVIGGRNETGYLSSVECYNLETNEWRYVSSLPQPLAAHAGAVHNGKIYISGGVHNGEYVPWLYCYDPVMDVWARKQDMNTKRAIHTLAVMNDRLYAIGGNHLKGFSHLDVMLVECYDPKGDQWNILQTPILEGRSGPGCAVLDDSIYLVGGYSWSMGAYKSSTICYCPEKGTWTELEGDVAEPLAGPACVTVILPSCVPYNK

SEQ ID NO: 874848 - protein, 591 aa, Homo sapiens
  misc_feature (585)..(585): Xaa can be any naturally occurring amino acid
MSRSGDRTSTFDPSHSDNLLHGLNLLWRKQLFCDVTLTAQGQQFHCHKAVLASCSQYFRSLFSSHPPLGGGVGGQDGLGAPKDQQQPPQQQPSQQQQPPPQEEPGTPSSSPDDKLLTSPRAINNLVLQGCSSIGLRLVLEYLYTANVTLSLDTVEEVLSVSKILHIPQVTKLCVQFLNDQISVQNYKQVCKIAALHGLEETKKLANKYLVEDVLLLNFEEMRALLDSLPPPVESELALFQMSVLWLEHDRETRMQYAPDLMKRLRFALIPAPELVERVQSVDFMRTDPVCQKLLLDAMNYHLMPFRQHCRQSLASRIRSNKKMLLLVGGLPPGPDRLPSNLVQYYDDEKKTWKILTIMPYNSAHHCVVEVENFLFVLGGEDQWNPNGKHSTNFVSRYDPRFNSWIQLPPMQERRASFYACRLDKHLYVIGGRNETGYLSSVECYNLETNEWRYVSSLPQPLAAHAGAVHNGKIYISGGVHNGEYVPWLYCYDPVMDVWARKQDMNTKRAIHTLAVMNDRLYAIGGNHLKGFSHLDVMLVECYDPKGDQWNILQTPILEGRSGPGCAVLDDSIYLFLFYIFIIFSXNSSTIF

SEQ ID NO: 874849 - protein, 61 aa, Homo sapiens
MVQQIQSVCMECQAHGETIRPKDRRDSCNGRKTVAEKEILEVHIDKGMKDGQKITFRGEGY

SEQ ID NO: 874850 - protein, 115 aa, Homo sapiens
PIIPPPCWFPLFSISDASQGMDCPQPPNMHLSKYSLALGSITPRRVPEFLEPNVLEFQISGTCPTGALRLLPYCFPAFLSGLHWFAWRSYLVSYVFLHPLPDSAQNAHRLGSHQT

SEQ ID NO: 874851 - protein, 113 aa, Homo sapiens
QSVLERFPWLKYRQFGSLPEYYTQKSSPFTDPVARGVDGSFFSPPTSTAQTVSFPFKHSLMGMLCPLCGPGLVGSQISYKLLRGRKVEGNHPCRFFFSSCASIQPIKLLFIFS

SEQ ID NO: 874852 - protein, 247 aa, Homo sapiens
MECVEEEEEVPAVPETLKKKRRNFAELKIKRLRKKFAQKMLRKARRKLIYEKAKHYHKEYRQMYRTEIRMARMARKAGNFYVPAEPKLAFVIRIRGINGVSPKVRKVLQLLRLRQIFNGTFVKLNKASINMLRIVEPYIAWGYPNLKSVNELIYKRGYGKINKKRIALTDNALIARSLGKYGIICMEDLIHEIYTVGKGFKEANNFLWPFKLSSPRGGMKKKTTHFVEGGDAGNREDQINRLIRRMN

SEQ ID NO: 874853 - protein, 123 aa, Homo sapiens
QDPQRPSQALGTCQASMSQPRGVLRRSSKLDPADPQIRPWPPRGRHDSQKPSLQAGVWGLPAQHNLGAVRHGGGSPPSQGRPGSTGYIFPHGVNKEPPLSPAVVSPGPRPCGSQQSRQPEREG

SEQ ID NO: 874854 - protein, 42 aa, Homo sapiens
YKVTPQAEVNVQVNQNEGSLRNSQKYPAGSCLLFAATKVFTY

SEQ ID NO: 874855 - protein, 155 aa, Homo sapiens
TQLSGARLTGKCLVSPWLVEGPMLAPETTMCLLRKDSWTPASLLQIGEGGNGEKGKISKIRPFPAPGREGALAPRARHCSPGGGGHLSRLHPSPWPGREEETPTGPFQAGAQPVGTLVKQAWVLQGERNLKPIGLGPQPSYHPHPGTLVLKTSIY

SEQ ID NO: 874856 - protein, 116 aa, Homo sapiens
LGVLRRCRSAVSARMSLQAGPHTGHSGAAPTGPPAEPASLAAHRRPAESCGRGGGCGGPSGPRALRGDQGAQCHGCADHLRLVLSGSRGGRPLAGSCGQWGSARSPGSHSGPCPQL

SEQ ID NO: 874857 - protein, 671 aa, Homo sapiens
SAEEEAHPSPPDDGDFLRTPRRWRQHWEEAVRRSAQERVRRPGAGWAFGEAEGASGLAQLLAELGGLVRRDLQKVRQEVQPAYAAAGFPAWEVYLRAFHSAVAQRLQELARDARGCEQLYILLDWAANVYGSPDFLGAPGLALPAEPLPPLLAPDVWARLESDYTSFLEAKIASCFDSILQLEQSHWAAAEVPEVLQGLYQAPLSMDVHMVLAREQGLRRGVCSSLTHTVAISRTNSYPVPTNPSVRWEPEAPRGGKSGTPGAPTGREAAGWEFAGVDSPVGRLKAGGAKTDRHSGAGWRRSGGYQGTRGLRSGAGGTLSAGLRSQLVAEHVKAAGAISAELEATTLRICTRALGLFVPRCGRILSRGATWPGALCRWEGGVCVGTCLGGWTQGHRAAREGPQRLCVSRPRFEKAFLASEAVSEPHLGAYINACEELRTSLLSRFPGTQEELEKPLVTATCSFQKHLLQGLQRELQPLFRVVCTRDWLTQDWLHPLMDKVVTFAGHLQRVARPRAQETLQEVHRFVVREYLARALRPRERFRGMERMHGSQKMSLDAQAISDTFQGLGSEATWLDQAIQCVAEILGETYKDDIQRHLETLIRSYPDIRRDHILAILALRRLGRQRNQHLLQHTEDLLRAAAGAAGAEAPRGRVLFEEIKVPSAMAVLITCV

SEQ ID NO: 874858 - protein, 218 aa, Homo sapiens
LAPSSPAAKMPSPQTDTPGPELQSPKEAEEPQTPAQGSRRTSSRKEPNAHRKDGTRLGLGSLRQAFSRASQRALTQVSKEDTGLFRRSSCSLFRSFRQALNDGPATGHSQATPEVPSGVMNGVSQQASTGAASEELKPEAEGKSVADLITERQLLAAFEQLLRLETLLVAEKASRTFEQDPTAFARRAMDVCLLYDGLAAEIGAIVRETLDSDGVDAA

SEQ ID NO: 874859 - protein, 479 aa, Homo sapiens
LAPSSPAAKMPSPQTDTPGPELQSPKEAEEPQTPAQGSRRTSSRKEPNAHRKDGTRLGLGSLRQAFSRASQRALTQVSKEDTGLFRRSSCSLFRSFRQALNDGPATGHSQATPEVPSGVMNGVSQQASTGAASEELKPEAVLTSWAPRGWRCPPSRCLRSWRRTCGPDWRATTPASWRPRSQAASTASCSWSRVTGRPPRSPRCCRASTRRRCPWTSIWFEKAFLASEAVSEPHLGAYINACEELRTSLLSRFPGTQEELEKPLVTATCSFQKHLLQGLQRELQPLFRVVCTRDWLTQDWLHPLMDKVVTFAGHLQRVARPRAQETLQEVHRFVVREYLARALRPRERFRGMERMHGSQKMSLDAQAISDTFQGLGSEATWLDQAIQCVAEILGETYKDDIQRHLETLIRSYPDIRRDHILAILALRRLGRQRNQHLLQHTEDLLRAAAGAAGAEAPRGRVLFEEIKVPSAMAVLITCV

SEQ ID NO: 874860 - protein, 513 aa, Homo sapiens
LAPSSPAAKMPSPQTDTPGPELQSPKEAEEPQTPAQGSRRTSSRKEPNAHRKDGTRLGLGSLRQAFSRASQRALTQVSKEDTGLFRRSSCSLFRSFRQALNDGPATGHSQATPEVPSGVMNGVSQQASTGAASEELKPEAVLTSWAPRGWRCPPSRCLRSWRRTCGPELESDYTSFLEAKIASCFDSILQLEQSHWAAAEVPEVLQGLYQAPLSMDVHMLVAEHVKAAGAISAELEATTLRICTRALGLFVPRFEKAFLASEAVSEPHLGAYINACEELRTSLLSRFPGTQEELEKPLVTATCSFQKHLLQGLQRELQPLFRVVCTRDWLTQDWLHPLMDKVVTFAGHLQRVARPRAQETLQEVHRFVVREYLARALRPRERFRGMERMHGSQKMSLDAQAISDTFQGLGSEATWLDQAIQCVAEILGETYKDDIQRHLETLIRSYPDIRRDHILAILALRRLGRQRNQHLLQHTEDLLRAAAGAAGAEAPRGRVLFEEIKVPSAMAVLITCV

SEQ ID NO: 874861 - protein, 386 aa, Homo sapiens
MSRSRPQPPALSSSPDFLGAPGLALPAEPLPPLLAPDVWARLESDYTSFLEAKIASCFDSILQLEQSHWAAAEVPEVLQGLYQAPLSMDVHMLVAEHVKAAGAISAELEATTLRICTRALGLFVPRFEKAFLASEAVSEPHLGAYINACEELRTSLLSRFPGTQEELEKPLVTATCSFQKHLLQGLQRELQPLFRVVCTRDWLTQDWLHPLMDKVVTFAGHLQRVARPRAQETLQEVHRFVVREYLARALRPRERFRGMERMHGSQKMSLDAQAISDTFQGLGSEATWLDQAIQCVAEILGETYKDDIQRHLETLIRSYPDIRRDHILAILALRRLGRQRNQHLLQHTEDLLRAAAGAAGAEAPRGRVLFEEIKVPSAMAVLITCV

SEQ ID NO: 874862 - protein, 70 aa, Homo sapiens
LAAFRGSRRLTELYVNECENTDDLDEFVEKYNVLSKEETETLNNPLTTKKKITSKVKNALTHTKSNLNRL

SEQ ID NO: 874863 - protein, 69 aa, Homo sapiens
MAYPHAVTMVYLNTVTMLYPQNVTTVYPHTVTTAHPHAVTTAHPHAVTTAHPHAVTTAHPHAVTTAHPH

SEQ ID NO: 874864 - protein, 1239 aa, Homo sapiens
  misc_feature (87)..(87): Xaa can be any naturally occurring amino acid
  misc_feature (98)..(98): Xaa can be any naturally occurring amino acid
MKRLLAAAGKGVRGPEPPNPFSERVYTEKDYGTIYFGDLGKIHTAASRGQVQKLEKMTVGKKPVNLNKRDMKKRTALHWACVNGHAXVVTFLVDRKCXLNVLDGEGRTPLMKALQCEREALCKYSQDAGADLNYVDVYGNTALHYAVYSENLLMVATLLSYGAVIEVQNKASLTPLLLAIQKRSKQTVEFLLTKNANANAFNESKCTALMLAICEGSSEIVGMLLQQNVDVFAEDIHGITAERYAAARGVNYIHQQLLEHIRKLPKNPQNTNPEGTSTGTPDEAAPLAERTPDTAESLLEKTPDEAARLVEGTSAKIQCLGKATSGKFEQSTEETPRKILRPTKETSEKFSWPAKERSRKITWEEKETSVKTECVAGVTPNKTEVLEKGTSNMIACPTKETSTKASTNVDVSSVEPIFSLFGTRTIENSQCTKVEEDFNLATKIISKSAAQNYTCLPDATYQKDIKTINHKIEDQMFPSESKREEDEEYSWDSGSLFESSAKTQVCIPESMYQKVMEINREVEELPEKPSAFKPAVEMQKTVPNKAFELKNEQTLRAAQMFPSESKQKDDEENSWDSESPCETVSQKDVYLPKATHQKEFDTLSGKLEESPVKDGLLKPTCGRKVSLPNKALELKDRETFKAESPDKDGLLKPTCGRKVSLPNKALELKDRETLKAESPDNDGLLKPTCGRKVSLPNKALELKDRETFKAAQMFPSESKQKDDEENSWDFESFLETLLQNDVCLPKATHQKEFDTLSGKLEESPDKDGLLKPTCGMKISLPNKALELKDRETFKAEDVSSVESTFSLFGKPTTENSQSTKVEEDFNLTTKEGATKTVTGQQERDIGIIERAPQDQTNKMPTSELGRKEDTKSTSDSEIISVSDTQNYECLPEATYQKEIKTTNGKIEESPEKPSHFEPATEMQNSVPNKGLEWKNKQTLRADSTTLSKILDALPSCERGRELKKDNCEQITAKMEQTKNKFCVLQKELSEAKEIKSQLENQKAKWEQELCSVRLTLNQEEEKRRNVDILKEKIRPEEQLRKKLEVKQQLEQTLRIQDIELKSVTSNLNQVSHTHESENDLFHENCMLKKEIAMLKLEVATLKHQHQVKENKYFEDIKILQEKNAELQMTLKLKQKTVTKRASQYREQLKVLTAENTMLTSKLKEKQDKEILETEIESHHPRLASALQDHDQSVTSRKNQELAFHSAGDAPLQGIMNVDVSNTIYNNEVLHQPLYEAQRK

SEQ ID NO: 874865 - protein, 36 aa, Homo sapiens
LGVQAQWVYLELCVCTGVVGALRAMCVCSHVHRSGG

SEQ ID NO: 874866 - protein, 231 aa, Homo sapiens
  misc_feature (114)..(114): Xaa can be any naturally occurring amino acid
  misc_feature (119)..(119): Xaa can be any naturally occurring amino acid
WSVLELRSSASLIQLSLRASQPSAPPLAPPLTRRPPRAAEPMRARAPSRLRGVAVVPERPGLARAWPRHERGAAAELEEKAASEPEAGAMPEKRAGAQAAGAPGYKGFGDQVCXQCCYXSIFRLRFFCRWGPGWNKLPIVDGSTLNTFSQHTFLMNGLIQGVKGLLSFLSAPLIGALSDVWGRKPFLLGTVFFTCFPIPLMRISPWWYFAMISVSGVFSVTFSVIFAYVAD

SEQ ID NO: 874867 - protein, 108 aa, Homo sapiens
GHQEKQALICRGAAQGVGAGDVPRQTEADLPSSLGPLHPTHHHHLILGFMQSCLLGRFPYGKIQGVQILEAPDKCTPSLNSTRIKKGHPPSQAPALFRIRIVPGTGDG

SEQ ID NO: 874868 - protein, 145 aa, Homo sapiens
VLEHHLKRIRTQPLSSWVKGTSVSLPGAWTNVIGAEFPLLWDTSNRGVVSQRSLGFLNKNVTFWLPRNVKNKECDRVAALSPPDPCERIDIVFLGSRREREPHSLISQIFPKCYIPGTILGMNKRDKVLGLMNLTMSVCIGGKIR

SEQ ID NO: 874869 - protein, 31 aa, Homo sapiens
MTGDEDQGSNSNLGAIITGSLTSTLSPLENS

SEQ ID NO: 874870 - protein, 77 aa, Homo sapiens
MEKLMYFSRQGVKQTGEPPPSGISAIKRNPLLRPTTQKDGPELRTSPLLKPSHNDRPAAMETHLLVSRVTMAAWPPR

SEQ ID NO: 874871 - protein, 70 aa, Homo sapiens
IPTSEGVLDGYRDVAGPCTSPERRIQPSWSARAWGGSGRRASCSEELRCFQGHLPDMGHSPRLFQVEMRC

SEQ ID NO: 874872 - protein, 91 aa, Homo sapiens
LGAAMCRMMESSGPVQGAGPGPWDQANLSHTQLCPEGPLELQQNLSNTPALGPHLSVRTTARDENAKDTPGMRTGLSRWRGTTASGSHALP

SEQ ID NO: 874873 - protein, 52 aa, Homo sapiens
TIPTLGATVSRWHGESASDFPGQVFVTKPGCQGLVHISLSLLGWAGAVPLDI

SEQ ID NO: 874874 - protein, 111 aa, Homo sapiens
QWKREAVVTVEREDSGEVEGRRVGQSSPHWQGQLGRAGPAFVCPRAWACLVKSLHTPRAGASQCRSWKVTPHSAGDNAGGPGVLPGKSVLCPAIGFVAEAPPLSSGLTSGH

SEQ ID NO: 874875 - protein, 293 aa, Homo sapiens
REGQEWWRWSQGVCGFWVPTCISSTLTPSSCPVLLKVLAVRIDDLDHLPETTTIDASSIGIVQPELTLEQEDLAEGKHGKAAKRSHKRKQKPEEEAGAPVPEDATFSEYSEKETEFTGSVGDETNSAVQSIQQVVVTLGDPNVTTPSSSVGLTNITVTPITTAAATQFTNLQPVAVGHLTTPERQLQLDNSILTVTFDTVSGSAMLHNRQNDVQIHPQPEASNPQSVAHFINLTTLVNSITPLGSQLSDQHPLTWRAVPQTDVLPPPQPQAPPQQAAQPQVQAEQQQQQMYSY

SEQ ID NO: 874876 - protein, 178 aa, Homo sapiens
MQRVARLCVRSEPPCCPQGLLRVVSGFSAIQMYPFWLKPSQNPEWKKRGKSHIFLLFKLQFQRCTDVFIKEDIRSSHCGHQALWTHLSGEFVLDPWLRAAVDSSAIHWCESCGEATGKRSVPSAASLCPAWDCAGGSGVEGRPPVPLSFPFVASKGGRLMASPLEAASWAFPLDCERH

SEQ ID NO: 874877 - protein, 372 aa, Homo sapiens
GIKEYECKECHRRFAQKVNMLKHCKRHTGIKDFMCELCGKTFSERNTMETHKLIHTVGKQWTCSVCDKKYVTEYMLQKHVQLTHDKVEAQSCQLCGTKVSTRASMSRHMRRKHPEVLAVRIDDLDHLPETTTIDASSIGIVQPELTLEQEDLAEGKHGKAAKRSHKRKQKPEEEAGAPVPEDATFSEYSEKETEFTGSVGDETNSAVQSIQQVVVTLGDPNVTTPSSSVGLTNITVTPITTAAATQFTNLQPVAVGHLTTPERQLQLDNSILTVTFDTVSGSAMLHNRQNDVQIHPQPEASNPQSVAHFINLTTLVNSITPLGSQLSDQHPLTWRAVPQTDVLPPPQPQAPPQQAAQPQVQAEQQQQQMYSY

SEQ ID NO: 874878 - protein, 372 aa, Homo sapiens; identical to SEQ ID NO: 874877

SEQ ID NO: 874879 - protein, 237 aa, Homo sapiens
MKPIFLQPELTLEQEDLAEGKHGKAAKRSHKRKQKPEEEAGAPVPEDATFSEYSEKETEFTGSVGDETNSAVQSIQQVVVTLGDPNVTTPSSSVGLTNITVTPITTAAATQFTNLQPVAVGHLTTPERQLQLDNSILTVTFDTVSGSAMLHNRQNDVQIHPQPEASNPQSVAHFINLTTLVNSITPLGSQLSDQHPLTWRAVPQTDVLPPPQPQAPPQQAAQPQVQAEQQQQQMYSY

SEQ ID NO: 874880 - protein, 252 aa, Homo sapiens
RRPLRSRKMSRSGAAAEKADSRQRPQMKVNEYKENQNIAYVSLRPAQTTVLIKTAKVYLAPFSLSNYQLDQLMCPKSLSEKNSNNEVACKKTKIKKTCRRIIPPKMKNTSSKAESTLQNSSSAVHTESNKLQPKRTADAMNLSVDVESSQDGDSDEDTTPSLDFSGLSPYERKRLKNISENADFFASLQLSESAARLREMIEKRQPPKSKRKKPKRENGIGCRRSMRLLKVDPSGVSLPAAPTPPTLVADET

SEQ ID NO: 874881 - protein, 180 aa, Homo sapiens
MCPKSLSEKNSNNEVACKKTKIKKTCRRIIPPKMKNTSSKAESTLQNSSSAVHTESNKLQPKRTADAMNLSVDVESSQDGDSDEDTTPSLDFSGLSPYERKRLKNISENADFFASLQLSESAARLREMIEKRQPPKSKRKKPKRENGIGCRRSMRLLKVDPSGVSLPAAPTPPTLVADET

SEQ ID NO: 874882 - protein, 30 aa, Homo sapiens
MPGPVLGIVGTVERDVFDPKELLFQFRERD

SEQ ID NO: 874883 - protein, 75 aa, Homo sapiens
MRKSNHMLDIILPSWAESELQFKLLLLSLGFVCFQCGDIFQICSSPELGTPQLQLLSGQYLNIPTISEIECLPFL

SEQ ID NO: 874884 - protein, 61 aa, Homo sapiens
MCLISLHTQGTELRHYNSWSVSVSSWVLSRPPVTHRDPHMTSTQGPTPPAKPSADHNLQPA

SEQ ID NO: 874885 - protein, 131 aa, Homo sapiens
PRGHCPPAPAKPMHPENKLTNHGKTGNGGAQSQHQNVNQGPTCNVGSKGVGAGNHGAKANQISPSNSSLKNPQAGVPPFSSLKGKVKRDRSVSVDSGEQREAGTPSLDSEAKEVAPRSKRRCVLERKQPYS

SEQ ID NO: 874886 - protein, 118 aa, Homo sapiens
MLPFPASLQQGRPPRVGGGEQSLQAATGTVHLVASRDRMAGAAVQTSVESASQPARRVQPRLCPSSEPCSQTLPVSQLLWLLHALSRGNGFAPTSTRAQEGPENAHPCHTEHRPPCSP

SEQ ID NO: 874887 - protein, 46 aa, Homo sapiens
MSLKAPNRRPCQGGVAGQEAKSSPAITGNQRPNTPARERQGTVSCR

SEQ ID NO: 874888 - protein, 165 aa, Homo sapiens
MCSALPFRTPVCTAGGLGDSASRQERQIATCSASFGCVWNLDYPTFSYKWTLRACLEVLQGKPSSSIGYGRSLRLSCSFGRDAHEAVRKEGDTRLASQISRINPGDQWDDRCRSQIALISGSSTFNLLWNLHSFLRCCAIYIPTNSAQRFTLVHVSNDELKTFMF

SEQ ID NO: 874889 - protein, 111 aa, Homo sapiens
ARGPARGTSHAQLMQVEGKGEGCLDAGPVHPFHPIQHLVLVWVLSSSFSTHTHTHTRNTQSHTSDAAPHVSPTSAFVQPQPLSSLRVWPHPLALHFFPAILLRLSIVSIMI

SEQ ID NO: 874890 - protein, 101 aa, Homo sapiens
KCSSPLGPHTSVSKLSPCPVGLWWSGLLTLVLQQFLAAGRGGAGPHYPWWVCKMALSASFSPQVYVLLGPHRPGLGQHVPLSGLFYWLLRPLLGWASHLVG

SEQ ID NO: 874891 - protein, 62 aa, Homo sapiens
EDVTSIPGPAQSTISPDISTRTVSWFSTSPVMTESAEITMNTHTSPLGATTQGTSTLDTSST

SEQ ID NO: 874892 - protein, 154 aa, Homo sapiens
SIHGCEILALFSPTLSSRFLPHSVFCPYTICVFTMNCSGKSSRYTGFPGEEGQRETHGPRSTGRIFIPTLAPQSPAWAGLSTPLAPGAALLAMGSTGWSMARGTACPPSKDRTLCGSLRVPPPRHLVCSTPCPGSLVWQEQEGSCPLRARSSTP

SEQ ID NO: 874893 - protein, 82 aa, Homo sapiens
QAPSPWRCRAGARGRLASGCCGHWTTSHAAASAREASQLRAPGRCPDLGCGFQTSLTTACPRTPDPGEDVPGGQATGSRAQQ

SEQ ID NO: 874894 - protein, 73 aa, Homo sapiens
LQKVRTEAQRGGDGNGPGRRHGDSGGDKAQSNSGHNSRARGFADGLAKECKGTAEPRALQHLRRPGGPGRWCQ

SEQ ID NO: 874895 - protein, 91 aa, Homo sapiens
TSARLQDACTCGQPQMRPHLPFRCSPPNWGTRRLFREPDVMIRSFYDQVLNQSSLEALRHRQHGQDQPGSDRRTSGVRKVAGHGDLRASSG

SEQ ID NO: 874896 - protein, 81 aa, Homo sapiens
ACIPTVPSCPGAVSPSQRNCMESPHGSHWSQTSDSELLSLCWVRGSAFILGAKLNSNLDEHTRPLVELFLLPLKVLLRSCT

SEQ ID NO: 874897 - protein, 70 aa, Homo sapiens
MFTDTEFHEAVVSRKPAAHRVHNEFPSSCLFLRGENSVRECLKLQTFMGNLLLHPLLSLNSSSFPSPLTR

SEQ ID NO: 874898 - protein, 68 aa, Homo sapiens
LKDPRWVVLAGGAGGGFSFPPPAPYREDDGVLRNTDGNTGLPCAQVDVHLWVRWDISLLACVAVHLEI

SEQ ID NO: 874899 - protein, 31 aa, Homo sapiens
MSSGAEMQAGVGRCCPSCLAMATAQTTQPPP

SEQ ID NO: 874900 - protein, 109 aa, Homo sapiens
PARLNHMSYCPIPFSWIVPIICPSDPSSAGPTRQAQSRECEGRVSRCPAEASLGSLPKSTQKVLLSGPSHPLSNSTSGLAARNLALQGPSVRPSVRPSIHPSIHPSIQQ

SEQ ID NO: 874901 - protein, 103 aa, Homo sapiens
GRLVQTRKSGYFPSSSVKPCPVDGRPPISRPPSREIDYTAYPWFAGNMERHQTGQPAANSTSFETYRMSVQHPQADRTAICHHQFDDKMNAPSAHRCRTPWFR

SEQ ID NO: 874902 - protein, 79 aa, Homo sapiens
PSVCGWRPKAPWAAVSASSRALRPKNLESDVQQEEEEKQASGMGRRKRARRLSKHIYPSSSTRPVLAALAPDWIVPIHI

SEQ ID NO: 874903 - protein, 95 aa, Homo sapiens
MRCSVATQNEPWTHTARRMNMQTSGHVKGARPRGATLCDSGWSLCAQDPAASSSSWLQGVLVSEERQAGVPRGRLEGLRNHFHLLSPPCLHCLGL

SEQ ID NO: 874904 - protein, 146 aa, Homo sapiens
LEGLPLGIQYFEKLNPDFLLEIVMEYLSFCPMQPASPGQPLCPLLRRCISVLETVVRTVPGLLQTVFLIAKVKYLSGDIEAAFNNLQHCLEHNPSYADAHLLLAQVYLSQEKVKLCSQSLELCLSYDFKVRDYPLYHLIKAQSQKK

SEQ ID NO: 874905 - protein, 115 aa, Homo sapiens
GLRASDRQGWQGVRAFSRARGHTCKIIKVRKTTGREGMEVALHGRILRKRVTWHNWPWGTFLLSSVRSWGKREKAGSSSLWLSDRGQPPALSRWGHAEKLWRRAGEAVRRRSLRG

SEQ ID NO: 874906 - protein, 181 aa, Homo sapiens
CLSLVCTPVSRVSSPCCRVTCEPSPCQSGCTSSCTPSCCQQSSCQPACCTSSPCQQACCVPVCCKTVCCKPVCCMPVCCGPSSSCCQQSSCQPACCISSPCQQSCCVPVCCKPICCVPVCSGASSLCCQQSSCQPACCTTSCCRPSSSVSLLCRPVCRPACRVPVPSCCVPTSSCQPSCGR

SEQ ID NO: 874907 - protein, 63 aa, Homo sapiens
EKTLSLLPFGKQVCGIWRLGILFTHFDPAGAEITASFPSGLEMRRTRSTCGLKQSGPAGSPDQ

SEQ ID NO: 874908 - protein, 142 aa, Homo sapiens
MGIQPETTKQLRDANILKESKRSISREDKGNVLKLSGLIEDLEDRSGNLNAFSSEPQKERIERMEERPYFQNRKHDVFVRLKAFNECQDRPSKNTPKRKRKPQSHQKDKAVHPQRHENQTGIWFLISNTGCSKMVPWYFSKR

SEQ ID NO: 874909 - protein, 81 aa, Homo sapiens
  misc_feature (1)..(1): Xaa can be any naturally occurring amino acid
XGLAKPVGMPQRPTADYRFTEKRYWARSRNLYPSGNVPALSTMKNMNLRPEVTVSFKCICRSVVWQKCAEQRGVQDIGQGS

SEQ ID NO: 874910 - protein, 119 aa, Homo sapiens
WGLGRHLGTWILGGFLPPPDKNGSISPFTQIMWFMPNTCFPSVSLEFGYAPSRGCLCDQPPNKNPRHCVSYKLPWLATLNVLLQGTAGEIMSCVTPQGEASDAYTWLLPDFTPGTLSLC

SEQ ID NO: 874911 - protein, 50 aa, Homo sapiens
MGPEQRGSVGHGKSENLLNTQWKLGMSEKHKSGTLISTTVSLAAGSSRER

SEQ ID NO: 874912 - protein, 36 aa, Homo sapiens
MFPPTNQWVVECSTVSPPSGQGAAKGRGHDSFLYKP

SEQ ID NO: 874913 - protein, 81 aa, Homo sapiens
SPLVLCHSSQHSPPCHCVTVSPHCHHSSSAVPHSTACRVTVSPCHPTVTARPLLFVPAQPAVSLCHRVTPLSLLVLCCSSQ

SEQ ID NO: 874914 - protein, 66 aa, Homo sapiens
FTRGSHDTSRATTPGLQLRTRGTEAERLPLAPEQWVEEPLTQGQSCMKSTFCIHKIQQDVWRTRRA

SEQ ID NO: 874915 - protein, 48 aa, Homo sapiens
MAAEQANGFRYNQAHVAASSVPDTPVPALSTQAKPLHGLLSGKRWASF

SEQ ID NO: 874916 - protein, 151 aa, Homo sapiens
PNLCMKSISLVFLFSLKNISGFYWLPSISLPPSSSKPPYFLPGLLQLLSTTNSCYPVSICSQTGISFAMPTSLWNPLLIASPSVAYRVQHDLARLRPPPPLIVLQLVQGSWDSAVLSRSLPQGSKRTLSSSRCLMNSPHSCWTQTICLFLG

SEQ ID NO: 874917 - protein, 102 aa, Homo sapiens
RFANSFAPHNNPMRSVILSSFFKDEEIETERLVNFLKVPQLAYGKARFEPRQTSAASVLLSSSLSYSSFRPSSSPTYTIKATPFSLHKTLAKSTVPWRRREP

SEQ ID NO: 874918 - protein, 99 aa, Homo sapiens
EHFYVTGPKNPGPQQDTRVNAWSQRLTRRINFPSQSSFGLGLDMTYFSRLGLTRLCDEWTKYTSHNHSKKVKTGALKISRPNCQKTIIFTDKERETKYL

SEQ ID NO: 874919 - protein, 39 aa, Homo sapiens
GFLKGQFVPSPDIPMDRRGAVLVVFVMLQPSKNGSTGQS

SEQ ID NO: 874920 - protein, 132 aa, Homo sapiens
CRDGEDHRRRVLLPVPPALETSTPIPRCPSRPIVHVFKGAAWIGVCVCSAQVWWWHPEAVGPLVCVHTHVAHCVVTMVIIVGSRRKRDHSTYTKGTLDRLQGKRPRAKLLSQRWPLTPPPAPAHQPAPLIPC

SEQ ID NO: 874921 - protein, 118 aa, Homo sapiens
PQGSQAVPCPQVALLGQLPCPGTERLLGCTGTALAAQVQIWGKKRNFWQPTGQSLRVVCAQDEGPLIGTGRSRACCLRLCGSLKANQYDMGDRDEFEGLKCALVRRTDTWESSKSAVS

SEQ ID NO: 874922 - protein, 51 aa, Homo sapiens
RNEGVHLGRFGTDYLTIQGILAQVSMAAICFVDGYGWHFTHYLNFDIPTVD

SEQ ID NO: 874923 - protein, 70 aa, Homo sapiens
SAPPPGGSSDPGLWGLQNCIQALHLQSGTLHLQLGTLHLQLGTLRPDRGNDLCKGKQTVCDFFYASVMPR

SEQ ID NO: 874924 - protein, 213 aa, Homo sapiens
  misc_feature (163)..(163): Xaa can be any naturally occurring amino acid
  misc_feature (178)..(178): Xaa can be any naturally occurring amino acid
  misc_feature (199)..(199): Xaa can be any naturally occurring amino acid
  misc_feature (206)..(206): Xaa can be any naturally occurring amino acid
MASLTLNEELLYRVVPRDQDFQENYAGIFHFQFWQYGEWVEVVIDDRLPTMNGQLLFLHSEQGNEFWSALLEKAYAKLNGCYEALAGGSTVEGFEDFTGGISEFYDLKKPPANLYQIIRKALCAGSLLGCSIDVSSAAEAEPSPPDAGKSHAYSVTGVEEVNXQGHPEKLIKTQEYMXVKWKCPGAWTDDATKVDSIDXRPEGEPXKKVEGWR

SEQ ID NO: 874925 - protein, 121 aa, Homo sapiens
QDGLQRPGGPSVFLSLSLVPVLREKIQHGGQSKAPSLLCAGSSGFGVGNQNQGPRVRREPSALHPDQDGAALGRLGESPRRGFLARSWVCRVSLPMRMLRRTQVSHGLGTNPDLQRGPVVV

SEQ ID NO: 874926 - protein, 454 aa, Homo sapiens
MNLASQSGEAGAGQLLFANFNQDNTEVKGASRAAGLGRRAVVWSLAVGSKSGYKFFSLSSVDKLEQIYECTDTEDVCIVERLFSSSLVAIVSLKAPRKLKVCHFKKGTEICNYSYSNTILAVKLNRQRLIVCLEESLYIHNIRDMKVLHTIRETPPNPAGLCALSINNDNCYLAYPGSATIGEVQVFDTINLRAANMIPAHDSPLAALAFDASGTKLATASEKGTVIRVFSIPEGQKLFEFRRGVKRCVSICSLAFSMDGMFLSASSNTETVHIFKLETVKEKPPEEPTTWTGYFGKVLMASTSYLPSQVTEMFNQGRAFATVRLPFCGHKNICSLATIQKIPRLLVGAADGYLYMYNLDPQEGGECALMKQHRLDGSLETTNEILDSASHDCPLVTQTYGAAAGKGTYVPSSPTRLAYTDDLGAVGGACLEDEASALRLDEDSEHPPMILRTD

SEQ ID NO: 874927 - protein, 436 aa, Homo sapiens
MNLASQSGEAGAGQLLFANFNQDNTSLAVGSKSGYKFFSLSSVDKLEQIYECTDTEDVCIVERLFSSSLVAIVSLKAPRKLKVCHFKKGTEICNYSYSNTILAVKLNRQRLIVCLEESLYIHNIRDMKVLHTIRETPPNPAGLCALSINNDNCYLAYPGSATIGEVQVFDTINLRAANMIPAHDSPLAALAFDASGTKLATASEKGTVIRVFSIPEGQKLFEFRRGVKRCVSICSLAFSMDGMFLSASSNTETVHIFKLETVKEKPPEEPTTWTGYFGKVLMASTSYLPSQVTEMFNQGRAFATVRLPFCGHKNICSLATIQKIPRLLVGAADGYLYMYNLDPQEGGECALMKQHRLDGSLETTNEILDSASHDCPLVTQTYGAAAGKGTYVPSSPTRLAYTDDLGAVGGACLEDEASALRLDEDSEHPPMILRTD

SEQ ID NO: 874928 - protein, 150 aa, Homo sapiens
MKVLHTIRETPPNPAGLCALSINNDNCYLAYPGSATIGEVQVFDTINLRAANMIPAHDSPLAALAFDASGTKLATASEKGTVIRVFSIPEGQKLFEFRRGVKRGAWSLLLPWASAFDRLCPLRLPRTFATGHFLRPATRSKKAQEGPHRG

SEQ ID NO: 874929 - protein, 436 aa, Homo sapiens; identical to SEQ ID NO: 874927

SEQ ID NO: 874930 - protein, 436 aa, Homo sapiens; identical to SEQ ID NO: 874927

SEQ ID NO: 874931 - protein, 438 aa, Homo sapiens
MLLRLQRIKTLRPPGCPHPMTTCSAGTLSAVPCVSPRQVFVFERRFCLWHSHVEMFTHVLPFVISADTEDVCIVERLFSSSLVAIVSLKAPRKLKVCHFKKGTEICNYSYSNTILAVKLNRQRLIVCLEESLYIHNIRDMKVLHTIRETPPNPAGLCALSINNDNCYLAYPGSATIGEVQVFDTINLRAANMIPAHDSPLAALAFDASGTKLATASEKGTVIRVFSIPEGQKLFEFRRGVKRCVSICSLAFSMDGMFLSASSNTETVHIFKLETVKEKPPEEPTTWTGYFGKVLMASTSYLPSQVTEMFNQGRAFATVRLPFCGHKNICSLATIQKIPRLLVGAADGYLYMYNLDPQEGGECALMKQHRLDGSLETTNEILDSASHDCPLVTQTYGAAAGKAYTDDLGAVGGACLEDEASALRLDEDSEHPPMILRTD

SEQ ID NO: 874932 - protein, 186 aa, Homo sapiens [sequence omitted]

SEQ ID NO: 874933 - protein, 436 aa, Homo sapiens; identical to SEQ ID NO: 874927

SEQ ID NO: 874934 - protein, 310 aa, Homo sapiens
MKVLHTIRETPPNPAGLCALSINNDNCYLAYPGSATIGEVQVFDTINLRAANMIPAHDSPLAALAFDASGTKLATASEKGTVIRVFSIPEGQKLFEFRRGVKRCVSICSLAFSMDGMFLSASSNTETVHIFKLETVKEKPPEEPTTWTGYFGKVLMASTSYLPSQVTEMFNQGRAFATVRLPFCGHKNICSLATIQKIPRLLVGAADGYLYMYNLDPQEGGECALMKQHRLDGSLETTNEILDSASHDCPLVTQTYGAAAGKGTYVPSSPTRLAYTDDLGAVGGACLEDEASALRLDEDSEHPPMILRTD

SEQ ID NO: 874935 - protein, 387 aa, Homo sapiens
MARTDTEDVCIVERLFSSSLVAIVSLKAPRKLKVCHFKKGTEICNYSYSNTILAVKLNRQRLIVCLEESLYIHNIRDMKVLHTIRETPPNPAGLCALSINNDNCYLAYPGSATIGEVQVFDTINLRAANMIPAHDSPLAALAFDASGTKLATASEKGTVIRVFSIPEGQKLFEFRRGVKRCVSICSLAFSMDGMFLSASSNTETVHIFKLETVKEKPPEEPTTWTGYFGKVLMASTSYLPSQVTEMFNQGRAFATVRLPFCGHKNICSLATIQKIPRLLVGAADGYLYMYNLDPQEGGECALMKQHRLDGSLETTNEILDSASHDCPLVTQTYGAAAGKGTYVPSSPTRLAYTDDLGAVGGACLEDEASALRLDEDSEHPPMILRTD

SEQ ID NO: 874936 - protein, 310 aa, Homo sapiens; identical to SEQ ID NO: 874934

SEQ ID NO: 874937 - protein, 197 aa, Homo sapiens [sequence omitted]

SEQ ID NO: 874938 - protein, 419 aa, Homo sapiens
MNLASQSGEAGAGQLLFANFNQDNTSLAVGSKSGYKFFSLSSVDKLEQIYECTDTEDVCIVERLFSSSLVAIVSLKAPRKLKVCHFKKGTEICNYSYSNTILAVKLNRQRLIVCLEESLYIHNIRDMKVLHTIRETPPNPAGLCALSINNDNCYLAYPGSATIGEVQVFDTINLRAANMIPAHDSPLAALAFDASGTKLATASEKGTVIRVFSIPEGQKLFEFRRGVKRCVSICSLAFSMDGMFLSASSNTETVHIFKLETVKEKPPEEPTTWTGYFGKVLMASTSYLPSQVTEMFNQGRAFATVRLPFCGHKNICSLATIQKIPRLLVGAADGYLYMYNLDPQEGGECALMKQHRLDGSLETTNEILDSASHDCPLVTQTYGAAAGKGTYVPSSPTRLAYTDDLGAVGRPRVRDPRVR

SEQ ID NO: 874939 - protein, 121 aa, Homo sapiens [sequence omitted]

SEQ ID NO: 874940 - protein, 178 aa, Homo sapiens
MNLASQSGEAGAGQLLFANFNQDNTEVKGASRAAGLGRRAVVWSLAVGSKSGYKFFSLSSVDKLEQIYECTDTEDVCIVERLFSSSLVAIVSLKAPRKLKVCHFKKGTEICNYSYSNTILAVKLNRQRLIVCLEESLYIHNIRDMKVLPVCAVNQQRQLLLGVPRERDHRRGAGLRYH

SEQ ID NO: 874941 - protein, 436 aa, Homo sapiens; identical to SEQ ID NO: 874927

SEQ ID NO: 874942 - protein, 425 aa, Homo sapiens
MNLASQSGEAGAGQLLFANFNQDNTSLAVGSKSGYKFFSLSSVDKLEQIYECTDTEDVCIVERLFSSSLVAIVSLKAPRKLKVCHFKKGTEICNYSYSNTILAVKLNRQRLIVCLEESLYIHNIRDMKVLHTIRETPPNPAGLCALSINNDNCYLAYPGSATIGEVQVFDTINLRAANMIPAHDSPLAALAFDASGTKLATASEKGTVIRVFSIPEGQKLFEFRRGVKRCVSICSLAFSMDGMFLSASSNTETVHIFKLETVKEKPPEEPTTWTGYFGKVLMASTSYLPSQVTEMFNQGRAFATVRLPFCGHKNICSLATIQKIPRLLVGAADGYLYMYNLDPQEGGECALMKQHRLDGSLETTNEILDSASHDCPLVTQTYGAAAGKAYTDDLGAVGGACLEDEASALRLDEDSEHPPMILRTD

SEQ ID NO: 874943 - protein, 436 aa, Homo sapiens; identical to SEQ ID NO: 874927

SEQ ID NO: 874944 - protein, 436 aa, Homo sapiens; identical to SEQ ID NO: 874927

SEQ ID NO: 874945 - protein, 395 aa, Homo sapiens
FIDLFQLIPEETDTEDVCIVERLFSSSLVAIVSLKAPRKLKVCHFKKGTEICNYSYSNTILAVKLNRQRLIVCLEESLYIHNIRDMKVLHTIRETPPNPAGLCALSINNDNCYLAYPGSATIGEVQVFDTINLRAANMIPAHDSPLAALAFDASGTKLATASEKGTVIRVFSIPEGQKLFEFRRGVKRCVSICSLAFSMDGMFLSASSNTETVHIFKLETVKEKPPEEPTTWTGYFGKVLMASTSYLPSQVTEMFNQGRAFATVRLPFCGHKNICSLATIQKIPRLLVGAADGYLYMYNLDPQEGGECALMKQHRLDGSLETTNEILDSASHDCPLVTQTYGAAAGKGTYVPSSPTRLAYTDDLGAVGGACLEDEASALRLDEDSEHPPMILRTD

SEQ ID NO: 874946 - protein, 197 aa, Homo sapiens [sequence omitted]

SEQ ID NO: 874947 - protein, 155 aa, Homo sapiens [sequence omitted]

SEQ ID NO: 874948 - protein, 279 aa, Homo sapiens
MNLASQSGEAGAGQLLFANFNQDNTSLAVGSKSGYKFFSLSSVDKLEQIYECTDTEDVCIVERLFSSSLVAIVSLKAPRKLKVCHFKKGTEICNYSYSNTILAVKLNRQRLIVCLEESLYIHNIRDMKVLHTIRETPPNPAGLCALSINNDNCYLAYPGSATIGEVQVFDTINLRAANMIPAHDSPLAALAFDASGTKLATASEKGTVIRVFSIPEGQKLFEFRRGVKRCVSICSLAFSMDGMFLSASSNTETVHIFKLETVKEKPQRSHNWTGTREVS

SEQ ID NO: 874949 - protein, 160 aa, Homo sapiens
MEIIKDYIFPVDTTACGKSLAVGSKSGYKFFSLSSVDKLEQIYECTDTEDVCIVERLFSSSLVAIVSLKAPRKLKVCHFKKGTEICNYSYSNTILAVKLNRQRLIVCLEESLYIHNIRDMKVLHTIRETPPNPAGSADETDFKSIDPKPSCLPTDAGHVT

SEQ ID NO: 874950 - protein, 146 aa, Homo sapiens
RHRSGGKAGLRGASDRWPLWWSWGSSRHTSPEDPEAASRRRNALIVSLSLCLSISVSLRLCLSLHLCLPVSLSVSVSLCLCLSISFSVSLCLSVCLSVSPSVSLSLFPSLSLHLCLCPCLCLSVFLCVCLCLSPSLSVSVPVSVSL

SEQ ID NO: 874951 - protein, 75 aa, Homo sapiens
VRLLLLHGVVAKVNNIFVGKDLRKGAKVAQLLSTQWADLICIPTLCWPWVLASMCHSASAGRPVILSTFAHFLLH

SEQ ID NO: 874952 - protein, 176 aa, Homo sapiens
RGRYTHTRRSARALGIGKRCGFQPRDSGRAKIRVTASVPPSVKWDPGGSDPQGCGWRQRRSSGLRTPGPRDPPVPLWKLARGPEGGSPGHLPRPLTQVWMFPEAQGHHWAPPGTDERPLAGKGAGSGRQQAPEPPAHAGTGSPSNAPPSNFSTRDGKRREKEERFPPKLHCGRIPL

SEQ ID NO: 874953 - protein, 67 aa, Homo sapiens
QSPRQCEQGRGLYACVRMFFSSKRQLWAIGPGTQDLDNHHHSPTHSPVSVAVKVTGQKRQASTLSMP

SEQ ID NO: 874954 - protein, 71 aa, Homo sapiens
SHVVTEGLGPRHRVQSVLEVSEELLESKLRAVSSPHPPWVPAPELGCAQPPSDSEAVHTRVLLKDSGFCFL

SEQ ID NO: 874955 - protein, 70 aa, Homo sapiens
RALLGMSIVRHHRGHQGLVERESKAPGLLREGPDRRRFGGKQNLCLLIAPKPHAPLPRLSCCFPDLLRDL

SEQ ID NO: 874956 - protein, 286 aa, Homo sapiens
MSWLLFLAHRVALAALPCRRGSRGFGMFYAVRRGRKTGVFLTWNECRAQVDRFPAARFKKFATEDEAWAFVRKSASPEVSEGHENQHGQESEAKASKRLREPLDGDGHESAEPYAKHMKPSVEPAPPVSRDTFSYMGDFVVVYTDGCCSSNGRRRPRAGIGVYWGPGHPLNVGIRLPGRQTNQRAEIHAACKAIEQAKTQNINKLVLYTDSMFTINGITNWVQGWKKNGWKTSAGKEVINKEDFVALERLTQGMDIQWMHVPGHSGFIGNEEADRLAREGAKQSED

SEQ ID NO: 874957 - protein, 275 aa, Homo sapiens
MSWLLFLAHRVALAALPCRRGSRGFGMFYAVRRGRKTGVFLTWNECRAQVDRFPAARFKKFATEDEAWAFVRKSASPEVSEGHENQHGQESEAKASKRLREPLDGDGHESAEPYAKHMKPSVEPAPPVSRDTFSYMGDFVVVYTDGCCSSNGRRRPRAGIGVYWGPGHPLNVGIRLPGRQTNQRAEIHAACKAIEQAKTQNINKLVLYTDSMFTINGITNWVQGWKKNGWKTSAGKEVINKEDFVALERLTQGMDIQWNEEADRLAREGAKQSED

SEQ ID NO: 874958 - protein, 170 aa, Homo sapiens
MSWLLFLAHRVALAALPCRRGSRGFGMFYAVRRGRKTGVFLTWNECRAQVDRFPAARFKKFATEDEAWAFVRKSASPEVSEGHENQHGQESEAKASKRLREPLDGDGHESAEPYAKHMKPSVEPAPPVSRDTFSYMGDFVVVYTDGCCSSNGRRRPRAGIGVYWGPGHPL

SEQ ID NO: 874959 - protein, 286 aa, Homo sapiens; identical to SEQ ID NO: 874956

SEQ ID NO: 874960 - protein, 73 aa, Homo sapiens
GDRKCGVERRRLAPTLGRESKCFPVPGVSDELASVPGPQSRLGRLALPPRLSRVRDVLCREEGPQDRGLSDLE

SEQ ID NO: 874961 - protein, 105 aa, Homo sapiens
TAHTDLFPASAGPQIPVQTGLFHAHVHTHIHEGCCQQISLFLKPSISLPLCLLILVNVHLRGHFNKLSSIHPFKTFHFLQFSLDIPLGLLYKCHVHHALASPSLL

SEQ ID NO: 874962 - protein, 241 aa, Homo sapiens
FFHPSPPPSSPETRDFATTSIGDAELRGTGLRRDGSKKCCGNRQAMNQADPRLRAVCLWTLTSAAMSRGDNCTDLLALGIPSITQAWGLWVLLGAVTLLFLISLAAHLSQWTRGRSRSHPGQGRSGESVEEVPLYGNLHYLQTGRLSQDPEPDQQDPTLGGPARAAEEVMCYTSLQLRPPQGRIPGPGTPVKYSEVVLDSEPKSQASGPEPELYASVCAQTRRARASFPDQAYANSQPAAS

SEQ ID NO: 874963 - protein, 127 aa, Homo sapiens
MCPDPQGPGLLPGSGLCQQPACSQLRWRAWHSGACTAPAPRSRGMTVSQPAPKDGRHCQVTGCDLPRTSYLSFKGDISGQSFRDGGGKDSSPLLISFFYLFLLAPKLPGSHFLLLEFNQILPTPAPS

SEQ ID NO: 874964 - protein, 127 aa, Homo sapiens; identical to SEQ ID NO: 874963

SEQ ID NO: 874965 - protein, 139 aa, Homo sapiens
RRAGMGVEGGGGKRKSGLLWVLGLSQGWGRGTDGPYLGPFPYTCPYSWSASQWSSQSPPDPHPGTLPHVLSVGGRTSENTIDLALRGSQLNEADAVYLQRGGEPVSTCLHMQDPLFWGKTITPTCLIIDMSQESSQMGY

SEQ ID NO: 874966 - protein, 69 aa, Homo sapiens
WAVRSHLHLMDSVARVEVRVPGRVPRIGFRVYSSHGGSEWAELGLESGIRIVVLSPRYWDGSWESMLWF

SEQ ID NO: 874967 - protein, 104 aa, Homo sapiens
HHHHHHSHYYITITIIITIITITTVIIIAIITTTIITTIITIRITIIINIIIVAAVIHEIPQCTKYFPVFYSFGQYFLYPSDVPWTIMGLGKSVTQLNNQRYNV

SEQ ID NO: 874968 - protein, 75 aa, Homo sapiens
MAALSRLASFRVQLSSASSLFGKVVMRIKLVAAMAGRASTMKSWMLLILWLWLNFCTSLPPSASRIWMFVVVSDS

SEQ ID NO: 874969 - protein, 46 aa, Homo sapiens
ARKLIGDPNLEFVAMPALAPPEVVMDPALAAQYEHDLEVAQTTALP

SEQ ID NO: 874970 - protein, 106 aa, Homo sapiens
MPAALSVAGLLSLWGLVLFFPGPQRCLYALSVVGRSLCGGRSLCGGSAPCLFLCTSSSLNYAHLGRTRSSDAGRGSLHVRPALGLHVDNQLHTSSLMAILLGFGFY

SEQ ID NO: 874971 - protein, 86 aa, Homo sapiens
VLLLPSPPWDLDFASASVSIASSTSDTLSVKQQPGIGWPFCTLLPDPALAGSPTLPLGPGSSLSHDRPQAPLLSPRPLWKRFTSSS

SEQ ID NO: 874972 - protein, 71 aa, Homo sapiens
MALEEELGEGTGRGEGLQGVGDRKARLHTIALCRATVVLLNILATAAWLPKLTKRRTDCEVNFVPRAGKCG

SEQ ID NO: 874973 - protein, 106 aa, Homo sapiens [sequence omitted]

SEQ ID NO: 874974 - protein, 101 aa, Homo sapiens
MCRENNSKLYLNVQRGNNTRILSQTEMSRLISVSGNKGLQACVYSLFSAPSCAPVKGLLDRKCYSLGSKDRTSWGLSVLEHFTVSLRILRSNQKQGYRARN

SEQ ID NO: 874975 - protein, 103 aa, Homo sapiens
ELGPLMTEFPMNRSSQEHFSQLWLPWRPLSSFFAQLCLCRHAAALGSEALCSCTTEKQCQESQQCHESPQCLASKVPRFWEPWKGPWKIISPIQSLHLPETLP

SEQ ID NO: 874976 - protein, 210 aa, Homo sapiens
  misc_feature (16)..(16): Xaa can be any naturally occurring amino acid
DNNTARTSKKTLALTXAGGFHWHEGFPAPVPDPAAAEMLMPKKNRIAIYELLFKEGVMVAKKDVHMPKHPELADKNVPNLHKNVPNLHVMKAMQSLKSRGYVKEQFAWRHFYWYLTNEGIQYLRDYLHLPPEIVPATLRRSRPETGRPRPKGLEGERPARTHREGKLTEIPTDGVLCHLVPTRKPRLGLGQQPNSSFRGGFGRGRGQPPQ

SEQ ID NO: 874977 - protein, 230 aa, Homo sapiens
KDGPPTALVHLIVVSTTGLYPWKSRSLVSECSCWGRPTRKCAGLVPNSARADPAAAEMLMPKKNRIAIYELLFKEGVMVAKKDVHMPKHPELADKNVPNLHKNVPNLHVMKAMQSLKSRGYVKEQFAWRHFYWYLTNEGIQYLRDYLHLPPEIVPATLRRSRPETGRPRPKGLEGERPARTHREGKLTEIPTDGVLCHLVPTRKPRLGLGQQPNSSFRGGFGRGRGQPPQ

SEQ ID NO: 874978 - protein, 574 aa, Homo sapiens
MDQQYARVLVDSFLGEVDLYIPGGGGLIPGGGMPTGVPRAEGSPIGGPVGGLIPGSEAPSLTVDIGSGGTAVVTVGKSSKMLPHTDHRMRRILQDGRVFIGTFKAFDKHMNMIPCDCDEFRKMKLKNGSNQHVKKSGFRAPPLLKKLAGGATLTAIAQSLVTRPGHTRPHRDKKRNVLAKTLTGGEGENGCLCQIARHERTPAGPPQVHQPTRKSQRGLAGKDLSLQPPLQEEPRDPRIPDKEAGGVPCCDPETACSLTLHFHETLSLPLLQQKPSAGGERVGSVETGSDPATLGSCAHAAPPPFPAGLHLAGQPTGLTVASVPGVVHGGLGQPEQWDMLPSYPAPPATNTNWNVLSHLQTSHPLGFGAQRSGCPGERRERRRLRESTDMSQTEIKQSHTAPDPAAAEMLMPKKNRIAIYELLFKEGVMVAKKDVHMPKHPELADKNVPNLHVMKAMQSLKSRGYVKEQFAWRHFYWYLTNEGIQYLRDYLHLPPEIVPATLRRSRPETGRPRPKGLEGERPARTHREGKLTEIPTDGVLCHLVPTRKPRLGLGQQPNSSFRGGFGRGRGQPPQ

SEQ ID NO: 874979 - protein, 235 aa, Homo sapiens
EITASALQPGRQSETVSKHGAGETGYVHANEMKVGPLLHAKINSKHIKDLYIRMKTSCPAPAPDPAAAEMLMPKKNRIAIYELLFKEGVMVAKKDVHMPKHPELADKNVPNLHVMKAMQSLKSRGYVKEQFAWRHFYWYLTNEGIQYLRDYLHLPPEIVPATLRRSRPETGRPRPKGLEGERPARTHREGKLTEIPTDGVLCHLVPTRKPRLGLGQQPNSSFRGGFGRGRGQPPQ

SEQ ID NO: 874980 - protein, 204 aa, Homo sapiens
AGGGSTPARKRRSTAHAPSFPAPVPDPAAAEMLMPKKNRIAIYELLFKEGVMVAKKDVHMPKHPELADKNVPNLHKNVPNLHVMKAMQSLKSRGYVKEQFAWRHFYWYLTNEGIQYLRDYLHLPPEIVPATLRRSRPETGRPRPKGLEGERPARTHREGKLTEIPTDGVLCHLVPTRKPRLGLGQQPNSSFRGGFGRGRGQPPQ

SEQ ID NO: 874981 - protein, 210 aa, Homo sapiens; identical to SEQ ID NO: 874976
  misc_feature (16)..(16): Xaa can be any naturally occurring amino acid

SEQ ID NO: 874982 - protein, 173 aa, Homo sapiens
MLMPKKNRIAIYELLFKEGVMVAKKDVHMPKHPELADKNVPNLHKNVPNLHVMKAMQSLKSRGYVKEQFAWRHFYWYLTNEGIQYLRDYLHLPPEIVPATLRRSRPETGRPRPKGLEGERPARTHREGKLTEIPTDGVLCHLVPTRKPRLGLGQQPNSSFRGGFGRGRGQPPQ

SEQ ID NO: 874983 - protein, 173 aa, Homo sapiens; identical to SEQ ID NO: 874982

SEQ ID NO: 874984 - protein, 188 aa, Homo sapiens
FAAASTTEGSFPAPVPDPAAAEMLMPKKNRIAIYELLFKEGVMVAKKDVHMPKHPELADKNVPNLHVMKAMQSLKSRGYVKEQFAWRHFYWYLTNEGIQYLRDYLHLPPEIVPATLRRSRPETGRPRPKGLEGERPARTHREGKLTEIPTDGVLCHLVPTRKPRLGLGQQPNSSFRGGFGRGRGQPPQ

SEQ ID NO: 874985 - protein, 235 aa, Homo sapiens; identical to SEQ ID NO: 874979

SEQ ID NO: 874986 - protein, 201 aa, Homo sapiens
KDRFPQRLVHLIVVSTTGLYSMEEPLVGLGMQLLGPTHPQMRRPRAEFGTSKEGVMVAKKDVHMPKHPELADKNVPNLHVMKAMQSLKSRGYVKEQFAWRHFYWYLTNEGIQYLRDYLHLPPEIVPATLRRSRPETGRPRPKGLEGERPARTHREGKLTEIPTDGVLCHLVPTRKPRLGLGQQPNSSFRGGFGRGRGQPPQ

SEQ ID NO: 874987 - protein, 181 aa, Homo sapiens
TRGSTHASPDPAAAEMLMPKKNRIAIYELLFKEGVMVAKKDVHMPKHPELADKNVPNLHVMKAMQSLKSRGYVKEQFAWRHFYWYLTNEGIQYLRDYLHLPPEIVPATLRRSRPETGRPRPKGLEGERPARTHREGKLTEIPTDGVLCHLVPTRKPRLGLGQQPNSSFRGGFGRGRGQPPQ

SEQ ID NO: 874988 - protein, 181 aa, Homo sapiens; identical to SEQ ID NO: 874987

SEQ ID NO: 874989 - protein, 181 aa, Homo sapiens; identical to SEQ ID NO: 874987

SEQ ID NO: 874990 - protein, 181 aa, Homo sapiens; identical to SEQ ID NO: 874987

SEQ ID NO: 874991 - protein, 102 aa, Homo sapiens
MSFVQGGMAVDGRSRKRFLLLPPEIVPATLRRSRPETGRPRPKGLEGERPARTHREGKLTEIPTDGVLCHLVPTRKPRLGLGQQPNSSFRGGFGRGRGQPPQ

SEQ ID NO: 874992 - protein, 173 aa, Homo sapiens; identical to SEQ ID NO: 874982

SEQ ID NO: 874993 - protein, 137 aa, Homo sapiens
MAIRFFLGKNVPNLHVMKAMQSLKSRGYVKEQFAWRHFYWYLTNEGIQYLRDYLHLPPEIVPATLRRSRPETGRPRPKGLEGERPARTHREGKLTEIPTDGVLCHLVPTRKPRLGLGQQPNSSFRGGFGRGRGQPPQ

SEQ ID NO: 874994 - protein, 164 aa, Homo sapiens
MPKKNRIAIYELLFKEGVMVAKKDVHMPKHPELADKNVPNLHVMKAMQSLKSRGYVKEQFAWRHFYWYLTNEGIQYLRDYLHLPPEIVPATLRRSRPETGRPRPKGLEGERPARTHREGKLTEIPTDGVLCHLVPTRKPRLGLGQQPNSSFRGGFGRGRGQPPQ

SEQ ID NO: 874995 - protein, 173 aa, Homo sapiens; identical to SEQ ID NO: 874982

SEQ ID NO: 874996 - protein, 230 aa, Homo sapiens; identical to SEQ ID NO: 874977

SEQ ID NO: 874997 - protein, 181 aa, Homo sapiens; identical to SEQ ID NO: 874987

SEQ ID NO: 874998 - protein, 166 aa, Homo sapiens
MLMPKKNRIAIYELLFKEGVMVAKKDVHMPKHPELADKNVPNLHVMKAMQSLKSRGYVKEQFAWRHFYWYLTNEGIQYLRDYLHLPPEIVPATLRRSRPETGRPRPKGLEGERPARTHREGKLTEIPTDGVLCHLVPTRKPRLGLGQQPNSSFRGGFGRGRGQPPQ

SEQ ID NO: 874999 - protein, 146 aa, Homo sapiens
MVAKKDVHMPKHPELADKNVPNLHVMKAMQSLKSRGYVKEQFAWRHFYWYLTNEGIQYLRDYLHLPPEIVPATLRRSRPETGRPRPKGLEGERPARTHREGKLTEIPTDGVLCHLVPTRKPRLGLGQQPNSSFRGGFGRGRGQPPQ

SEQ ID NO: 875000 - protein, 181 aa, Homo sapiens; identical to SEQ ID NO: 874987

SEQ ID NO: 875001 - protein, 181 aa, Homo sapiens; identical to SEQ ID NO: 874987

SEQ ID NO: 875002 - protein, 166 aa, Homo sapiens; identical to SEQ ID NO: 874998

SEQ ID NO: 875003 - protein, 168 aa, Homo sapiens
  misc_feature (8)..(9): Xaa can be any naturally occurring amino acid
SKGSRVDXXRLAHTRGVFKEGVMVAKKDVHMPKHPELADKNVPNLHVMKAMQSLKSRGYVKEQFAWRHFYWYLTNEGIQYLRDYLHLPPEIVPATLRRSRPETGRPRPKGLEGERPARTHREGKLTEIPTDGVLCHLVPTRKPRLGLGQQPNSSFRGGFGRGRGQPPQ

SEQ ID NO: 875004 - protein, 201 aa, Homo sapiens; identical to SEQ ID NO: 874986

SEQ ID NO: 875005 - protein, 169 aa, Homo sapiens
PRPRSRPVGNPGCRLRTEGRVKPPAGPGRGKVAPAPQLLPGPALWCWGPGFSSSGWRGHRAACLRAVWSSQSCRCGQLRARGREGALCPGQQLKEPRASQPLLGDQVLLRGSCPLPVQRVWALLPRGGGGAGEWNDPHRSYLYPGLSPRTDTPAPTWLQRPSPVRSPVC

SEQ ID NO: 875006 - protein, 101 aa, Homo sapiens
MPSVLFSQGTTSSSPARVRRAPSLSQALPIHSSARGSSDTSTCHSFSAVQVCTATPAQAGSSGPALLHTDLSHCLDCLAASLRPGIPALLSGGPPWCPAHL

SEQ ID NO: 875007 - protein, 160 aa, Homo sapiens [sequence omitted]

SEQ ID NO: 875008 - protein, 337 aa, Homo sapiens
AELAGPAPPWGRAGTHAGGRGDRSRAPMAGAAMAERGRVPPPAPAPSTEGLPRAFLQSLRTLFDILDDRRRGCVHLREIESRWQGTDARELPRGVLEGLRQVAPASGYLTFERFVAGLRTSLLSADGAPGTPRAPRPGPGISRRRRRSAWCSLRPTSRGRSWRGSPCPWACAPLWPVPAPPPAARSSCAPRLRRRPAPRSPSGSQSAALEPSSSADAGAVACRALEADSGDARRAPRARGERRRHTIASGVDCGLLKQMKELEQEKEVLLQGLEMMARGRDWYQQQLQRVQERQRRLGQSRASADFGAAGSPRPLGRLLPKVQEVARCLGELLAAAC

SEQ ID NO: 875009 - protein, 77 aa, Homo sapiens
FLEGSNFHTQWICHGNTEYVHKSPVGSGKVRNFENASHCLRTDAAPNSISPWNQHGCRNIFSLPVKDTPQQSGPFRS

SEQ ID NO: 875010 - protein, 118 aa, Homo sapiens
SDRWGPDICILNDPLGVVCGRWAFYGVRKFGTCGPFPAALLQERNGSPGLEPRALPPEAVWAGIEGGGARRCGTGWWTLAPAESGLEGRLLHTCRHSCPTLCPGGPHLKATLKFPVNT

SEQ ID NO: 875011 - protein, 124 aa, Homo sapiens
FWGSGWVAASAVRPRRGSGALSGVRGVDAARSRHTSTLLPRLFSVLLGIAHHPPPAFSGLVLHFLSSPLLRLLSLFGQTSLSEAPGFLGCSCEWHSRALPARPLRQPPPPVLGAALRSLKPCPL

SEQ ID NO: 875012 - protein, 138 aa, Homo sapiens
LPGSFRRPGYHLRHGDKSRDGVQGFPRLRRFLTWRDCRLVGTTQASGSLSVVVNRPSSWQSRLPKPHVLLIRDKLFLERSSLRAAADLYCLEEHFHSARKNTIKLTQGNNHGFSRLGASVWNRLGFFMLVGNLKQLLI

SEQ ID NO: 875013 - protein, 138 aa, Homo sapiens; identical to SEQ ID NO: 875012

SEQ ID NO: 875014 - protein, 123 aa, Homo sapiens
MEVYLSSHLLAFHQGHRPISEWFHSHGIWVDLLGEDQAWSNGPDVNLSCHWVHTSASSIHSTLQVWGVHVTVPTVSHNILQCTQVDQNYQEGSGQSRSVKGTETEWQKKRSGLHEASSPGGVV

SEQ ID NO: 875015 - protein, 44 aa, Homo sapiens
LVLDILPPLGHLHDSTLGWTALNAQKFGQVFPNWSLLKLINKTT

SEQ ID NO: 875016 - protein, 74 aa, Homo sapiens
GTQAPILLLCHATPAFPRLLMTQDGCCSTSHHIDVSTSSNEERVMQSQLPPVRTLTKHMCTIPHLYPIVWGFVT

SEQ ID NO: 875017 - protein, 113 aa, Homo sapiens
FCYQIKTNTFLGKERLYSQGSLQQEEGEYCNRENHPTTRATSISKTREKKISFYGEGSTKLERYQYGDRKITMKCFTQGQLILRRVVCWVRRRIDQNSRAWKRKRNLTDIRSS

SEQ ID NO: 875018 - protein, 1178 aa, Homo sapiens
WLPCGSSVVPATPGSPPSRFWLLPAMALRVLLLTALTLCHGFNLDTENAMTFQENARGFGQSVVQLQGSRVVVGAPQEIVAANQRGSLYQCDYSTGSCEPIRLQVPVEAVNMSLGLSLAATTSPPQLLACGPTVHQTCSENTYVKGLCFLFGSNLRQQPQKFPEALRGCPQEDSDIAFLIDGSGSIIPHDFRRMKEFVSTVMEQLKKSKTLFSLMQYSEEFRIHFTFKEFQNNPNPRSLVKPITQLLGRTHTATGIRKVVRELFNITNGARKNAFKILVVITDGEKFGDPLGYEDVIPEADREGVIRYVIGVGDAFRSEKSRQELNTIASKPPRDHVFQVNNFEALKTIQNQLREKIFAIEGTQTGSSSSFEHEMSQEGFSAAITSNGPLLSTVGSYDWAGGVFLYTSKEKSTFINMTRVDSDMNDAYLGYAAAIILRNRVQSLVLGAPRYQHIGLVAMFRQNTGMWESNANVKGTQIGAYFGASLCSVDVDSNGSTDLVLIGAPHYYEQTRGGQVSVCPLPRGQRARWQCDAVLYGEQGQPWGRFGAALTVLGDVNGDKLTDVAIGAPGEEDNRGAVYLFHGTSGSGISPSHSQRIAGSKLSPRLQYFGQSLSGGQDLTMDGLVDLTVGAQGHVLLLRSQPVLRVKAIMEFNPREVARNVFECNDQVVKGKEAGEVRVCLHVQKSTRDRLREGQIQSVVTYDLALDSGRPHSRAVFNETKNSTRRQTQVLGLTQTCETLKLQLPNCIEDPVSPIVLRLNFSLVGTPLSAFGNLRPVLAEDAQRLFTALFPFEKNCGNDNICQDDLSITFSFMSLDCLVVGGPREFNVTVTVRNDGEDSYRTQVTFFFPLDLSYRKVSTLQNQRSQRSWRLACESASSTEVSGALKSTSCSINHPIFPENSEVTFNITFDVDSKASLGNKLLLKANVTSENNMPRTNKTEFQLELPVKYAVYMVVTSHGVSTKYLNFTASENTSRVMQHQYQVSNLGQRSLPISLVFLVPVRLNQTVIWDRPQVTFSENLSSTCHTKERLPSHSDFLAELRKAPVVNCSIAVCQRIQCDIPFFGIQEEFNATLKGNLSFDWYIKTSHNHLLIVSTAEILFNDSVFTLLPGQGAFVRSQTETKVEPFEVPNPLPLIVGSSVGGLLLLALITAALYKLGFFKRQYKDMMSEGGPPGAEPQ

SEQ ID NO: 875019 - protein, 1178 aa, Homo sapiens; identical to SEQ ID NO: 875018

SEQ ID NO: 875020 - protein, 1185 aa, Homo sapiens
ADSDGAVHHGGLPKLSQKVGVRGQALLGVARTREVLGEGDLGAVPYDSLVQPDGHQEHQADGEAPLPQVADLILMLHDPTGILRGREVEIFSGDPMAGDHHVDSIFHRQLQLEFGFVGSGHVVLTGHIGLEEQFVSKGSLRVYINVILKVTSEFSGKMGWFMLLLLLFKAPDTSVEEADSQARRQDRCERWFWSCGHLPVGQVKREEEGDLCPVGVLTIISHSHCHVELPGPTHHEAVQAHETEGDAEVILADVVIATILLKGKQGCEESLSILRQHCRRFPKADNGVPTREKFGDPLGYEDVIPEADREGVIRYVIGVGDAFRSEKSRQELNTIASKPPRDHVFQVNNFEALKTIQNQLREKIFAIEGTQTGSSSSFEHEMSQEGFSAAITSNGPLLSTVGSYDWAGGVFLYTSKEKSTFINMTRVDSDMNDAYLGYAAAIILRNRVQSLVLGAPRYQHIGLVAMFRQNTGMWESNANVKGTQIGAYFGASLCSVDVDSNGSTDLVLIGAPHYYEQTRGGQVSVCPLPRGQRARWQCDAVLYGEQGQPWGRFGAALTVLGDVNGDKLTDVAIGAPGEEDNRGAVYLFHGTSGSGISPSHSQRIAGSKLSPRLQYFGQSLSGGQDLTMDGLVDLTVGAQGHVLLLRSQPVLRVKAIMEFNPREVARNVFECNDQVVKGKEAGEVRVCLHVQKSTRDRLREGQIQSVVTYDLALDSGRPHSRAVFNETKNSTRRQTQVLGLTQTCETLKLQLPNCIEDPVSPIVLRLNFSLVGTPLSAFGNLRPVLAEDAQRLFTALFPFEKNCGNDNICQDDLSITFSFMSLDCLVVGGPREFNVTVTVRNDGEDSYRTQVTFFFPLDLSYRKVSTLQNQRSQRSWRLACESASSTEVSGALKSTSCSINHPIFPENSEVTFNITFDVDSKASLGNKLLLKANVTSENNMPRTNKTEFQLELPVKYAVYMVVTSHGVSTKYLNFTASENTSRVMQHQYQVSNLGQRSLPISLVFLVPVRLNQTVIWDRPQVTFSENLSSTCHTKERLPSHSDFLAELRKAPVVNCSIAVCQRIQCDIPFFGIQEEFNATLKGNLSFDWYIKTSHNHLLIVSTAEILFNDSVFTLLPGQGAFVRSQTETKVEPFEVPNPLPLIVGSSVGGLLLLALITAALYKLGFFKRQYKDMMSEGGPPGAEPQ

SEQ ID NO: 875021 - protein, 634 aa, Homo sapiens
ADSDGAVHHGGLPKLSQKVGVRGQALLGVARTREVLGEGDLGAVPYDSLVQPDGHQEHQADGEAPLPQVADLILMLHDPTGILRGREVEIFSGDPMAGDHHVDSIFHRQLQLEFGFVGSGHVVLTGHIGLEEQFVSKGSLRVYINVILKVTSEFSGKMGWFMLLLLLFKAPDTSVEEADSQARRQDRCERWFWSCGHLPVGQVKREEEGDLCPVGVLTIISHSHCHVELPGPTHHEAVQAHETEGDAEVILADVVIATILLKGKQGCEESLSILRQHCRRFPKADNGVPTREKFGDPLGYEDVIPEADREGVIRYVIGVGDAFRSEKSRQELNTIASKPPRDHVFQVNNFEALKTIQNQLREKIFAIEGTQTGSSSSFEHEMSQEGFSAAITSNGPLLSTVGSYDWAGGVFLYTSKEKSTFINMTRVDSDMNDAYLGYAAAIILRNRVQSLVLGAPRYQHIGLVAMFRQNTGMWESNANVKGTQIGAYFGASLCSVDVDSNGSTDLVLIGAPHYYEQTRGGQVSVCPLPRGQRARWQCDAVLYGEQGQPWGRFGAALTVLGDVNGDKLTDVAIGAPGEEDNRGAVYLFHGTSGSGISPSHSQVRPGHCPCHDSSLFVDLSPNSVCPQLPAPGLK

SEQ ID NO: 875022 - protein, 139 aa, Homo sapiens
LVSPLYTKERLPSHSTFWLSFGRPPWLEEFNATLKGNLSFDWYIKTSHNHLLIVSTAEILFNDSVFTLLPGQGAFVRSQTETKVEPFEVPNPLPLIVGSSVGGLLLLALITAALYKLGFFKRQYKDMMSEGGPPGAEPQ

SEQ ID NO: 875023 - protein, 1101 aa, Homo sapiens
MIELGTDYAPRRQCDYSTGSCEPIRLQVPVEAVNMSLGLSLAATTSPPQLLACGPTVHQTCSENTYVKGLCFLFGSNLRQQPQKFPEALRGCPQEDSDIAFLIDGSGSIIPHDFRRMKEFVSTVMEQLKKSKTLFSLMQYSEEFRIHFTFKEFQNNPNPRSLVKPITQLLGRTHTATGIRKVVRELFNITNGARKNAFKILVVITDGEKFGDPLGYEDVIPEADREGVIRYVIGVGDAFRSEKSRQELNTIASKPPRDHVFQVNNFEALKTIQNQLREKIFAIEGTQTGSSSSFEHEMSQEGFSAAITSNGPLLSTVGSYDWAGGVFLYTSKEKSTFINMTRVDSDMNDAYLGYAAAIILRNRVQSLVLGAPRYQHIGLVAMFRQNTGMWESNANVKGTQIGAYFGASLCSVDVDSNGSTDLVLIGAPHYYEQTRGGQVSVCPLPRGQRARWQCDAVLYGEQGQPWGRFGAALTVLGDVNGDKLTDVAIGAPGEEDNRGAVYLFHGTSGSGISPSHSQRIAGSKLSPRLQYFGQSLSGGQDLTMDGLVDLTVGAQGHVLLLRSQPVLRVKAIMEFNPREVARNVFECNDQVVKGKEAGEVRVCLHVQKSTRDRLREGQIQSVVTYDLALDSGRPHSRAVFNETKNSTRRQTQVLGLTQTCETLKLQLPNCIEDPVSPIVLRLNFSLVGTPLSAFGNLRPVLAEDAQRLFTALFPFEKNCGNDNICQDDLSITFSFMSLDCLVVGGPREFNVTVTVRNDGEDSYRTQVTFFFPLDLSYRKVSTLQNQRSQRSWRLACESASSTEVSGALKSTSCSINHPIFPENSEVTFNITFDVDSKASLGNKLLLKANVTSENNMPRTNKTEFQLELPVKYAVYMVVTSHGVSTKYLNFTASENTSRVMQHQYQVSNLGQRSLPISLVFLVPVRLNQTVIWDRPQVTFSENLSSTCHTKERLPSHSDFLAELRKAPVVNCSIAVCQRIQCDIPFFGIQEEFNATLKGNLSFDWYIKTSHNHLLIVSTAEILFNDSVFTLLPGQGAFVRSQTETKVEPFEVPNPLPLIVGSSVGGLLLLALITAALYKLGFFKRQYKDMMSEGGPPGAEPQ

SEQ ID NO: 875024 - protein, 265 aa, Homo sapiens
MIELGTDYAPRRQCDYSTGSCEPIRLQVPVEAVNMSLGLSLAATTSPPQLLACGPTVHQTCSENTYVKGLCFLFGSNLRQQPQKFPEALRGCPQEDSDIAFLIDGSGSIIPHDFRRMKEFVSTVMEQLKKSKTLFSLMQYSEEFRIHFTFKEFQNNPNPRSLVKPITQLLGRTHTATGIRKVVRELFNITNGARKNAFKILVVITDGEKFGDPLGYEDVIPEADREGVIRYVIGVGNAALRLMLLWRVSMWIHPPFNLQILLKSK

SEQ ID NO: 875025 - protein, 105 aa, Homo sapiens
SKAACAKYLFRIIPLTTKMLSLLEAHPALVFLKRHTGLGGQCGFETCQPAECKLISKDNSAVSQHGGNAWRQYHREVLTSTSEEKDWSPERKRKERRRHSKRSRV

SEQ ID NO: 875026 - protein, 238 aa, Homo sapiens
TSLVRGWCQSAEGSWTHAPFLCMVCVLVLAAAAGAVAVFLILRIWVVLRSMDVTPRESLSILVVAGSGGHTTEILRLLGSLSNAYSPRHYVIADTDEMSANKINSFELDRADRDPSNMYTKYYIHRIPRSREVQQSWPSTVFTTLHSMWLSFPLIHRVKPDLVLCNGPGTCVPICVSALLLGILGIKKVIIVYVESICRVETLSMSGKILFHLSDYFIVQWPALKEKYPKSVYLGRIV

SEQ ID NO: 875027 - protein, 89 aa, Homo sapiens
SFPPTNTTPHLLKVLCNGPGTCVPICVSALLLGILGIKKVIIVYVESICRVETLSMSGKILFHLSDYFIVQWPALKEKYPKSVYLGRIV

SEQ ID NO: 875028 - protein, 139 aa, Homo sapiens
  misc_feature (16)..(16): Xaa can be any naturally occurring amino acid
  misc_feature (18)..(18): Xaa can be any naturally occurring amino acid
TLNINIFQIFKEKRRXFXDYTKYYIHRIPRSREVQQSWPSTVFTTLHSMWLSFPLIHRVKPDLVLCNGPGTCVPICVSALLLGILGIKKVIIVYVESICRVETLSMSGKILFHLSDYFIVQWPALKEKYPKSVYLGRIV

SEQ ID NO: 875029 - protein, 125 aa, Homo sapiens
MGSTSYTKYYIHRIPRSREVQQSWPSTVFTTLHSMWLSFPLIHRVKPDLVLCNGPGTCVPICVSALLLGILGIKKVIIVYVESICRVETLSMSGKILFHLSDYFIVQWPALKEKYPKSVYLGRIV

SEQ ID NO: 875030 - protein, 111 aa, Homo sapiens
MTAPCVLVALKTFQWDKMWRWKTVILMILMLCRPRVLCNGPGTCVPICVSALLLGILGIKKVIIVYVESICRVETLSMSGKILFHLSDYFIVQWPALKEKYPKSVYLGRIV

SEQ ID NO: 875031 - protein, 92 aa, Homo sapiens
SNWHNQMVASGYRNGPVLCNGPGTCVPICVSALLLGILGIKKVIIVYVESICRVETLSMSGKILFHLSDYFIVQWPALKEKYPKSVYLGRIV

SEQ ID NO: 875032 - protein, 90 aa, Homo sapiens
SLGPPGRGEAERSLVLCNGPGTCVPICVSALLLGILGIKKVIIVYVESICRVETLSMSGKILFHLSDYFIVQWPALKEKYPKSVYLGRIV

SEQ ID NO: 875033 - protein, 139 aa, Homo sapiens; identical to SEQ ID NO: 875028
  misc_feature (16)..(16): Xaa can be any naturally occurring amino acid
  misc_feature (18)..(18): Xaa can be any naturally occurring amino acid

SEQ ID NO: 875034 - protein, 89 aa, Homo sapiens; identical to SEQ ID NO: 875027

SEQ ID NO: 875035 - protein, 238 aa, Homo sapiens; identical to SEQ ID NO: 875026

SEQ ID NO: 875036 - protein, 238 aa, Homo sapiens; identical to SEQ ID NO: 875026

SEQ ID NO: 875037 - protein, 238 aa, Homo sapiens; identical to SEQ ID NO: 875026

SEQ ID NO: 875038 - protein, 141 aa, Homo sapiens
PVSNMIHVVTSHYRQTRQRSLYTKYYIHRIPRSREVQQSWPSTVFTTLHSMWLSFPLIHRVKPDLVLCNGPGTCVPICVSALLLGILGIKKVIIVYVESICRVETLSMSGKILFHLSDYFIVQWPALKEKYPKSVYLGRIV

SEQ ID NO: 875039 - protein, 177 aa, Homo sapiens
TSLVRGWCQSAEGSWTHAPFLCMVCVLVLAAAAGAVAVFLILRIWVVLRSMDVTPRESLSILVVAGSGGHTTEILRLLGSLSNAYSPRHYVIADTDEMSANKINSFELDRADRDPSNMSVDLDSICFLLVLYQILHSPNSKKPGGSAVLALHRFHHLALHVALLSPNSQGEARFGVV

SEQ ID NO: 875040 - protein, 139 aa, Homo sapiens
QVSNEGLQSVKGSGGGLRCYTKYYIHRIPRSREVQQSWPSTVFTTLHSMWLSFPLIHRVKPDLVLCNGPGTCVPICVSALLLGILGIKKVIIVYVESICRVETLSMSGKILFHLSDYFIVQWPALKEKYPKSVYLGRIV

SEQ ID NO: 875041 - protein, 178 aa, Homo sapiens
TSLVRGWCQSAEGSWTHAPFLCMVCVLVLAAAAGAVAVFLILRIWVVLRSMDVTPRESLSILVVAGSGGHTTEILRLLGSLSNAYSPRHYVIADTDEMSANKINSFELDRADRDPSNMYTKYYIHRIPRSREVQQSWPSTVFTTLHSMWLSFPLIHRVKPDLVHRAVREEHTCLSDEC

SEQ ID NO: 875042 - protein, 95 aa, Homo sapiens
  misc_feature (19)..(19): Xaa can be any naturally occurring amino acid
ITDVPLRQHHDSSCNLVLXVLCNGPGTCVPICVSALLLGILGIKKVIIVYVESICRVETLSMSGKILFHLSDYFIVQWPALKEKYPKSVYLGRIV

SEQ ID NO: 875043 - protein, 91 aa, Homo sapiens
HSAFPPRPRRMYVARVLCNGPGTCVPICVSALLLGILGIKKVIIVYVESICRVETLSMSGKILFHLSDYFIVQWPALKEKYPKSVYLGRIV

SEQ ID NO: 875044 - protein, 178 aa, Homo sapiens; identical to SEQ ID NO: 875041

SEQ ID NO: 875045 - protein, 134 aa, Homo sapiens
TSLVRGWCQSAEGSWTHAPFLCMVCVLVLAAAAGAVAVFLILRIWVVLRSMDVTPRESLSILVVAGSGGHTTEILRLLGSLSNAYSPRHYVIADTDEMSANKINSFELDRADRDPSNMRRGLTVCPGWGAVVQS

SEQ ID NO: 875046 - protein, 238 aa, Homo sapiens; identical to SEQ ID NO: 875026

SEQ ID NO: 875047 - protein, 139 aa, Homo sapiens; identical to SEQ ID NO: 875040

SEQ ID NO: 875048 - protein, 89 aa, Homo sapiens; identical to SEQ ID NO: 875027

SEQ ID NO: 875049 - protein, 97 aa, Homo sapiens
  misc_feature (12)..(12): Xaa can be any naturally occurring amino acid
  misc_feature (16)..(16): Xaa can be any naturally occurring amino acid
GAPPGRGLVFEXRSVXLAKFRVLCNGPGTCVPICVSALLLGILGIKKVIIVYVESICRVETLSMSGKILFHLSDYFIVQWPALKEKYPKSVYLGRIV

SEQ ID NO: 875050 - protein, 95 aa, Homo sapiens
SASIITFIRKREEGFIVTNVLCNGPGTCVPICVSALLLGILGIKKVIIVYVESICRVETLSMSGKILFHLSDYFIVQWPALKEKYPKSVYLGRIV

SEQ ID NO: 875051 - protein, 92 aa, Homo sapiens
  misc_feature (8)..(8): Xaa can be any naturally occurring amino acid
  misc_feature (13)..(13): Xaa can be any naturally occurring amino acid
GRELSLGXALGGXCRTVLCNGPGTCVPICVSALLLGILGIKKVIIVYVESICRVETLSMSGKILFHLSDYFIVQWPALKEKYPKSVYLGRIV

SEQ ID NO: 875052 - protein, 92 aa, Homo sapiens
HPRIPLPTRLNIKNTSVLCNGPGTCVPICVSALLLGILGIKKVIIVYVESICRVETLSMSGKILFHLSDYFIVQWPALKEKYPKSVYLGRIV

SEQ ID NO: 875053 - protein, 238 aa, Homo sapiens; identical to SEQ ID NO: 875026

SEQ ID NO: 875054 - protein, 134 aa, Homo sapiens; identical to SEQ ID NO: 875045

SEQ ID NO: 875055 - protein, 139 aa, Homo sapiens; identical to SEQ ID NO: 875028
  misc_feature (16)..(16): Xaa can be any naturally occurring amino acid
  misc_feature (18)..(18): Xaa can be any naturally occurring amino acid

SEQ ID NO: 875056 - protein, 178 aa, Homo sapiens; identical to SEQ ID NO: 875041

SEQ ID NO: 875057 - protein, 94 aa, Homo sapiens
YPTPGEEKPPDGYPYRTIVLCNGPGTCVPICVSALLLGILGIKKVIIVYVESICRVETLSMSGKILFHLSDYFIVQWPALKEKYPKSVYLGRIV

SEQ ID NO: 875058 - protein, 100 aa, Homo sapiens
GVRLISYTEATGQTSLRGYSNGPLVLCNGPGTCVPICVSALLLGILGIKKVIIVYVESICRVETLSMSGKILFHLSDYFIVQWPALKEKYPKSVYLGRIV

SEQ ID NO: 875059 - protein, 90 aa, Homo sapiens
FLPSSIHLYPLLCLVLCNGPGTCVPICVSALLLGILGIKKVIIVYVESICRVETLSMSGKILFHLSDYFIVQWPALKEKYPKSVYLGRIV

SEQ ID NO: 875060 - protein, 156 aa, Homo sapiens
SATSTNSNNKFRDNQISTAKYSVLTFLPRFLYEQIRRAANAFFLFIALLQQIPDVSPTGRYTTLVPLIIILTIAGIKEIVEDFKRHKADNAVNKKKTIVLRNGMWHTIMWKEVAVGDIVKVVNGQYLPADVVLLSSSEPQQCVMLKQLICLWSKLY

SEQ ID NO: 875061 - protein, 140 aa, Homo sapiens
LSKSWVLFVGEAVSHYQSPGRVWLLFVGEVVSHYEDPVYCLLGKLYLTIRVLGIVCWRSCISLSESWQSVVIVCWEAVSHYPSPGYCLLGKPYLTIRVLGIVCWEAISHYPSPGYYLLGSRISLSESWQSVVIVCWEAIS

SEQ ID NO: 875062 - protein, 141 aa, Homo sapiens
FNFNCGKKGRYKPTALRFLGHPVAKILHAYNPSRDSEVVVNSVFAAAGHFHVPPVPCRVIPAMGKTSFRIIFLPTEEGSIESSLFINTSSYGVLSYHVSGIGTRRISTEGSAKQLPNAYFLLPKVQSIQLSQMQVILIDLL

SEQ ID NO: 875063 - protein, 228 aa, Homo sapiens
LRRPQPGCYCRTAAAVNLLLGVFQVLLPCCRPGGAQGQAIEPLPNVVELWQAEEGELLLPTQGDSEEGLEEPSQEQSFSDKLFSGKGLHFQPSVLDFGIQFLGHPVAKILHAYNPSRDSEVVVNSVFAAAGHFHVPPVPCRVIPAMGKTSFRIIFLPTEEGSIESSLFINTSSYGVLSYHVSGIGTRRISTEGSAKQLPNAYFLLPKVQSIQLSQMQAETTNTSLLQV

SEQ ID NO: 875064 - protein, 115 aa, Homo sapiens
RPSSEARSHIPAVGTTKADFYKLKSRTFRRRGGAPRAGEGAQASPRPHSATPGAAPGEGWQTSRGRQVGSAGPMGAGTGVRGHSRAFCSRRPPPLPRGLLHTTRRRQLHTGWRGP

SEQ ID NO: 875065 - protein, 126 aa, Homo sapiens
QALSGIDSEYTMLLCLGGQGATLIWTEPAQYLWVIWLPAGVTGATRLCSVCLSSFITLAQACFHGDPEVQERTSLIAQALFQASACSMGASISLAKASHVATSRCEELGAFCNAPGRHRHLMISDL

SEQ ID NO: 875066 - protein, 253 aa, Homo sapiens [sequence omitted]

SEQ ID NO: 875067 - protein, 164 aa, Homo sapiens
QAGTGLGVLDVLRNIETPKREAEERKSHTQTPREEMTMTTMPESLNSPVSGKAVFMEFGPPNQQMSPSPMSHGHYSMHCLHSAGHSQPDGAYSSASSFSRPLGYPYVNSVSSHASSPYISSVQSYPGSASLAQSRLEDPGQDLVPKQAIQVQEADEAGWGGSGG

SEQ ID NO: 875068 - protein, 105 aa, Homo sapiens
  misc_feature (96)..(96): Xaa can be any naturally occurring amino acid
MAVGKNKRLTKGGKKGAKKKVVDPFSKKDRYDVKAPAMFNIRNMGKTLVTRTQGTKMASDGLKGRVLEVSLADLQNDEVAFRKFKLITEDVQGKNXLTNFHGMDL

SEQ ID NO: 875069 - protein, 119 aa, Homo sapiens
LSPRVRTAAFSSSFPEALQNLLAFQEGLHLSLKLFLTTFPTTLTELLHMTSPSSLGHVSRQVGLPWTEVEWSWKSGHSTASGTSVGPKVCRPCYCRHEWAWRIPGFLVKGALGRTGEEW

SEQ ID NO: 875070 - protein, 94 aa, Homo sapiens
APHPLPGTQHFEPRIMGNSRQVHTVLSPSLQGLGEVGCSQLPPAWPGISWTPAGVAAQPLVGFFFGGTDSRPVTQAEIAPLHSSLGDRVRRHLE

SEQ ID NO: 875071 - protein, 101 aa, Homo sapiens
AAICHVFAIDPGLLASLTHVTTLGMAGECSCPHFTGVVIKAQRMEVMDQSRLPSGGSIGSQTEARLHSAVPPPTTNARGPLCPRVPGCDYEALGEGLACLR

SEQ ID NO: 875072 - protein, 129 aa, Homo sapiens
VSRTKSYECQLSFDLAYMISNLQVYKTYLEPPPSSVTQAGVQWHHLSSLQPPPPRFKRFSCLSLLSNWDYRCSPPYRDVFSIFLERHGFTMLARLLSNSLPHDPPTSASQSAGITGVSHGAQPIFSFHP

SEQ ID NO: 875073 - protein, 106 aa, Homo sapiens
CFSHFTVKESEDEKDEGTFPKSHSPQASAKMWTPLPCLVPISGERKAPLGRGGDWPVAASGISPVSARVKNLPCCGFQTLSVQLPIWTLVKVVVNNTQSISLSRAQ

SEQ ID NO: 875074 - protein, 70 aa, Homo sapiens
PVGHTPLVAPLTSWHLAVKPQNLASPGMELHHLHDVVEWTPLTASPTTRRATTKLIIDDGAPLPAHSLWS

SEQ ID NO: 875075 - protein, 33 aa, Homo sapiens
PNPKPPQALGLLQGPCAAPGPALNTCWHLKPNV

SEQ ID NO: 875076 - protein, 38 aa, Homo sapiens
MGLMKMHMDVNSRDVKVLPWQQKHERPSQPQGGRVDGR

SEQ ID NO: 875077 - protein, 104 aa, Homo sapiens
MVPRLLKSRVTCRPVLSLLIFFVCFVLFETGSHSVALTGVQHSPRLPHYACWYPKSGRAKAAGGQHVSTAPSVCTPGWAVTVPQLGPMLLQDQSRCQQQGEASQ

SEQ ID NO: 875078 - protein, 110 aa, Homo sapiens
NPPQLSCPDARPGGVGEAAPALRSRSARQRAVMSTASAAVPGSPKTRRPRKPQPGSSRQGRGGEDARVPGVPHSVCLSRGDREWTHGGAVDPRGGGRRGEGRELWSQVSI

SEQ ID NO: 875079 - protein, 109 aa, Homo sapiens
LGRGWTPVFWGKLNALDHHYTAGGSSHQSSLPASSSPFVYLAVAICQAHLQCSAVGKELWIVTWRTRATLCCDLQISPIIFGHRAFMSLLIVPCHAGGRAGLPSAPRCS

SEQ ID NO: 875080 - protein, 139 aa, Homo sapiens
MGGGAQSAQAWFFSPSELLSSSDLPDSASHSAGITSVSHCAWPITCFNNNKKQQNLAEGWKVTKQLSFKPRFKNFVSFLLSPQFLDIALRQTADVLSFVVNYCLGMGIKTAFPFASYAPMPYAHLFTWMLVKLIPCPLI

SEQ ID NO: 875081 - protein, 71 aa, Homo sapiens
LFHCSEEETGHFGFSDLEPGSETYGLWAQISQLPVSVNKVYWSRGTLICFWMVRGCFCAVTVEASIAGGVL

SEQ ID NO: 875082 - protein, 76 aa, Homo sapiens
NLEDPPPSTGMLGSGNGLSNAWRQDNRRVFKEQCVLRPSYSRGGQEEGRKSILGRRLETGGSKRSTEPLTALREGT

SEQ ID NO: 875083 - protein, 67 aa, Homo sapiens
CSQSGEVSRQETAKSSFLPSQPLLRSGRTASTTRGHQPTLDGSKCAHVVREPQHRVAAPSSTVIEHE

SEQ ID NO: 875084 - protein, 146 aa, Homo sapiens
MSVAFHCLLDLVRGITSMIEGELGELETECQTTTEEGSSPTQSTEQQDLQSTSDQMDKEIVSRAVWEEMVNACWCGLLAALSLLLDASTDEAATENILKAELTMAALCGRLGLVTSRDAFITAICKGSLPPHYALTVLNTTTAATL

SEQ ID NO: 875085 - protein, 40 aa, Homo sapiens
MVLSLSSYSAENVLTPKRTEQIMLQVSEKKCEGMLNPQHL

SEQ ID NO: 875086 - protein, 129 aa, Homo sapiens
CLCGERHLWLSSGRAGPHACCCTQALSSLGCRRFWKLRRGCWTPPPATPEKDSQAAISEAHGQGRRQREENPGSWSEAGFCPRRVSGSDFCHVCWTHVHSHCEPQACWQHVEQNPRSCRSSLPSSFETA

SEQ ID NO: 875087 - protein, 280 aa, Homo sapiens
MTVGKSSKMLQHIDYRMRCILQDGRIFIGTFKAFDKHMNLILCDCDEFRKIKPKNSKQAEREEKRVLGLVLLRGENLVSMTVEGPPPKDTGIARVPLAGAAGGPGIGRAAGRGIPAGVPMPQAPAGLAGPVRGVGGPSQQVMTPQGRGTVCSRCSCCHSQYCRGSNPVPTWPWGSSPDLWAEEHPLQGMMGPPPGMRPPNGGPPMGGSPLERGTPNGGICPLRECGLLPLGCEGFFDLGTSLECPEGWSSSAVPTVSCGRRRVWCPKGPPDVPGRLGHRA

SEQ ID NO: 875088 - protein, 195 aa, Homo sapiens
MTVGKSSKMLQHIDYRMRCILQDGRIFIGTFKAFDKHMNLILCDCDEFRKIKPKNSKQAEREEKRVLGLVLLRGENLVSMTVEGPPPKDTGIARVPLAGAAGGPGIGRAAGRGIPAGVPMPQAPAGLAGPVRGVGGPSQQVMTPQGRGTVCSRCSCCHSQYCRGSNPVPTWPWGSSPDLWAEEHPLQGMMGHLLV

SEQ ID NO: 875089 - protein, 214 aa, Homo sapiens
MARYEAGFYFGRGFKAFDKHMNLILCDCDEFRKIKPKNSKQAEREEKRVLGLVLLRGENLVSMTVEGPPPKDTGIARVPLAGAAGGPGIGRAAGRGIPAGVPMPQAPAGLAGPVRGVGGPSQQVMTPQGRGTVCSRCSCCHSQYCRGSNPVPTWPWGSSPDLWAEEHPLQGMMGPPPGMRPPNGGPPMGGSPLERGTPMANATHQTEMRTHITT

SEQ ID NO: 875090 - protein, 236 aa, Homo sapiens
MTVGKSSKMLQHIDYRMRCILQDGRIFIGTFKAFDKHMNLILCDCDEFRKIKPKNSKQAEREEKRVLGLVLLRGENLVSMTVEGPPPKDTGIARVPLAGAAGGPGIGRAAGRGIPAGVPMPQAPAGLAGPVRGVGGPSQQVMTPQGRGTVCSRCSCCHSQYCRGSNPVPTWPWGSSPDLWAEEHPLQGMMGPPPGMRPPNGGPPMGGSPLERGTPNGGICPLRECGLLPLGCEGLL

SEQ ID NO: 875091 - protein, 236 aa, Homo sapiens; identical to SEQ ID NO: 875090

SEQ ID NO: 875092 - protein, 236 aa, Homo sapiens; identical to SEQ ID NO: 875090

SEQ ID NO: 875093 - protein, 236 aa, Homo sapiens; identical to SEQ ID NO: 875090

SEQ ID NO: 875094 - protein, 236 aa, Homo sapiens; identical to SEQ ID NO: 875090

SEQ ID NO: 875095 - protein, 236 aa, Homo sapiens; identical to SEQ ID NO: 875090

SEQ ID NO: 875096 - protein, 245 aa, Homo sapiens
MTVGKSSKMLQHIDYRMRCILQDGRIFIGTFKAFDKHMNLILCDCDEFRKIKPKNSKQAEREEKRVLGLVLLRGENLVSMTVEGPPPKDTGIARVPLAGAAGGPGIGRAAGRGIPAGVPMPQAPAGLAGPVRGVGGPSQQVMTPQGRGTVCSRCSCCHSQYCRGSNPVPTWPWGSSPDLWAEEHPLQGMMGPPPGMRPPNGGPPMGGSPLERGTPNGGICPLRECGLLPLGCEGPPPPGMRPPRP

SEQ ID NO: 875097 - protein, 243 aa, Homo sapiens
MTVGKSSKMLQHIDYRMRCILQDGRIFIGTFKAFDKHMNLILCDCDEFRKIKPKNSKQAEREEKRVLGLVLLRGENLVSMTVEGPPPKDTGIARVPLAGAAGGPGIGRAAGRGIPAGVPMPQAPAGLAGPVRGVGGPSQQVMTPQGRGTVCSRCSCCHSQYCRGSNPVPTWPWGSSPDLWAEEHPLQGMMGPPPGMRPPNGGPPMGGSPLERGTPNGGICPLRECGLLPLGCEGFFDLGTSLE

SEQ ID NO: 875098 - protein, 280 aa, Homo sapiens; identical to SEQ ID NO: 875087

SEQ ID NO: 875099 - protein, 243 aa, Homo sapiens; identical to SEQ ID NO: 875097

SEQ ID NO: 875100 - protein, 238 aa, Homo sapiens
MTVGKSSKMLQHIDYRMRCILQDGRIFIGTFKAFDKHMNLILCDCDEFRKIKPKNSKQAEREEKRVLGLVLLRGENLVSMTVEGPPPKDTGIARVPLAGAAGGPGIGRAAGRGIPAGVPMPQAPAGLAGPVRGVGGPSQQVMTPQGRGTVCSRCSCCHSQYCRGSNPVPTWPWGSSPDLWAEEHPLQGMMGPPPGMRPPNGGPPMGGSPLERGTPWGMALRNAALPGIAGPSRMGIQA

SEQ ID NO: 875101 - protein, 306 aa, Homo sapiens
MTVGKSSKMLQHIDYRMRCILQDGRIFIGTFKAFDKHMNLILCDCDEFRKIKPKNSKQAEREEKRVLGLVLLRGENLVSMTVEGPPPKDTGIARVPLAGAAGGPGIGRAAGRGIPAGVPMPQAPAGLAGPVRGVGGPSQQVMTPQGRGTVCSRCSCCHSQYCRGSNPVPTWPWGSSPDLWAEEHPLQGMMGPPPGMRPPNGGPPMGGSPLERGTPWKRTPWDALGMRLLPGCSFLTWPEYGRPARGRTEAVTQTGTRTGRARTGGQRDHTGMAQANWSEQATTETNEKENKKKRNNETSRKRAGRR

SEQ ID NO: 875102 - protein, 157 aa, Homo sapiens
MTVEGPPPKDTGIARVPLAGAAGGPGIGRAAGRGIPAGVPMPQAPAGLAGPVRGVGGPSQQVMTPQGRGTVCSRCSCCHSQYCRGSNPVPTWPWGSSPDLWAEEHPLQGMMGPPPGMRPPNGGPPMGGSPLERGTPNGGICPLRECGLLPLGCEGLL

SEQ ID NO: 875103 - protein, 243 aa, Homo sapiens
PVRPGQSSWLVHANPGAITIDAMTWAAMLPLITDEVHPATADLLPQLWPELSSVMESIKPKNSKQAEREEKRVLGLVLLRGENLVSMTVEGPPPKDTGIARVPLAGAAGGPGIGRAAGRGIPAGVPMPQAPAGLAGPVRGVGGPSQQVMTPQGRGTVCSRCSCCHSQYCRGSNPVPTWPWGSSPDLWAEEHPLQGMMGPPPGMRPPNGGPPMGGSPLERGTPNGGICPLRECGLLPLGCEGLL

SEQ ID NO: 875104 - protein, 195 aa, Homo sapiens; identical to SEQ ID NO: 875088

SEQ ID NO: 875105 - protein, 170 aa, Homo sapiens
MIFQSILLIFRSLGIRAYLFIFQTGIARVPLAGAAGGPGIGRAAGRGIPAGVPMPQAPAGLAGPVRGVGGPSQQVMTPQGRGTVCSRCSCCHSQYCRGSNPVPTWPWGSSPDLWAEEHPLQGMMGPPPGMRPPNGGPPMGGSPLERGTPNGGICPLRECGLLPLGCEGLL

SEQ ID NO: 875106 - protein, 415 aa, Homo sapiens
MTVGKSSKMLQHIDYRMRCILQDGRIFIGTFKAFDKHMNLILCDCDEFRKIKPKNSKQAEREEKRVLGLVLLRGENLVSMTVEGPPPKDIFRWSLALSPGWSAVARSWLIATSASRVQVILLPQPPEYAGITDTGIARVPLAGAAGGPGIGRAAGRGIPAGVPMPQAPAGLAGPVRGVGGPSQQVMTPQGRGTVCSRCSCCHSQYCRGSNPVPTWPWGSSPDLWAEEHPLQGMMGPPPGMRPPNGGPPMGGSPLERGTPMGDCAQYGNAGSYPWMPWAPSPGMGHNAYTPFGPLIPAVTEGDISYDPGRPMKRGQIRPLKKREAQHQRGATEYHQEGTEREADTVRYKRGPQEEKKHGARPGLKNERQHEGTSETPPGRQDTTTRTATMRMEELDEQRPTERNDDRRHGLAQPGT

SEQ ID NO: 875107 - protein, 240 aa, Homo sapiens
MTVGKSSKMLQHIDYRMRCILQDGRIFIGTFKAFDKHMNLILCDCDEFRKIKAIEESSNTRGMKGVQMNADVPRLLAACVQKAENFWSSTDRSDGDSPSSDRYLDIAVEDSSIAWYGCPVRPHVAVASEVALAGRRAYIHHAGGLPQCASVDSPAWTLTWAIVLCGLERGQSSNTAAWTPNIATEVASMQASCYTCMNTMLTLFACGAPNLEYAFLDLCEWYRTPELWRRRSSATFRGND

SEQ ID NO: 875108 - protein, 236 aa, Homo sapiens; identical to SEQ ID NO: 875090

SEQ ID NO: 875109 - protein, 300 aa, Homo sapiens
PQASMRIAGSGGILDPHTTGTTKGWEILGHMLSHLHSWIDVCPAPMRRISLVPFERSLTLHCVFEIPPAAWVALQVSTRESPRPHRNSTTKLKWRNDHMEFSGSGLVLLRGENLVSMTVEGPPPKDTGIARVPLAGAAGGPGIGRAAGRGIPAGVPMPQAPAGLAGPVRGVGGPSQQVMTPQGRGTVCSRCSCCHSQYCRGSNPVPTWPWGSSPDLWAEEHPLQGMMGPPPGMRPPNGGPPMGGSPLERGTPWACPLGMRLSPGMRGSLDLGRVEFSRGWVIFRPFPDRWYRAVGLNVVS

SEQ ID NO: 875110 - protein, 236 aa, Homo sapiens; identical to SEQ ID NO: 875090

SEQ ID NO: 875111 - protein, 236 aa, Homo sapiens; identical to SEQ ID NO: 875090

SEQ ID NO: 875112 - protein, 236 aa, Homo sapiens; identical to SEQ ID NO: 875090

SEQ ID NO: 875113 - protein, 236 aa, Homo sapiens; identical to SEQ ID NO: 875090

SEQ ID NO: 875114 - protein, 245 aa, Homo sapiens; identical to SEQ ID NO: 875096

SEQ ID NO: 875115 - protein, 245 aa, Homo sapiens; identical to SEQ ID NO: 875096

SEQ ID NO: 875116 - protein, 239 aa, Homo sapiens
MTVGKSSKMLQHIDYRMRCILQDGRIFIGTFKAFDKHMNLILCDCDEFRKIKPKNSKQAEREEKRVLGLVLLRGENLVSMTVEGPPPKDTGIARVPLAGAAGGPGIGRAAGRGIPAGVPMPQAPAGLAGPVRGVGGPSQQVMTPQGRGTVCSRCSCCHSQYCRGSNPVPTWPWGSSPDLWAEEHPLQGMMGPPPGMRPPNGGPPMGGSPLERGTPNGGICPLRECGLLPLGCEGKCLQW

SEQ ID NO: 875117 - protein, 225 aa, Homo sapiens
LFRGGHKPRFFFQPRGEPHNFFGTKHMNLILCDCDEFRKIKPKNSKQAEREEKRVLGLVLLRGENLVSMTVEGPPPKDTGIARVPLAGAAGGPGIGRAAGRGIPAGVPMPQAPAGLAGPVRGVGGPSQQVMTPQGRGTVCSRCSCCHSQYCRGSNPVPTWPWGSSPDLWAEEHPLQGMMGPPPGMRPPNGGPPMGGSPLERGTPNGGICPLRECGLLPLGCEGLL

SEQ ID NO: 875118 - protein, 263 aa, Homo sapiens
MVIIVTYDMHGAVNSCLDVCTIIDTPRLRDASTCTESDSHYYGCASMSSVYLGLIVKLEMLQYLMLQMIDDVITTQESEPKNSKQAEREEKRVLGLVLLRGENLVSMTVEGPPPKDTGIARVPLAGAAGGPGIGRAAGRGIPAGVPMPQAPAGLAGPVRGVGGPSQQVMTPQGRGTVCSRCSCCHSQYCRGSNPVPTWPWGSSPDLWAEEHPLQGMMGPPPGMRPPNGGPPMGGSPLERGTPNGGICPLRECGLLPLGCEGLL

SEQ ID NO: 875119 - protein, 227 aa, Homo sapiens
CIYTKTGYLATISKRIHTRRLNRSGFHSFESSSAKFHSKCLYYKQQRGDLSKPGLACSGLVLLRGENLVSMTVEGPPPKDTGIARVPLAGAAGGPGIGRAAGRGIPAGVPMPQAPAGLAGPVRGVGGPSQQVMTPQGRGTVCSRCSCCHSQYCRGSNPVPTWPWGSSPDLWAEEHPLQGMMGPPPGMRPPNGGPPMGGSPLERGTPNGGICPLRECGLLPLGCEGLL

SEQ ID NO: 875120 - protein, 188 aa, Homo sapiens
MESRSVARLECSGTILAYCNLCLPGSSDSPASASRVAGITDTGIARVPLAGAAGGPGIGRAAGRGIPAGVPMPQAPAGLAGPVRGVGGPSQQVMTPQGRGTVCSRCSCCHSQYCRGSNPVPTWPWGSSPDLWAEEHPLQGMMGPPPGMRPPNGGPPMGGSPLERGTPNGGICPLRECGLLPLGCEGLL

SEQ ID NO: 875121 - protein, 89 aa, Homo sapiens
  misc_feature (76)..(76): Xaa can be any naturally occurring amino acid
MTVGKSSKMLQHIDYRMRCILQDGRIFIGTFKAFDKHMNLILCDCDEFRKIKPKNSKQAEREEKRVLSGAAAYPDXLKALQSTCCKVWT

SEQ ID NO: 875122 - protein, 109 aa, Homo sapiens
PTFTYPRLTRNPHIVLDSLGNGSSNIGFFFICLHQKFLSISFSRLRFNFHHHLGSFLGGEDELRLKSCQFSLHNRYLRSCKVEFLQACQVAVPHHSHLLPLAIQERLEG

SEQ ID NO: 875123 - protein, 142 aa, Homo sapiens
EVPPQRPPPGLQPLCSAREARLAGAGVTVGRGPPVFLISAGGVGAEAAAVRTWPGVGAAPWTPRLRRNPAWLRGPDLRLRLTPAAGDAVRTPSQCAEDTVLPSAWLPPTRSRRSPRPTPTRRRPGDAETQTARDSGSWEQRP

SEQ ID NO: 875124 - protein, 111 aa, Homo sapiens
PPTHVCRGCVNNYICWLPSHWPLLLDPTRGCFYPGRPRRTIYGNELQSHQPIFLVQPNLQNTGAQNLSLASDFKDPPNDTVSGFSRSFMDEAGSLKGNQGSASSLLKKLFT

SEQ ID NO: 875125 - protein, 107 aa, Homo sapiens
SRRENTRRGAGGSGSGPGPGPGEAMASRDSNHAGESFLGSDGDEEATRELETEEESEGEEDETAAESEEEPDSRLSDQDEEGKIKQEYIISDPSFSMVTSPKGRYVG

SEQ ID NO: 875126 - protein, 115 aa, Homo sapiens
MIVKVTRLSAFCVPLSVEHMTCICSFTLMVFMVETLGCSHFPEKEIEVQEGLGNLSMVTWPFLPGCKSCTVNLPALTPFCGKCQMDSSGIRGLENWREKGGPSWPLEERSPGLLP

SEQ ID NO: 875127 - protein, 145 aa, Homo sapiens
SAGIIGVSHHAWLFLFFEMESHSVSQAGVQWHDLSSSNLCLPGSSDACASGSQVAEITGVCHHTRLIFLFLVEVGALPCWPEWSETPDLKRSARLSLPKCWDYRCEPLRLRRVVNLLAKLTHIKRVRGTPARTSFQPAFQTDVTK

SEQ ID NO: 875128 - protein, 149 aa, Homo sapiens
QDALNYGLFQPPSRGRAGKFLDEERLLQEYPPNLDTPLPYLEFRYKRRVYAQNLIDDKQFAKLHTKANLKKFMDYVQLHSTDKVARLLDKGLDPNFHDPDSGECPLSLAAQLDNATDLLKVLKNGGAHLDFRTRDGLTAVHCATRQRNA

SEQ ID NO: 875129 - protein, 86 aa, Homo sapiens
AAALCTAGGWAASPPSAQQIITFISDNPRVVTTKNVSNSWTDVLWGTRLPQVENPCSGCLSLKLLMTNQSPIQHHLKLFIGNKRKK

SEQ ID NO: 875130 - protein, 116 aa, Homo sapiens
HLRSEGFPSLVLQRAGQCPGSGTPSVPFLATMGRPCVLTTLSHPLTQRLSRNGTWWDGDLEHATGEVELLSLFFPRFSPESESRDGSRGTFWPLPARAQQMESNVSVSPKNVYPHC

SEQ ID NO: 875131 - protein, 55 aa, Homo sapiens
APLLRSHVMAAHSLQRLPPPATRPAARVLPVKSPHRFTFHVKLAKPLQRSFFNTA

SEQ ID NO: 875132 - protein, 87 aa, Homo sapiens
MVLSISRSCMYSRLTSASARPGAVSLPPTAALFQALRDLEPTPTGAPGSTACSHLGQSWPEIEDDPSTIPTVDGIALGVQEASLWNE

SEQ ID NO: 875133 - protein, 143 aa, Homo sapiens [sequence omitted]

SEQ ID NO: 875134 - protein, 101 aa, Homo sapiens
PGHWNLKCPREEVSGLKGALGTGVSPLPLRPADPHPAWAVVAECPRPVASPLWAGFPAEGGRGSLLPVVASAWGRACGCTISIGVILPQPCCDRHGRQVCL

SEQ ID NO: 875135 - protein, 494 aa, Homo sapiens
MGQPREFWHLRSQVPVPTCHLLTVQPWCLLPHPTPAGGRERRHSASSLLAALCLRKAVLRPHPAVLPGVGGCVVLSSGRMKAPLRGGLALGTGPAPTKLQLLHDWQSEPGPSGWQQGPSPPLFPAGTSLVQHLMTVLIRKHSQLFTAPVPEGPTSPRGGLQCAVGWGSEEVTRDSQGEPGGPGLPAHRTSSLDGAAVAVLSRTAPTGPGSRCSPGKKVQTLPSWKSSFRQPRSLSGSPKGGGSSLEVPIISSGGNWLMNGLSSLRGHRRASSGDRLKDSGSVQRLSTYDNVPAPGLVPGIPSVASMAWSGASSSESSVGGSLSSCTACRASDSSARSSLHTDWALEPSPLPSSSEDPKSLDLDHSMDEAGAGASNSEPSEPDSPTREHARRSEALQGLVTELRAELCRQRTEYERSVKRIEEGSADLRKRMSRLEEELDQEKKKYIMLEIKLRNSERAREDAERRNQLLQREMEEFFSTLGSLTVGAKGARAPK

SEQ ID NO: 875136 - protein, 494 aa, Homo sapiens; identical to SEQ ID NO: 875135

SEQ ID NO: 875137 - protein, 139 aa, Homo sapiens
LLDGTSPIHSPKKKLKGTLDSSSHSFPPLRKAWQIYFLNTATIYSLLSIPCVSSTVQVIFNYFHSLQKPPPEPSSPACCKALTLSHPLINFCNCPHHHLELLCVLMAVSPPKTMLLREGEHLVPGFSPLCPPRTAFMVL

SEQ ID NO: 875138 - protein, 133 aa, Homo sapiens
AAQLCGSQTWMCQWPRQEVNPQPRASRCPRPSLVQEVRSAEPTMAEMHKGDPMVPLFKSSANPHPTQRRSQVLTAACHPCLTRPPLGSVLHTLLSLSVSSPTREEILHIYPGGFKPIFAIQIVTGMNRYKESF

SEQ ID NO: 875139 - protein, 121 aa, Homo sapiens
MTDRNRDKKSTSPSNSDTEMKSEQLPPCVNPGNPVFSCMLDPKTLQTATSLSKPQMIMYKTNSSHYGEFLPIPQFFPCNYTPKEQVFSSHIRATGFYQNNTLNTAPDRTRTLDFPNIQHTL

SEQ ID NO: 875140 - protein, 121 aa, Homo sapiens; identical to SEQ ID NO: 875139

SEQ ID NO: 875141 - protein, 136 aa, Homo sapiens
GVCDFKGSLQRQEKRPPNRLCDKKSTSPSNSDTEMKSEQLPPCVNPGNPVFSCMLDPKTLQTATSLSKPQMIMYKTNSSHYGEFLPIPQFFPCNYTPKEQVFSSHIRATGFYQNNTLNTAPDRTRTLDFPNIQHTL

SEQ ID NO: 875142 - protein, 115 aa, Homo sapiens
CSPPRLSARVWSVPALDPPLTPAPSHHLCPPAGPWERSRTLTHRKARVAKDGFSLHRFRHAYFLKAHNTCKGAGREKQKNYLKPRKRIQNYAKSHKKVIWLCMVAHACNPKTLGG

SEQ ID NO: 875143 - protein, 79 aa, Homo sapiens
TASTGGLVSAPLPGPLLGLREDADKGQGKREVAVAELLRRFGSCSSDYSDRQGRIGGGQFPALRSCLRSERQVPLCCLG

SEQ ID NO: 875144 - protein, 95 aa, Homo sapiens
FAARKELLDFSSYVSPERTTHHPWTAKPRKEALTKPTTINIMEALAIDPGYSKSMGVDQASIFLKAPQVILKYIHIRLPGEKAQNGDSCEIILER

SEQ ID NO: 875145 - protein, 67 aa, Homo sapiens
SRSRLSLHTSLQAEGVDSGLGQPRKGLPQCSRGLKGSSSAAKVGAQAEESPRASAGCEDCQHAVTSQ

SEQ ID NO: 875146 - protein, 117 aa, Homo sapiens
PRDPSDWFSGITGEGGRWVLAGWSPFQPHGGRGRGWGRGLGLCTCLSTSLLCIPPSISNQGRMRKEFVGITLLLHALASQKFPSGGPWSDGHCHLDLKKDTWSLGWEPGSLSLTLWP

SEQ ID NO: 875147 - protein, 229 aa, Homo sapiens
MTLVRPIQPERPAGDSKYDLLCKEEFIELKDIFSVKLKRRCSVKQQRSGTLLGITLFICLKKEQNKLKNSTLDLINLSEDHCDIWFRQFKKILAGFPNRPKSLKILLNPQSHKKEATQVYYEKVEPLLKLAGIKTDVTIMEYEGHALSLLKECELQGFDGVVCVGGDGSASEVAHALLLRAQKNAGMETDRILTPVRAQLPLGLIPAGSTNVLAHSLHGVPHVITATLH

SEQ ID NO: 875148 - protein, 61 aa, Homo sapiens
TNQTHKDWKQEDKLPPGLPNGDVLSGLDILDERGESRPFQASKGPVSHQTHALRPSQGGRI

SEQ ID NO: 875149 - protein, 105 aa, Homo sapiens
LHSLAFSPDKPTLSSGSLQLPGAGAGPAGTARREGSLRVSAWLVEVETKASWVLAFPGVQIFLRRKCSKKVHRVVDERPRSGYRVHRSGDSAPESQKSPLKNLPM

SEQ ID NO: 875150 - protein, 155 aa, Homo sapiens
VARQRGSSLPSQLGGQTEALLTFQTGRQPERGAPHLPDGAAARQRHSSFARWWGRRAEGHFTSQTGQQPGRGGTRIFIAALFTIAKTWSQSKCQSMIDWIKKMWHIYTMEHYAAIKKHDFMSFAGTWMKLETIILSKLTQEQKTKHHMFSLISES

SEQ ID NO: 875151 - protein, 110 aa, Homo sapiens
MEAFHGWKEKLQRSFTWIGREVAQRHVMSGKGRVQRLWMEGKVVPKLMDSGPRPERRKREGGSPGSLASYGFFTKCSVFCLRRSGYETRGQSATRGVRSVPSSSWGWAGD

SEQ ID NO: 875152 - protein, 68 aa, Homo sapiens
GEASPCSTLYYELAIEGSLHMHILGPLDSLDDLSKDHFSGVVSPEEKDIPEETEETKTYGTGVNSALK

SEQ ID NO: 875153 - protein, 183 aa, Homo sapiens
ALESCETRVVAALEVPGAVPSRPFRAYSVFHTVEQLSYLMAEDKHCGHIQADPAQVGDNAVVEGLEPFLSQDLQPQSRVFCICAFQAPHPGLDPVQWSVSQDTGCACNGSEGPSDQRVHGLAGVVPSVPAMQGGQEKKRMAWFQPCFSAGAVRPRWVPLFPHNLPNPGGRLLCTGRLGRSGGG

SEQ ID NO: 875154 - protein, 189 aa, Homo sapiens
GSLFLYGTEKVRLTYLRNQLAEKDEFDIPDLTDNSRRQLFRTKSKRRFFFRVSEEQQKQQRREMLKDPFVRSKLISPPTNFNHLVHVGPANGRPGARDKSPAPEEKGRVARGSGPQRPHSFSEALRRPASMGSEGLGGDADPMKRKPWTSLSSESVSCPQGSLSPATSLMQVSERPRSLPLSPELESSP

SEQ ID NO: 875155 - protein, 133 aa, Homo sapiens
KSLTHLDLHSNKFTSFPSYLLKMSCIANLDVSRNDIGPSVVLDPTVKCPTLKQFNLSYNQLSFVPENLTDVVEKLEQLILEGNKISGICSPLRLKELKILNLSKNHISSLSENFLEACPKVESFSARMNFLGK

SEQ ID NO: 875156 - protein, 152 aa, Homo sapiens
TGPDSLVCCSLSYVHAHIQTEPNSLWPPGSLLVHQRAKHTPTQGPLNLLFPPTATFCSHISAWLPSFWSLLNHHLEGEQSGKSTPQHPSVPNPLGFPVFFMKQTTLNIIHLSLISSPLECKLHEGRGFAILTVVSPVPESVPGMVNRHLLGE

SEQ ID NO: 875157 - protein, 148 aa, Homo sapiens [sequence omitted]

SEQ ID NO: 875158 - protein, 132 aa, Homo sapiens
AELTGTCHHAQLIFVILVEMRFLHVGQADLEHLTSGDLPASASKSAGITRVSHCALTTFRHLNLQFPLPHLVSSKTSTWYTPSSTTLSQIAAPSLSCSTPSYSSHVWVIVLHINVFMCQCPVSCTERHSPCS

SEQ ID NO: 875159 - protein, 111 aa, Homo sapiens
MDSVLIHVLIDGLVACVAQLIRIADELLQFILQVQEVPYVEENGRAEETEADAPLPEEPSLPDLPDLSDLDSILTPREDEDLIFDIDQAMLDMDNLYEDTVSGINDDLTGD

SEQ ID NO: 875160 - protein, 119 aa, Homo sapiens
AGLPPAAAHARISLLLPLQPRRCTGFIGLKSSCSSLASAPQHRLLPLRGRPAVVLLTTSHDRGPEVTFPLAMNNPIVTPHGCAHRKLLMGRRGTVQAGFSSPYHSAGCVGGQESHYVCK

SEQ ID NO: 875161 - protein, 105 aa, Homo sapiens
MLPLKYFSHLFPFLPFRFVSGPHYSYLIISPLQIHATHNYWVSSTAILLKNFPLLPNFYKVQIPYPDWVQWLMPIIPALWEAKAGGLRGQEIETIVANMVKPYLY

SEQ ID NO: 875162 - protein, 105 aa, Homo sapiens; identical to SEQ ID NO: 875161

SEQ ID NO: 875163 - protein, 79 aa, Homo sapiens
MHTHTHTHTHTHRAVAEAYAYVHTHIITHFLPVLQTHIITHFPPVLQTHIITHFPPVLQTHVITHFPPVLQTHIIMHFP

SEQ ID NO: 875164 - protein, 325 aa, Homo sapiens
  misc_feature (323)..(323): Xaa can be any naturally occurring amino acid
  misc_feature (325)..(325): Xaa can be any naturally occurring amino acid
MLPAVGSVDEEEDPAEEDCPELVPIETTQSEEEEKSGLGAKIPVTIITGYLGAGKTTLLNYILTEQHSKRVAVILNESGEGSALEKSLAVSQGGELYEEWLELRNGCLCCSVKDNGLRAIENLMQKKGKFDDILLETTGLADPGAVASMFWVDAELGSDIYLDGIITIVDSKYGLKHLTEEKPDGLINEATRQVALADIVLINKTDLVPEEDVKKLRTTIRSINGLGQILETQRSRVDLSNVLDLHAFDSLSGISLQKKLQHVPGTQPHLDQSIVTITFEVPGNAKEEHLNMFIQNLLWEKNMRNKDNHCMEVIRLKVLVSIXDX

SEQ ID NO: 875165 - protein, 277 aa, Homo sapiens
  misc_feature (275)..(275): Xaa can be any naturally occurring amino acid
  misc_feature (277)..(277): Xaa can be any naturally occurring amino acid
MLPAVGSVDEEEDPAEEDCPELVPIETTQSEEEEKSGLGAKIPVTIITGYLGAGKTTLLNYILTEQHSKRVAVILNESGEGSALEKSLAVSQGGELYEEWLELRNGCLCCSVKDNGLRAIENLMQKKGKFDDILLETTGLADPGAVASMFWVDAELGSDIYLDGIITIVDSKYGLKHLTEEKPDGLINEATRSINGLGQILETQRSSLQKKLQHVPGTQPHLDQSIVTITFEVPGNAKEEHLNMFIQNLLWEKNMRNKDNHCMEVIRLKVLVSIXDX

SEQ ID NO: 875166 - protein, 180 aa, Homo sapiens
MLPAVGSVDEEEDPAEEDCPELVPIETTQSEEEEKSGLGAKIPVTIITGYLGAGKTTLLNYILTEQHSKRVAVILNESGEGSALEKSLAVSQGGELYEEWLELRNGCLCCSVKDNGLRAIENLMQKKGKFDDILLETTGLADPGAVASMFWVDAELGSDIYLDGIITIVDSKYGLKVKYH

SEQ ID NO: 875167 - protein, 81 aa, Homo sapiens
SQPPCDAGSMAVPMLQMRKLRHSGVNIACPRPHSQEVTDQNCSHAQFPGDGSASHRSCIYMSSGGGACVCPPQILDPSWPR

SEQ ID NO: 875168 - protein, 88 aa, Homo sapiens
MCVLRTHLDAQFCPLPEEEDTAPSRAVLGSRPSPGGAGWKLSKSSFHGGRPLGTGDRTASHTQYIWMCSEIYALAPEMDSGVLATALA

SEQ ID NO: 875169 - protein, 68 aa, Homo sapiens
ERVLRGDGTSETGRTGWRRLYEQEGKEDGARRGEAAEEEQGGVWREWSLQKGAAETGAGRLKKGALER

SEQ ID NO: 875170 - protein, 109 aa, Homo sapiens
PPRAQWRVDSNGAPKTIADSATSPKLLYVDRVVQEILETERTYVQDLKSIVEDYLDCIRDQTKLPLGTEERSALFGNIQDIYHFNSELLQDLENCENDPVAIAECFVSK

SEQ ID NO: 875171 - protein, 127 aa, Homo sapiens
ATDAAEHRRALRETALHKRQKGPRRQEKERRKNKRAEAAGNCLPPDAWGLKPRRQSLRPRSREGQCGGTQSDPSFCLVSGAPNNSVSHTADAQQVSDASVAATGLSWISLGVCIVPPSMARQCLLVC

SEQ ID NO: 875172 - protein, 44 aa, Homo sapiens
MTDATHQAEADKGIITCHNPSAHFYFRRVFVSYNRFPHAKSEFI

SEQ ID NO: 875173 - protein, 107 aa, Homo sapiens
MGLRDQPAQGWPVPPPSDKCTQESSMGVSSAPGLEGSCHCGWGLTSWTSVGNRRLQHAASERPEPGPGALSSRHPGCGLWAASPSCGFQVPGYIGALLCPGSFREKE

SEQ ID NO: 875174 - protein, 120 aa, Homo sapiens
MFQIRLSSLRKMTNPFQAWFKLKLKLCLRFSSREVLIVSWLFLVYWLRNCALEGRGVLRMGQLMEGEWKTLVAQENMSTSVHHCNSGLIIIFSASVSTNETMPLNHILCCLQYFPPLRHL

SEQ ID NO: 875175 - protein, 123 aa, Homo sapiens
QETASTEEGTVQIQEGAVATGEDPTSVAIASIQSAATFPDPNVKYVFRTENGGQVTYRVIQVSEGQLDGQTEGTGAISGYPATQSMTQAVIQGAFTSDDAVDTEGTAAETHYTYLPSHVELIK

SEQ ID NO: 875176 - protein, 120 aa, Homo sapiens; identical to SEQ ID NO: 875174

SEQ ID NO: 875177 - protein, 111 aa, Homo sapiens
HISLWKHSRLYRGQAWSLPSHQFCVELPSLKMVNCFLLAFILSGSLTFRTLFSVSNLFISQDPRLSYLHVHCKCNVNESSDKIFLYFVISKEFLYRRTQWGLACTSTIVSE

SEQ ID NO: 875178 - protein, 115 aa, Homo sapiens
AILPYGTGYARTPVRSQWSSFHPVLLRLRQSETSCLGPNRRRVARREDRASFPRRGRGTEQGGLGIGLSKAVQSFREGQKSLKREVKPFLSVGLLASYLALLSCPPGSHFHGLFG

SEQ ID NO: 875179 - protein, 43 aa, Homo sapiens
TCCAGLPSRGNFEWVLSSRNEVDPQTTGGQGQTDPVALKMYVL

SEQ ID NO: 875180 - protein, 102 aa, Homo sapiens
GREAGPGRRGGAWRKGRAAGSALGTKGTGGRNAPSRSRSDARVDQGLSSGERFPTGFVHSPSPAAPALRAPVSSSGSWKQILPEVSRTHESVLISFSFGKKY

SEQ ID NO: 875181 - protein, 57 aa, Homo sapiens
MWAAVPLPAFLPRWGSGEDLAALAHLVLPAGPERRRASLLAFAEDAPPSRARRRSAE

SEQ ID NO: 875182 - protein, 103 aa, Homo sapiens
LKANRRNPLFQAVNMKQRVDVRDAPKTGHSVNDKTETRIHILNAQSSARPTKPFGFCKSTEFPQNKTQTITNRCFRWSVFILVFIQCSFLLLLQKQKVAKRVF

SEQ ID NO: 875183 - protein, 55 aa, Homo sapiens
LEDPPARGNTGLLISSTQLEKANTAQSPLYSTPVSQQKCFGRAQWLTPVIPALWE

SEQ ID NO: 875184 - protein, 73 aa, Homo sapiens
QNSFLLVGIKEGFVDLVALELALEGEAGFGPVAIWAGEDMSLACLTVSEDLRFLELRMCDAEEVWKGKKQNCK

SEQ ID NO: 875185 - protein, 129 aa, Homo sapiens
HVFTVCACACFVCACMFSYCVYLRLFCVCVHVCSYHVCMRMCVTVCVRALVRAHVCLVTVCLRLFCVCAHMCLVPCVCVCAWACVFSCCVRVLVLCVCTHVCLVTVCACACFVCVHACLVTACACACFV

SEQ ID NO: 875186 - protein, 140 aa, Homo sapiens
MKNNTRFKNQYSITTIYIVLTLYWCYKQSRDDLASIQEDVPRLYANTVPFYIRNLSISDIGIGRRPVARGPPSQGPPPDLQTLGFDPLSEEAVEQLEGVLRLLLGASVQCEHRELFIRHIQGLSLEVQSELAAAIQEVLR

SEQ ID NO: 875187 - protein, 145 aa, Homo sapiens
  misc_feature (134)..(134): Xaa can be any naturally occurring amino acid
MTNSSNKAKEPIFYFGDVEYSVDESAGYVEVQVWRTGTDLSKSSSVTVRSRKTDPPSADAGTDYVGISRNLDFAPGVNMQPVRVVILDDLGQPALEGIEKFELVLRMPMNAALGEPSKATVSINDSVSDCLRSXFKERIFTGQRK

SEQ ID NO: 875188 - protein, 138 aa, Homo sapiens
PLATEHTDSPHPVNSGTVPPLLSHAPFPHLGSIHMPPVVSSQRLEGPSSALQSCFFMELPLLPYFSLYIPAFLEPLNSTLCLHQVLVPLPALWLETLQVTRWATEASLPSCPSLVTVHTACHQCLKPVASCTFVWLSG

SEQ ID NO: 875189 - protein, 101 aa, Homo sapiens
GPWQQASGACSCLFSCPANRRNLPPIISLSACLSRLVCIHCCVYNKSAGPCWKLGRFNGELSKHLQHPFECNWKYWCLRSYTSLNHLLLTRFWEIQHQGAS

SEQ ID NO: 875190 - protein, 361 aa, Homo sapiens
MEKGGNIQLEIPDFSNSVLSHLNQLRMQGRLCDIVVNVQGQAFRAHKVVLAASSPYFRDHMSLNEMSTVSISVIKNPTVFEQLLSFCYTGRICLQLADIISYLTAASFLQMQHIIDKCTQILEGIHFKINVAEVEAELSQTRTKHQERPPESHRVTPNLNRSLSPRHNTPKGNRRGQVSAVLDIRELSPPEESTSPQIIEPSSDVESREPILRINRAGQWYVETGVADRGGRSDDEVRVLGAVHIKTENLEEWLGPENQPSGEDGSSAEEVTAMVIDTTGHGSVGQENYTLGSSGAKVARPTSSEVDRFSPSGSVVPLTERHRARSESPGRMDEPKQPSSQVWSCGFRTALVVGGIATVYE

SEQ ID NO: 875191 - protein, 361 aa, Homo sapiens; identical to SEQ ID NO: 875190

SEQ ID NO: 875192 - protein, 129 aa, Homo sapiens
MPLGFCPSTDGRTLQQSHKYTNTTHHTIHIARTHTHYTHHIHITPHTRTHTHTHTPHLLKPPGGWPVACGVARGPCVGPGQEGISSGVETRPRTCMPLQWDQGGGGGSGKGPSTSRGHRARLEEVGQNI

SEQ ID NO: 875193 - protein, 129 aa, Homo sapiens; identical to SEQ ID NO: 875192

SEQ ID NO: 875194 - protein, 123 aa, Homo sapiens
FSVRRLRGDINKLKIEHTCRLHRRDAQRCHLRLEERGELADLFCDSPLASSFSLSTPLKLIGVTHFCVPSITQPICLSFKQKAFKHISEPHFHLSGVLKGGSGDCKIRGIWSESSLASASSNR

SEQ ID NO: 875195 - protein, 116 aa, Homo sapiens
FSVRRLRGDINKLKIEHTCRLHRRDAQRCHLRLEERGELADLFCDSPLASSFSLSTPLKLIGVTHFCVPSITQPICLSFKQKAFKHISEPLKGGSGDCKIRGIWSESSLASASSNR

SEQ ID NO: 875196 - protein, 176 aa, Homo sapiens [sequence omitted]

SEQ ID NO: 875197 - protein, 111 aa, Homo sapiens
GSLNAQKVCLMQSLNWQPDGLIQHGWSVKKVYIRIRNCPTRSSMKIGLGVFHLLLQEYWSHKMCGRHIEIQYGFYFHFGRHACPPQIDTRLGRLGFSLILENKLMATVAPF

SEQ ID NO: 875198 - protein, 42 aa, Homo sapiens
RKDPCKVAGTLITSHQPPPGACTLSPRESAPGEVSATANRQE

SEQ ID NO: 875199 - protein, 128 aa, Homo sapiens
CLRTVQLLIEHFSPRKHQGSGVAIYFTLFLLSCLGSLNFDLGGNQRMARVSSSSCQIKCSPLAQRRGLNSLPVNLISVSAPLFHGDPFSPTLFNHLSWPLLSWPCSNSYNPEDRQVLLPFSYYLVTPS

SEQ ID NO: 875200 - protein, 69 aa, Homo sapiens
GFGKGGHNVDKAPVYCIRRLPDLSSSSSSPVRPKAEPPTLTSQGRCQRVWMRRACLSGLSATSSLPLCP

SEQ ID NO: 875201 - protein, 76 aa, Homo sapiens
VVFVGKIDEGQRILRKASQREMTVLMSSSLIRGKQKGQRRKQEMESWKQEDVRRESQVQGCRCLQELEKARRRMLS

SEQ ID NO: 875202 - protein, 170 aa, Homo sapiens
RTSPSPPKGMPNPAEKRSSPAKERERGNVNPRRKRQSKEEASIQETNAKPSKECKAKPSGYMPAKPLTRVQHARASRYRAAKPLRACGVRLQAVTGQSDGYAGAACACKPLQASQAAAARATCACGVHISGGVSVRGTDTGRCVQPTCLSLGARNVTDSPVFPANFVGVS

SEQ ID NO: 875203 - protein, 34 aa, Homo sapiens
MATKARRRFWKIRYKSERKKGRKEETHKEHQLCQ

SEQ ID NO: 875204 - protein, 134 aa, Homo sapiens
MKSSRPLKMFITTFNLDIICSNYHHFSFIQHHERAQLAVVFEELQEVAAEQSRILILITLLSRSQRTKLIKALCLEIKGNRTSAKFFLSIHTLKTCKINDTQNGREILITRVKTSRYFFPVHINGLYCGIYMKG

SEQ ID NO: 875205 - protein, 134 aa, Homo sapiens; identical to SEQ ID NO: 875204

SEQ ID NO: 875206 - protein, 137 aa, Homo sapiens [sequence omitted]

SEQ ID NO: 875207 - protein, 169 aa, Homo sapiens
MLVSGQLQTMMKAMVIRAFFYTSCQTCQDWLTRIRLSIMRVGLLAGQPAVTVRHGFDLLTEMKTTSLSQGNELEITIMMVVEALCELHCPEAIQGIAVWSSSIVGKNLLWINSVAQQAEGRFEKASVEYQEHLCAMTGVDCCISSFDKLVLTLANAGCNSASPKHCLNG

SEQ ID NO: 875208 - protein, 355 aa, Homo sapiens
VRERFPGAQHENVPFIAVTSFLCLRFFSPAIMSPKLFHLRERHADARTSRTLLLLAKAVQNVGNMDTPASRAKEAWMEPLQPTVRQGVAQLKDFITKLVDIEEKDELDLQRTLSLQAPPVKEGPLFIHRTKGKGPLMSSSFKKLYFSLTTEALSFAKTPSSKKSALIKLANIRAAEKVEEKNFGSSHVMQVIYTDDAGRPQTAYLQCKCVNELNQWLSVLRKVSINNTGLLGSYHPGIFCGDKWSCCHQKEKTGQGCDKTRSRVTLQEWNDPLDHDLEAQLIYRHLLGVEAMLWERHRELSGGAEAGTVPTSPGKVPEDSLARLLRVLQDLREAHSSSPAGSPPSEPNCLLELQT

SEQ ID NO: 875209 - protein, 274 aa, Homo sapiens
VRERFPGAQHENVPFIAVTSFLCLRFFSPAIMSPKLFHLRERHADARTSRTLLLLAKAVQNVGNMDTPASRAKEAWMEPLQPTVRQGVAQLKDFITKLVDIEEKDELDLQRTLSLQAPPVKEGPLFIHRTKGKGPLMSSSFKKLYFSLTTEALSFAKTPSSKKSALIKLANIRAAEKVEEKNFGSSHVMQVIYTDDAGRPQTAYLQCKCVNELNQWLSVLRKVSINNTGLLGSYHPGIFCGDKWSCCHQKEKTGGRGGLGPGLCIRPLRDRASG

SEQ ID NO: 875210 - protein, 380 aa, Homo sapiens
STRWARLGRVGLGWGEGRAKSGGEPGALGRTRRLCPGEGQGRSLRGGGCQEPWSGGLQPALFRTLQNVPFIAVTSFLCLRFFSPAIMSPKLFHLRERHADARTSRTLLLLAKAVQNVGNMDTPASRAKEAWMEPLQPTVRQGVAQLKDFITKLVDIEEKDELDLQRTLSLQAPPVKEGPLFIHRTKGKGPLMSSSFKKLYFSLTTEALSFAKTPSSKKSALIKLANIRAAEKVEEKNFGSSHVMQVIYTDDAGRPQTAYLQCKCDELSLTKWLAVLPEGQGCDKTRSRVTLQEWNDPLDHDLEAQLIYRHLLGVEAMLWERHRELSGGAEAGTVPTSPGKVPEDSLARLLRVLQDLREAHSSSPAGSPPSEPNCLLELQT

SEQ ID NO: 875211 - protein, 157 aa, Homo sapiens
ASEPRSLSAPALIPSFLKHRQGLSLKSLYAIKGSSSRRNAIVLKLSPLEFSSNNQKRLMTRAGKKTKSHHHTQIEFSSTFLRAAPRDCLGDFICIIRPPLFTVKFYLSLPTNCHHLPQSSEELRPSQVVCSLGPCISPEKHLLPIRITYIPHVSSPL

SEQ ID NO: 875212 - protein, 242 aa, Homo sapiens
  misc_feature (184)..(184): Xaa can be any naturally occurring amino acid
MAVWIQAQQLQGEALHQMQALYGQHFPIEVRHYLSQWIESQAWDSVDLDNPQENIKATQLLEGLVQELQKKAEHQVGEDGFLLKIKLGHYATQLQNTYDRCPMELVRCIRHILYNEQRLVREANNGSSPAGSLADAMSQKHLQINQTFEELRLVTQDTENELKKLQQTQEYFIIQYQESLRIQXQFGPLAQLSPQERLSRETALQQKQVSLEAWLQREAQTLQQYRVELAEKHQKTLQLLRK

SEQ ID NO: 875213 - protein, 102 aa, Homo sapiens
MWLYPICSFYYSQSDLTKKLNLNMQILYPQLCNDFCFRISDLFKITYEIIFPCLTLYPYLSYVYVPGELLTKHQLCFSAMTIDLIFTPFSLQDLSLLRFLCL

SEQ ID NO: 875214 - protein, 114 aa, Homo sapiens
PAVASLDGKRLYITTSLYSAWDKQFYPDLIREGSVMLQVDVDTVKGGAEVEPQHGETPSLCCLLIIQSWHWQLCTKNTQISWVWWYRPITPTSQEAEVGGSPEPREVKAAMSCD

SEQ ID NO: 875215 - protein, 43 aa, Homo sapiens
MLCVGCKGSGSVISPECPLQMPGSGRSAVKGRREAAMHQLFFG

SEQ ID NO: 875216 - protein, 49 aa, Homo sapiens
IGPTEASGKMQDCMEFKRSARITKTDFLGSQNGFKIHSEEPGAPLLLRA

SEQ ID NO: 875217 - protein, 30 aa, Homo sapiens
PRSSSRCPTGSCAVSTSHASPPRGPTPSSR

SEQ ID NO: 875218 - protein, 73 aa, Homo sapiens
REQALSPTGHLAHTASTDSPQPFPDLAGVAGAAGLMAPILAPGGELIHRSGPFTLREKIVACIPNPRPRLWVS

SEQ ID NO: 875219 - protein, 75 aa, Homo sapiens
QAERIVLPGSLCAGYPQGHKDACQVCTQPPQPPESPPCAQHPPSLNSRTQDIPTQAQDPGLQPRGTTPGVWNPEN

SEQ ID NO: 875220 - protein, 327 aa, Homo sapiens
QDFRLRWDFWTEQWSAEAPATCALQGAQTRVQALGSATLTQPSLEDRMRGVSCLQVLLLLVLGAAGTQGRKSAACGQPRMSSRIVGGRDGRDGEWPWQASIQHRGAHVCGGSLIAPQWVLTAAHCFPRRALPAEYRVRLGALRLGSTSPRTLSVPVRRVLLPPDYSEDGARGDLALLQLRRPVPLSARVQPVCLPVPGARPPPGTPCRVTGWGSLRPGVPLPEWRPLQGVRVPLLDSRTCDGLYHVGADVPQAERIVLPGSLCAGYPQGHKDACQGDSGGPLTCLQSGSWVLVGVVSWGKGCALPNRPGVYTSVATYSPWIQARVSF

SEQ ID NO: 875221 - protein, 118 aa, Homo sapiens
TLQREAPGWPDGAGLDCVEGAYLPGLCCAVLCWPDCIGYGRLCWAVGLGWLHWLRPGSLVPGVILGSAWCDQRSHQSKTFILEAGMASVAMLTDLSIHVVESDSSELVVAAVTLTEWN

SEQ ID NO: 875222 - protein, 110 aa, Homo sapiens
MASFLEACETTNPSIKKRPLIRETSRLISGDTFRISPKQVKVRSSVVIEDKSTRDPEYIYSQPYVCRCTQQLRRDSDHRERAMMTMAVLSKRKGGNVGKSKRDQIVTVSV

SEQ ID NO: 875223 - protein, 61 aa, Homo sapiens
MPYSVDLVHAQIHVAEGRSLPDLGLRQENIRINGCAIQCRVTTEDPARSFQPDTGRIEVGG

SEQ ID NO: 875224 - protein, 115 aa, Homo sapiens
VKQTKVGTRQVPRTVTLWGGLESDRPRLEPGRYHGRSHCGGAGVRQTKVGTRQVPRTVTLWGGWSQTDQGWNPAGTTDGHTVGGLESDRPRLEPGRYHGRQVPAAHPSGRNDGQQ

SEQ ID NO: 875225 - protein, 108 aa, Homo sapiens
MRRPNRATGGLTPPWPHKRSPGKGDAGVSEHSPTPPPFVGVCTEHNCPAPQKGLWEEHQKVALWGNWPSSNTTSPTTAESRNNRPGGDRVSCTAGQEQGQASVQLQRE

SEQ ID NO: 875226 - protein, 114 aa, Homo sapiens
QQACCSQAQHGQLLLRAFSAYPGWVAASLWCAHGSPECLVDREPSAGRTAAPCPRQPPGAWSPGTSRAVLSFSPLSLQPLTQGMPDPKLDELLDLSDPRQNGRKVPNFQDWPGD

SEQ ID NO: 875227 - protein, 99 aa, Homo sapiens
CDVNGFSFVKNSMKYYDDCAKILGNTIMRELAPQFQIPWSIPTEAEDIPIVPTTSGTMMELRCVIAIIRHGDRTPKQKMKMEVKHPRFFALFEKHGGYK

SEQ ID NO: 875228 - protein, 84 aa, Homo sapiens
MSSHSAPYLEKTICPTLSCRVGFLVLTGPGGVSTLHHHHSVSTTAALEALMSASVSPPAFSFLSKITLAMCRNPGFYFQVSDAL

SEQ ID NO: 875229 - protein, 124 aa, Homo sapiens
LPSPGEWQPPEVVVLVLGDARPKSPGRSGLGGGRRSGPSLEQGAPGVTCPSSHPGVTVEGRGWAAEGTALANNILVGGVQRHQGGLTRCASGVAQTLAVVLPSEEVCRWVRGYDLVVFTFFLAA

SEQ ID NO: 875230 - protein, 68 aa, Homo sapiens
AMSFNWTHSLETDFQMLPLQDYWRNASCAGDGIVRSGTQVFAAKERALKEEIQLVHVTMNQRSGTQNY

SEQ ID NO: 875231 - protein, 74 aa, Homo sapiens
DVGDGDGIGDVGDGGGDGVSGNKDGRHRGVDKSIALDPQGSDSDSVSILAYCMMWATTTTTMTIITIIRVTTAP

SEQ ID NO: 875232 - protein, 153 aa, Homo sapiens
NKHEKIHTGEKPYKCKECGKVISSSSSFAKHKRIHTGEKPFKCLECGKAFNISTTLTKHRRIHTGEKPYTCEVCGKAFRQSANLYVHRRIHTGEKPYTCGECGKTFRQSANLYVHRRIHTGEKPYKCEDCGKAFGRYTALNQHKKIHTGEKPY

SEQ ID NO: 875233 - protein, 721 aa, Homo sapiens
GTRAEPTEPTEPTEEPTEEPQRPNGQTPSSREGAREAATMCGIFAYMNYRVPRTRKEIFETLIKGLQRLEYRGYDSAGVAIDGNNHEVKERHIQLVKKRGKVKALDEELYKQDSMDLKVEFETHFGIAHTRWATHGVPSAVNSHPQRSDKGNEFVVIHNGIITNYKDLRKFLESKGYEFESETDTETIAKLIKYVFDNRETEDITFSTLVERVIQQLEGAFALVFKSVHYPGEAVATRRGSPLLIGVRSKYKLSTEQIPILYRTCTLENVKNICKTRMKRLDSSACLHAVGDKAVEFFFASDASAIIEHTNRVIFLEDDDIAAVADGKLSIHRVKRSASDDPSRAIQTLQMELQQIMKGNFSAFMQKEIFEQPESVFNTMRGRVNFETNTVLLGGLKDHLKEIRRCRRLIVIGCGTSYHAAVATRQVLEELTELPVMVELASDFLDRNTPVFRDDVCFFISQSGETADTLLALRYCKDRGALTVGVTNTVGSSISRETDCGVHINAGPEVGVASTKAYTSQFISLVMFGLMMSEDRISLQNRRQEIIRGLRSLPELIKEVLSLEEKIHDLALELYTQRSLLVMGRGYNYATCLEGALKIKEITYMHSEGILAGELKHGPLALIDKQMPVIMVIMKDPCFAKCQNALQQVTARQGRPIILCSKDDTESSKFAYKTIELPHTVDCLQGILSVIPLQLLSFHLAVLRGYDVDFPRNLAKSVTVE

SEQ ID NO: 875234 - protein, 350 aa, Homo sapiens
MKCSLRVWFLSVAFLLVFIMSLLFTYSHHSMATLPYLDSGALDGTHRVKLVPGYAGLQRLSKERLSGKSCACRRCMGDAGASDWFDSHFDGNISPVWTRENMDLPPDVQRWWMMLQPQFKSHNTNEVLEKLFQIVPGENPYRFRDPHQCRRCAVVGNSGNLRGSGYGQDVDGHNFIMRMNQAPTVGFEQDVGSRTTHHFMYPESAKNLPANVSFVLVPFKVLDLLWIASALSTGQIRFTYAPVKSFLRVDKEKVQIYNPAFFKYIHDRWTEHHGRYPSTGMLVLFFALHVCDEVNVYGFGADSRGNWHHYWENNRYAGEFRKTGVHDADFEAHIIDMLAKASKIEVYRGN

SEQ ID NO: 875235 - protein, 350 aa, Homo sapiens; identical to SEQ ID NO: 875234

SEQ ID NO: 875236 - protein, 284 aa, Homo sapiens
RFLRRRAWRGPRRTTSVSLGRRIVLVAGQTWRRAGGLCGPQEIGGRPARFPTPSCFGLGFSFTLSEEESMARASAKHFRQPRAEDRLSSWPDLEESGRSLRASGDRWPPGPFPACPDRCVQTHQRKAVAAGPPVPPRPRCGMAAPPGVPASPGSREWRPLRGGVLPGRTPDRWRGQGRARGSPVPFSARCCHSRVPSTLPFTRSLLSASPWAGGLLTSLPVALEKNPVPRLRPYPQSSAGSGPWGGGCTAEGGWLWARLPAACTSSSTHRLLPGGNFAWGSFFG

SEQ ID NO: 875237 - protein, 350 aa, Homo sapiens; identical to SEQ ID NO: 875234

SEQ ID NO: 875238 - protein, 350 aa, Homo sapiens; identical to SEQ ID NO: 875234

SEQ ID NO: 875239 - protein, 128 aa, Homo sapiens
ELGTREIIVAQSESKRRKAEEILKSQTPKGGDKKESSKSLVRQGSFTIEKPSPNIPIELIPHINKQTSSTPSSLALTSASRIRERSESLDPDSSMDTTLILKDTEAVMAFLEAKLREDNKTDEGPDDL

SEQ ID NO: 875240 - protein, 95 aa, Homo sapiens
RPLGAPPTPEALRRRFLEPRLSRLPDGRQRRRRRRRPAVRPACRRLALTMMKKKKFKFKVDFELEELSSVPFVNGVLFCKMRLLDGGSFTAESSR

SEQ ID NO: 875241 - protein, 98 aa, Homo sapiens
MRTQRPAPRLGSSLREGGDQGAAAPQGRVGRGLCRPLRHSAGAQRAGEPLVDTRQSRFSAGSLLQPLPQRPRRRLLGSLAFALFVNGVSGVQAPSQFV

SEQ ID NO: 875242 - protein, 237 aa, Homo sapiens
MEPDSVIEDKTIELMNTSVMEDQNEDESPKKNTLWQISNGTSSVIVSRKRPSEGNYQKEKDLCIKYFDQWSESDQVEFVEHLISRMCHYQHGHINSYLKPMLQRDFITALPEQGLDHIAENILSYLDARSLCAAELVCKEWQRVISEGMLWKKLIERMVRTDPLWKGLSERRGWDQYLFKNRPTDGPPNSFYRSLYPKIIQDIETIECNWRCGTNTTWQRIQCRSENSKGGLLFTVR

SEQ ID NO: 875243 - protein, 239 aa, Homo sapiens
MCALSCLQSMPSVRCLQNTSVMEDQNEDESPKKNTLWQISNGTSSVIVSRKRPSEGNYQKEKDLCIKYFDQWSESDQVEFVEHLISRMCHYQHGHINSYLKPMLQRDFITALPEQGLDHIAENILSYLDARSLCAAELVCKEWQRVISEGMLWKKLIERMVRTDPLWKGLSERRGWDQYLFKNRPTDGPPNSFYRSLYPKIIQDIETIEFYLAVWNDTTWQRIQCRSENSKGGLLFTVR

SEQ ID NO: 875244 - protein, 271 aa, Homo sapiens
MEPDSVIEDKTIELMCSVPRSLWLGCANLVESMCALSCLQSMPSVRCLQNTSVMEDQNEDESPKKNTLWQISNGTSSVIVSRKRPSEGNYQKEKDLCIKYFDQWSESDQVEFVEHLISRMCHYQHGHINSYLKPMLQRDFITALPEQGLDHIAENILSYLDARSLCAAELVCKEWQRVISEGMLWKKLIERMVRTDPLWKGLSERRGWDQYLFKNRPTDGPPNSFYRSLYPKIIQDIETIECNWRCGTNTTWQRIQCRSENSKGGLLFTVR

SEQ ID NO: 875245 - protein, 250 aa, Homo sapiens
MEPDSVIEDKTIELMCSVPRSLWLGCANLVESMCALSCLQSMPSVRCLQISNGTSSVIVSRKRPSEGNYQKEKDLCIKYFDQWSESDQVEFVEHLISRMCHYQHGHINSYLKPMLQRDFITALPEQGLDHIAENILSYLDARSLCAAELVCKEWQRVISEGMLWKKLIERMVRTDPLWKGLSERRGWDQYLFKNRPTDGPPNSFYRSLYPKIIQDIETIECNWRCGTNTTWQRIQCRSENSKGGLLFTVR

SEQ ID NO: 875246 - protein, 187 aa, Homo sapiens
MEPDSVIEDKTIELMISNGTSSVIVSRKRPSEGNYQKEKDLCIKYFDQWSESDQVEFVEHLISRMCHYQHGHINSYLKPMLQRDFITALPEQGLDHIAENILSYLDARSLCAAELVCKEWQRVISEGMLWKKLIERMVRTDPLWKGLSERRGWDQYLFKNRPTDGPPNSFYRSLYPKIIQDIETIEF

SEQ ID NO: 875247 - protein, 152 aa, Homo sapiens
MCHYQHGHINSYLKPMLQRDFITALPEQGLDHIAENILSYLDARSLCAAELVCKEWQRVISEGMLWKKLIERMVRTDPLWKGLSERRGWDQYLFKNRPTDGPPNSFYRSLYPKIIQDIETIECNWRCGTNTTWQRIQCRSENSKGGLLFTVR

SEQ ID NO: 875248 - protein, 36 aa, Homo sapiens
IGGKGRTSTFRVLPSGGPLQQTLLCHQGFEPIVSHQ

SEQ ID NO: 875249 - protein, 69 aa, Homo sapiens
IALLNPVEASPPQEPRGHALRIHPTHTGVPDSGPHWTLLQWLPNLSPTPGRLLSSIHSLGSGPSSHYRH

SEQ ID NO: 875250 - protein, 80 aa, Homo sapiens
FRVLYLGTTDPRPATLSQTLLPCDLQVLGDAQPRCQGTLEAVKWLCESSSSQILPKGKIVTYHWNQHLGYCDICLRLTPR

SEQ ID NO: 875251 - protein, 131 aa, Homo sapiens [sequence omitted]

SEQ ID NO: 875252 - protein, 72 aa, Homo sapiens
KGQRPYPVCRARLVMVAQLLWHVQIAPWPQCDSYRGRAEAPGPEDDSSGLMDTVPRLCRLSCFPVCWERELP

SEQ ID NO: 875253 - protein, 57 aa, Homo sapiens
MVNDAEKFAEEDKKLKERIDTRNELESYAYSLKNQIGDIEKLGGKLSSEDKETMETG

SEQ ID NO: 875254 - protein, 112 aa, Homo sapiens
MCSFKSPPEQPYKYHCYHHFTGDDLRLNESPEFTQTGRNRARIQIQTFDIRAYTLFFFFFFFEMESRSVTGQNRRVRILGPRKPRPPGLKEFSGYKPPEHLGPRAPTTKAWQ

SEQ ID NO: 875255 - protein, 160 aa, Homo sapiens
MSRKPWTRRAAGARPRAPPARLTPQSRRPKVGSDAQRRAPQGGIRAGRPRRSEPRPGAQLRAPVLPPPAKSHPLCLLLQHRACLGSRSAQLGVSPTSAAEPPASAPSFRGFEPPVERKGHEVSKVKWIFGGGWCGSQWAGRGKPGSHRPEQGPGWPPPLA

SEQ ID NO: 875256 - protein, 111 aa, Homo sapiens
MAPRPPKAAAVGAHTRVGEIPAVLHRAASPGPWRAHPSRLGCPAAHGQALLAQPGTGRPSQRTGRLAPAGRARPAARSGQASAARRISPEPAASRARGGRVWGMRAGRAAA

SEQ ID NO: 875257 - protein, 118 aa, Homo sapiens [sequence omitted]

SEQ ID NO: 875258 - protein, 36 aa, Homo sapiens
MSTWFPKRGPGDDTRPGPPLPTDTVTVLMDQTRGLA

SEQ ID NO: 875259 - protein, 136 aa, Homo sapiens
GAIIINNNFKSESGFSKKKIDASGKKSRFINKINSQDYSLIHIRLDSVMLFSVCIFPSWKSLIVSIPWNCGIDFTISNFHGLAGPQWSKDTDLALWRCRVITKEQISQAQWLMPVIPTLWEAEVGGLLEPKSSRLQ

SEQ ID NO: 875260 - protein, 78 aa, Homo sapiens
PGSASLAALRGLARALQALEPAEASGSHKLVMSWFEQNGLNSPQRAPLTPGCTDATPICPQPTAAPRDGECESSGRVV

SEQ ID NO: 875261 - protein, 251 aa, Homo sapiens
LFYTLLSAFLFSVGSLFVKKVQDVHAVEISAFRCVFQMLVVIPCLIYRKTGFIGPKGQRIFLILRGVLGSTAMMLIYYAYQTMSLADATVITFSSPVFTSIFAWICLKEKYSPWDALFTVFTITGVILIVRPPFLFGSDTSGMEESYSGHLKGTFAAIGSAVFAASTLVILRKMGKSVDYFLSIWYYVVLGLVESVIILSVLGEWSLPYCGLDRLFLIFIGLFGLGGQIFITKALQIEKAGPVAIMKTMDV

SEQ ID NO: 875262 - protein, 108 aa, Homo sapiens
GYLELPDLGQPYRSAVYSLEEQYLGLALDVDRIKKDQEEEEDQGPPCPRLSRELLEAVEPEVLQDSLDRCYSTPSSCLEQPDSCLPYGSSFYALEEKHVGFSLDVGGE

SEQ ID NO: 875263 - protein, 69 aa, Homo sapiens
NSSNGSLTNKCQRPYVTILFQSLYHPFKPASFILPKNHDAPNSQTIIQAQHILYAVLVTNTLQPNVKPS

SEQ ID NO: 875264 - protein, 172 aa, Homo sapiens
VPVQMLVTSASVLTLDSQAVTTQLLQPPGLDLLEGRDAGNKAGSGSSLCEFSIPGGRGRVGPQGQQGLELGAREQSLLGCMQGACEFWGGDRAWSRYKGLWHHCATSFCESTFTDHLGCTQHLADHWAFWEYTIRRERQWTQTVTMPCAHFAASLGPRRMDAELGVRTPSFA

SEQ ID NO: 875265 - protein, 123 aa, Homo sapiens [sequence omitted]

SEQ ID NO: 875266 - protein, 159 aa, Homo sapiens
LSFLLVNNPGHCQARNLRVPLDSLTASCPNPHHPCLDASNSLLTGPSLTVVLGQSILFPGPDRAFPKYRTAHVTSCFTTFRAPQRLQDRAQTSYDGHPRAVHVAGLHLTCNTPIPPLGRPLLKDCPLYSIHVCGSKEPVFSVLCPLRTFLSLSLLLAWC

SEQ ID NO: 875267 - protein, 60 aa, Homo sapiens
MVCAKTHLEFPAPPSQAYLHQVTFTHLTDIQTCLRCPAPNSQGLELFIEIPAIILDQVPE

SEQ ID NO: 875268 - protein, 68 aa, Homo sapiens
GSCGCSQCNCCKPCCCSSGCGSCCQSSCCNPCCCQSSCCVPVCCQSSCCKPCCCQSSCCVPVCCQCKI

SEQ ID NO: 875269 - protein, 87 aa, Homo sapiens
TPGGRSSDNAMIDLEVYLFILRVETSLDNIWTGFYQGKENVTGRQRNPMNWDLPKTCPSWLRQASGIQAAVCFPWMPTGPALCSHFT

SEQ ID NO: 875270 - protein, 90 aa, Homo sapiens
MGFMKPGHLAMPWAALFCQQLWRMGMLGTRVLSLVLFYKAYHFWVFVVAGAHWLVMTFWLVAQQSDIIDSTCHWRLFNLLVGAVYILCYL

SEQ ID NO: 875271 - protein, 122 aa, Homo sapiens [sequence omitted]

SEQ ID NO: 875272 - protein, 122 aa, Homo sapiens [sequence omitted]

SEQ ID NO: 875273 - protein, 128 aa, Homo sapiens [sequence omitted]

SEQ ID NO: 875274 - protein, 111 aa, Homo sapiens
MLDKYFHVFYTNVIFVICLNQIYFKRFLCRVFMPFSPSECADFLTWYYQLGQEVVSHDGFCQYGFVVLKPNETQNHLSSSCFREVVSKATYLSETGRSLTVVNHQRSYGEN

SEQ ID NO: 875275 - protein, 120 aa, Homo sapiens
AAASASLSPWTTRPSYVLSLALQCFFYGFPVLPPQGEFQLSLGGPAQTSPLPQGTPRFLALSRGSFLLPGWTKAMIAPGQDKLAHKLTINASDPVSAFFVCLEDIRVQAVQNPDPGHPMA

SEQ ID NO: 875276 - protein, 167 aa, Homo sapiens
MSREAGSCRVGTGARARSRKPKKPHYIPRPWGKPYNYKCFQCPFTCLEKSHLYNHMKYSLCKDSLSLLLDSPDWACRRGSTTPRPHAPTPDRPGESDPGRQPQGARPTGAAPAPDLVVADIHSLHCGGGPKSRAKGSPGPPPPVARATRKGPGPSGLLPESWKPGMG

SEQ ID NO: 875277 - protein, 46 aa, Homo sapiens
QHGLQGIGGGWLADGSEGRNRAWSSPSKGALMLDSVLLEDLIRTSC

SEQ ID NO: 875278 - protein, 118 aa, Homo sapiens
MECSIVQDIKRAAGAGMISKKHTLGEVWVQKTSEMNTDKQYFCRTHLGHLLNPGDLVLGFDLANCNLNDEHVNKMNSDRVPDVVLIKKSYDRTKRQRRRNWKLKELARERENMDTDDE

SEQ ID NO: 875279 - protein, 91 aa, Homo sapiens
VIPPRQDKRQTAELPWGYLPEIHISINPEGENVRDGAPRAAAHDENSNSLDWLQRKANGQEISCKRHEPKLAEQSHSNAPGSPDVRPQLPD

SEQ ID NO: 875280 - protein, 102 aa, Homo sapiens
MHLALPWSVAVGLRHHSPRPCYEPRTELVHFAMPQGSRYRHLPRLQGEEIEAQRREVACQDHRARVGPISSPGRVTPGALPPPRMSGWGRQEIRTVEQMVAQ

SEQ ID NO: 875281 - protein, 165 aa, Homo sapiens
RPLQPHLDRQACTLQAGCLRCLGPMNDGSLPVRSPGLSSGTGSEGGSWGHMTAASEGRAPRIQVSSWWQGTCPSKPSKGFRGPVRTGLIDARRFPLTAAAAGLKPAGPCTAPRTSSAEADMKSQHAGRLEPLCLQAAAPFVKIQREREGTKKYKTIFQIKRNVET

SEQ ID NO: 875282 - protein, 76 aa, Homo sapiens
MFASVHSCFLSIHMFYSDCWNPDPHSRPSFTNILDQLTTIEESGFFEMPKDSFHCLQDNWKHEIQEMFDQLRAKEK

SEQ ID NO: 875283 - protein, 1066 aa, Homo sapiens
PLPYWTAVFEYEAAGEDELTLRLGDVVEVLSKDSQVSGDEGWWTGQLNQRVGIFPSNYVTPRSAFSSRCQPGGEDPSCYPPIQLLEIDFAELTLEEIIGIGGFGKVYRAFWIGDEVAVKAARHDPDEDISQTIENVRQEAKLFAMLKHPNIIALRGVCLKEPNLCLVMEFARGGPLNRVLSGKRIPPDILVNWAVQIARGMNYLHDEAIVPIIHRDLKSSNILILQKVENGDLSNKILKITDFGLAREWHRTTKMSAAGTYAWMAPEVIRASMFSKGSDVWSYGVLLWELLTGEVPFRGIDGLAVAYGVAMNKLALPIPSTCPEPFAKLMEDCWNPDPHSRPSFTNILDQLTTIEESGFFEMPKDSFHCLQDNWKHEIQEMFDQLRAKEKELRTWEEELTRAALQQKNQEELLRRREQELAEREIDILERELNIIIHQLCQEKPRVKKRKGKFRKSRLKLKDGNRISLPSDFQHKFTVQASPTMDKRKSLINSRSSPPASPTIIPRLRAIQLTPGESSKTWGRSSVVPKEEGEEEEKRAPKKKGRTWGPGTLGQKELASGDEGSPQRREKANGLSTPSESPHFHLGLKSLVDGYKQWSSSAPNLVKGPRSSPALPGFTSLMEMALLAASWVVPIDIEEDEDSEGPGSGESRLQHSPSQSYLCIPFPRGEDGDGPSSDGIHEEPTPVNSATSTPQLTPTNSLKRGGAHHRRCEVALLGCGAVLAATGLGFDLLEAGKCQLLPLEEPEPPAREEKKRREGLFQRSSRPRRSTSPPSRKLFKKEEPMLLLGDPSASLTLLSLSSISECNSTRSLLRSDSDEIVVYEMPVSPVEAPPLSPCTHNPLVNVRVERFKRDPNQSLTPTHVTLTTPSQPSSHRRTPSDGALKPETLLASRSPSSNGLSPSPGAGMLKTPSPSRDPGEFPRLPDPNVVFPPTPRRWNTQQDSTLERPKTLEFLPRPRPSANRQRLDPWWFVSPSHARSTSPANSSSTETPSNLDSCFASSSSTVEERPGLPALLPFQAGPLPPTERTLLDLDAEGQSQDSTVPLCRAELNTHRPAPYEIQQEFWS

SEQ ID NO: 875284 - protein, 125 aa, Homo sapiens
MDKRKSLINSRSSPPASPTIIPRLRAIQCETVSQISWGQNTQGHLSPALSSHRLVQACSIHNFCHLSSTMCIYMHICTQTLSPLPCLSPLTLLLPPLPFSHISAKGFVGTNGIFSGLQSNLETGV

SEQ ID NO: 875285 - protein, 52 aa, Homo sapiens
MEQNAAALPPECLLSVRSTPSTSPTSLHLITATYEMGASGTPTAIRTQNPFT

SEQ ID NO: 875286 - protein, 34 aa, Homo sapiens
MQSKPRHRGGLEVSKPGTPRPHRVGIVDHAFAAR

SEQ ID NO: 875287 - protein, 127 aa, Homo sapiens
LLPHASPQSPCRYLKVPGELLPKGLCTCCSLSLQYSSPCDHTAHAPTPFGSQLECHLLPMTFPNLSCKILPLPSSVSCFSCFVLENTNQHHLICNYSLEHILSQPREWKLHAGGDIICSVHAVAQQF

SEQ ID NO: 875288 - protein, 80 aa, Homo sapiens
ERDSVGVGPSEPGAGYNLVVHRFLSRSEKRNIRVGVTRFSRCCLRRCHAYNGKRQAVYTSSHCESSTLRRCRLEAWLQYA

SEQ ID NO: 875289 - protein, 260 aa, Homo sapiens
MLPWQFAQFILFTQIASLFPMYVVGYIEPSKFQKIIYMNMISVTLSFILMFGNSMYLSSSYSSSLLMTWAIILKRNEIQKLGVSKLNFWLIQGSAWWCGTIILKFLTSKILGVSDHIRLSDLIAARILRYTDFDTLIYTCAPEFDFMEKATPLRYTKTLLLPVVMVITCFIFKKTVRDISCVLATNIYLRKQLLEHSELAFHTLQLLAFTALAILIMRLKMFLTLHMCVMASLICSRQMLSSQVPCLQWQASSCLHFIPL

SEQ ID NO: 875290 - protein, 305 aa, Homo sapiens
WTPPLHESFSYPFLVLQMYILTLILRTSSNDRRPFIALCLSNVAFMLPWQFAQFILFTQIASLFPMYVVGYIEPSKFQKIIYMNMISVTLSFILMFGNSMYLSSSYSSSLLMTWAIILKRNEIQKLGVSKLNFWLIQGSAWWCGTIILKFLTSKILGVSDHIRLSDLIAARILRYTDFDTLIYTCAPEFDFMEKATPLRYTKTLLLPVVMVITCFIFKKTVRDISCVLATNIYLRKQLLEHSELAFHTLQLLAFTALAILIMRLKMFLTLHMCVMASLICSRQMLSSQVPCLQWQASSCLHFIPL

SEQ ID NO: 875291 - protein, 60 aa, Homo sapiens
MAWRTGQQLAGSYGQLLLLPCGNNLLGNLLEVPFHVQPIHSTRLIVRAPLQVVGALPYPG

SEQ ID NO: 875292 - protein, 37 aa, Homo sapiens
REREPGIVKAYMEGVWMIRTQGVEQESCGKGLDLESG

SEQ ID NO: 875293 - protein, 79 aa, Homo sapiens
EADSRGSPTVPGAFQRHLACLFEPVSPSTGQRLVDADDVEGVEPHPDMEAIFATAFYHVLIGTNSGSLQGFRGQLLKFI

SEQ ID NO: 875294 - protein, 126 aa, Homo sapiens
MQICEAFHTLKKTHTDWDLLCKASDAFQSVRDKRYTGCSHSHSKHHPAPLVLAPPTWKGARHIPTSCLPRMENSLGNTLRTQKATRPVKPFQPVFASKRNAILKSGNTPLLHVKIHKLDELNRGEQ

SEQ ID NO: 875295 - protein, 138 aa, Homo sapiens
MLLLHAPSSPGERQGRNPRDEPPVAPSRAPNGRDVLVQRQPPRSPPVLGRPPRSPRDGEGRHARPLYGEGRHARPLMGKAATLAPCRGKAATLAPCTGKAATLAPRWGRPPRSPPVWGRPPRSPPDGEGRPEKKKKKK

SEQ ID NO: 875296 - protein, 111 aa, Homo sapiens
MCSFTVIHSLHFFIQHSFTGHIFCAGDLAGHKEYRDGQNRVLSFQEISCFSELNFFIRIPNHRVNSALFHKQRCIYWYPWCHFPACDVSSLSGPIPDHTQPKRLLGVQWKV

SEQ ID NO: 875297 - protein, 142 aa, Homo sapiens
MIVYLENPFVSAQNLLKLISNFSNVSGYKINVQKSQAFLYTNNRQTESQIMSEFPFTIASETIKYLGIQLTRDVKDLFKENYKSLLNEIKEDTNKWKNIPCSWVGRINIMKMAILPKVIDRFNAIPIKIPMTFFTELEKRLL

SEQ ID NO: 875298 - protein, 76 aa, Homo sapiens
RSHAGSLTYPSLLCAWLALGKHGIQAGSTSRAQPARLSGQNEPSRCEQNSSRGAAGHRGFQLAKQHLKDPVTFWDE

SEQ ID NO: 875299 - protein, 98 aa, Homo sapiens
PPPPLPRGLNEQQGVTNSQVHLSSSQALPSTLYDLGRAEAREKNLTGSWSGPHGHPGDHQVKWSQGLLSTLGMGGDMSQHEWPEGEGQQPCPRQWEKH

SEQ ID NO: 875300 - protein, 43 aa, Homo sapiens
MFPPASWRPWGPGQSPKGVRWFWQVKPGEGRRKHFHIVNPSDE

SEQ ID NO: 875301 - protein, 148 aa, Homo sapiens
MGANTSRKPPVFDENEDVNFDHFEILRAIGKGSFGKVCIVQKNDTKKMYAMKYMNKQKCVERNEVRNVFKELQIMQGLEHPFLVNLWYSFQDEEDMFMVVDLLLGGDLRYHLQQNVHFKEETVKLFICELVMALDYLQKPSASFTRGY

SEQ ID NO: 875302 - protein, 93 aa, Homo sapiens
RYQAHTTHQLGIQARATIDFSSTTLQEAKESGLTHLALNPDLRSYWSGPNIHFPINCQYKVNPRGTHLRLGFRAFRTEAIMLVSFNSTVQILG

SEQ ID NO: 875303 - protein, 78 aa, Homo sapiens
YVLTTKHTYAIYAHETPMEEGGEEKSPSKKKKKIQKKEEKAETLGLWCLRCLWGVECGPWTSVTFCEGAMASDESELC

SEQ ID NO: 875304 - protein, 123 aa, Homo sapiens
KEVPFSSSSSQLLKIYTVVQFALMLAFYEETFADTAALSQVTLLLRVCFIILTLTSIGFLLDQRPKAAIMETLRCLMFLMLYRFGHLKPLVPSLSSAFEIVFSICIAFWGVRSMKQLTSHPWK

SEQ ID NO: 875305 - protein, 123 aa, Homo sapiens; identical to SEQ ID NO: 875304

SEQ ID NO: 875306 - protein, 111 aa, Homo sapiens
TGAANAVCTFSSLVFKQHWAVASSSPVGVKMTIMSTSIKGFMGGQHCSPPFLSSGPLLSLVALLALMHGIRATPSVTAIPNMPPTSGSSGPAPSTMVAMNCMCPFTLSTIK

SEQ ID NO: 875307 - protein, 207 aa, Homo sapiens
MDGKRRPGPGPGVPPKRARGGLWDDDDAPRPSQFEEDLALMEEMEAEHRLQEQEEEELQSVLEGVADGQVPPSAIDPRWLRPTPPALDPQTEPLIFQQLEIDHYVGPAQPVPGGPPPSHGSVPVLRAFGVTDEGFSVCCHIHGFAPYFYTPAPPGFGPEHMGDLQRELNLAISRDSRGGRELTGPAVLAVELCSRESMYGYHGHGPS

SEQ ID NO: 875308 - protein, 66 aa, Homo sapiens
CSRGSVGREYSMDLRTKSTGGAPTFNVTVTKTDKTLVLLMGKEGVHGGLINKKCYEMASHLRRSQY

SEQ ID NO: 875309 - protein, 254 aa, Homo sapiens
SLRGNQHCLLLDFWPPALGEDKCLLFEAAPLVVIVSAAGECCISRQVLLEKPAQRHPGSAAPGPVPIGNIPLGIPLKPWPHCAACLPAEGLTSHAESKEVHQHELRKLNFLCLQTCMHLKTAMPASHGQTSFLSRQILQSFIPLVPALPSSTPRQDSPHFWRLLLPPPYLIAIWLCPQHALKLFSLSDGGAPSSQMQWELFCPWLDSGCHPTEEIPYSVNHQPRVQARKYASGINIKSSISPDFRYFLNPSLPL

SEQ ID NO: 875310 - protein, 38 aa, Homo sapiens
MNTEWRTCSSSSSCTTFSTKLSSACSLSSTMLCLMIWG

SEQ ID NO: 875311 - protein, 118 aa, Homo sapiens
MRENISYKYREDLSAHLMVAGWDQREGGQVYGTLGGMLTRQPFAIGGSGSTFIYGYVDAAYKPGMSPEECRRFTTDAIALAMSRDGSSGGVIYLVTITAAGVDHRVILGNELPKFYDE

SEQ ID NO: 875312 - protein, 219 aa, Homo sapiens [sequence omitted]

SEQ ID NO: 875313 - protein, 32 aa, Homo sapiens
MSRSFLRPHQKQVLPCLLDSLQNHEPNKPLFF

SEQ ID NO: 875314 - protein, 196 aa, Homo sapiens
MLRCPLGSTILKVKLLDMGEPRALLATALSPPGLSDIERTILLLKEVGALAVSGQREDENPHDGELTFLGRVLAQLPVNQQLGKLIVLGHVFGCLDECLIIAAALSLKNFFAMPFRQHLDGYRNKVNFSGSSKSDCIALVEAFKTWKACRQTGELRYPKDELKWGRFNYHSIKRITEGADLICSTWRLEISQVTCM

SEQ ID NO: 875315 - protein, 129 aa, Homo sapiens
MAKSLRSKWKRKMRAEKRKMNAPKEASRLKSILKLDGDVLMKDVQEIATVVVPKPKHCQEKMQCEVKDEKDDMKMETDIKRNKKTLLDQHGQYPIWMNQRQRKRLKAKREKRKGKSKAKAVKVAKGLAW

SEQ ID NO: 875316 - protein, 31 aa, Homo sapiens
MVKEVGLALRTLLATVDKTIPLLPASTHREI

SEQ ID NO: 875317 - protein, 203 aa, Homo sapiens
MSHCARPLSSLEQSKKCSRRGRRFFQNNFSNYPQPANLRLWSEAGPSPLLILESQCVSPNLLPPQVAPNALLSHRGPGLGLVLGPGFLGQKAGCPQHTLSHRGAGLGLVLGAGFLGQAAGPLDTLHGRQGFFLQQVVFASLAVLALLCVLLLPESRSRGLPQSLQDADRLRRSPLLRGRPRQDHLPLLPPSNSYWAGHTPEQH

SEQ ID NO: 875318 - protein, 49 aa, Homo sapiens
FLLLPREFLLLLAGAQYLPGWTVLFLSVLGLLASRAVSALSSRKGSSRI

SEQ ID NO: 875319 - protein, 150 aa, Homo sapiens [sequence omitted]

SEQ ID NO: 875320 - protein, 126 aa, Homo sapiens
IWSLTLSRRLECSGTISAHCKVCLPGSRNSPTSASHVAGITSAHHQAQQIFVFLVEMALRHVGQADLGLLIPGDPPASASQSAGITGMSHCTWPGYLFCKVSVEVVCPSSSRLACLLADLKEFFIF

SEQ ID NO: 875321 - protein, 91 aa, Homo sapiens
KFLASSDLLASASRSAGIADVSHRIWPLLVAFSEFYVKALLKCPGGLGCPLIKEWGTKKLVALCVWLVNWWTHSEMNWLALSLGDPQCWRL

SEQ ID NO: 875322 - protein, 298 aa, Homo sapiens
NFLKRSYLKRLGDFLFLYQWGFPGTCPTQGPRPERPSGRTTPADIFPSRRHRLLRAPPFRLHREKPATAWSPGRVFKHQDGSNSGKEVPRPALGKRWGDQGKTRSAMAAQIPIVATTSTPGIVRNSKKRPASPSHNGSSGGGYGASKKKKASASSFAQGISMEAMSENKMVPSEFSTGPVEKAAKPLPFKDPNFVHSGHGGAVAGKKNRTWKNLKQILASERALPWQLNDPNYFSIDAPPSFKPAKKYSDVSGLLANYTDPQSKLRFSTIEEFSYIRRLPSDVVTGYLALRKATSIVP

SEQ ID NO: 875323 - protein, 298 aa, Homo sapiens; identical to SEQ ID NO: 875322

SEQ ID NO: 875324 - protein, 303 aa, Homo sapiens
NFLKRSYLKRLGDFLFLYQWGFPGTCPTQGPRPERPSGRTTPADIFPSRRHRLLRAPPFRLHREKPATAWSPGRVFKHQDGSNSGKEVPRPALGKRWGDQGKTRSAMAAQIPIVATTSTPGIVRNSKKRPASPSHNGSSGGGYGASKKKKASASSFAQGISMEAMSENKMVPSEFSTGPVEKAAKPLPFKDPNFVHSGHGGAVAGKKNRTWKNLKQILASERALPWQLNDPNYFSIDAPPSFKPAKKYSDVSGLLEPPNCFPQRLHQLTFPLAMDEGSNFSRCSPTLVNFGFVFIMAILVGVK

SEQ ID NO: 875325 - protein, 215 aa, Homo sapiens
NFLKRSYLKRLGDFLFLYQWGFPGTCPTQGPRPERPSGRTTPADIFPSRRHRLLRAPPFRLHREKPATAWSPGRVFKHQDGSNSGKEVPRPALGKRWGDQGKTRSAMAAQIPIVATTSTPGIVRNSKKRPASPSHNGSSGGGYGASKKKKASASSFAQTSVLMLLHPLSQLRSILMFQVCLPTTQTPRANCGSAPLKSFPTFGGCPLTSSPATWP

SEQ ID NO: 875326 - protein, 201 aa, Homo sapiens
NFLKRSYLKRLGDFLFLYQWGFPGTCPTQGPRPERPSGRTTPADIFPSRRHRLLRAPPFRLHREKPATAWSPGRVFKHQDGSNSGKEVPRPALGKRWGDQGKTRSAMAAQIPIVATTSTPGIVRNSKKRPASPSHNGSSGGGYGASKKKKASASSFAQANYTDPQSKLRFSTIEEFSYIRRLPSDVVTGYLALRKATSIVP

SEQ ID NO: 875327 - protein, 151 aa, Homo sapiens
MIVRPPQPRGNGISMEAMSENKMVPSEFSTGPVEKAAKPLPFKDPNFVHSGHGGAVAGKKNRTWKNLKQILASERALPWQLNDPNYFSIDAPPSFKPAKKYSDVSGLLANYTDPQSKLRFSTIEEFSYIRRLPSDVVTGYLALRKATSIVP

SEQ ID NO: 875328 - protein, 118 aa, Homo sapiens
PSIFEAADLWMGFLWGLFLLMLLLLLSVCLFLTVRPLFCRAAAICWGSNPYPTRLGPSRIWRYYQWRLQNSKDGCLLRPLGGSTDLMPAGTFLYKMSGNPWWVSVRRHGIRDLLKEAL

SEQ ID NO: 875329 - protein, 1640 aa, Homo sapiens
MAQILPVRFQEHFQLQNLGINPANIGFSTLTMESDKFICIREKVGEQAQVTIIDMSDPMAPIRRPISAESAIMNPASKVIALKAGKTLQIFNIEMKSKMKAHTMAEEVIFWKWVSVNTVALVTETAVYHWSMEGDSQPMKMFDRHTSLVGCQVIHYRTDEYQKWLLLVGISAQQNRVVGAMQLYSVDRKVSQPIEGHAAAFAEFKMEGNAKPATLFCFAVRNPTGGKLHIIEVGQPAAGNQPFVKKAVDVFFPPEAQNDFPVAMQIGAKHGVIYLITKYGYLHLYDLESGVCICMNRISADTIFVTAPHKPTSGIIGVNKKGQVLSVCVEEDNIVNYATNVLQNPDLGLRLAVRSNLAGAEKLFVRKFNTLFAQGSYAEAAKVAASAPKGILRTRETVQKFQSIPAQSGQASPLLQYFGILLDQGQLNKLESLELCHLVLQQGRKQLLEKWLKEDKLECSEELGDLVKTTDPMLALSVYLRANVPSKVIQCFAETGQFQKIVLYAKKVGYTPDWIFLLRGVMKISPEQGLQFSRMLVQDEEPLANISQIVDIFMENSLIQQCTSFLLDALKNNRPAEGLLQTWLLEMNLVHAPQVADAILGNKMFTHYDRAHIAQLCEKAGLLQQALEHYTDLYDIKRAVVHTHLLNPEWLVNFFGSLSVEDSVECLHAMLSANIRQNLQLCVQVASKYHEQLGTQALVELFESFKSYKGLFYFLGSIVNFSQDPDVHLKYIQAACKTGQIKEVERICRESSCYNPERVKNFLKEAKLTDQLPLIIVCDRFGFVHDLVLYLYRNNLQRYIEIYVQKVNPSRTPAVIGGLLDVDCSEEVIKHLIMAVRGQFSTDELVAEVEKRNRLKLLLPWLESQIQEGCEEPATHNALAKIYIDSNNSPECFLRENAYYDSSVVGRYCEKRDPHLACVAYERGQCDLELIKVCNENSLFKSEARYLVCRKDPELWAHVLEETNPSRRQLIDQVVQTALSETRDPEEISVTVKAFMTADLPNELIELLEKIVLDNSVFSEHRNLQNLLILTAIKADRTRVMEYISRLDNYDALDIASIAVSSALYEEAFTVFHKFDMNASAIQVLIEHIGNLDRAYEFAERCNEPAVWSQLAQAQLQKDLVKEAINSYIRGDDPSSYLEVVQSASRSNNWEDLVKFLQMARKKGRESYIETELIFALAKTSRVSELEDFINGPNNAHIQQVGDRCYEEGMYEAAKLLYSNVSNFARLASTLVHLGEYQAAVDNSRKASSTRTWKEVCFACMDGQEFRFAQLCGLHIVIHADELEELMCYYQDRGYFEELILLLEAALGLERAHMGMFTELAILYSKFKPQKMLEHLELFWSRVNIPKVLRAAEQAHLWAELVFLYDKYEEYDNAVLTMMSHPTEAWKEGQFKDIITKVANVELCYRALQFYLDYKPLLINDLLLVLSPRLDHTWTVSFFSKAGQLPLVKPYLRSVQSHNNKSVNEALNHLLTEEEDYQGLRASIDAYDNFDNISLAQQLEKHQLMEFRCIAAYLYKGNNWWAQSVELCKKDHLYKDAMQHAAESRDAELAQKLLQWFLEEGKRECFAACLFTCYDLLRPDMVLELAWRHNLVDLAMPYFIQVMREYLSKVDKLDALESLRKQEEHVTEPAPLVFDFDGHE

SEQ ID NO: 875330 - protein, 1583 aa, Homo sapiens
MAQILPVRFQEHFQLQNLGINPANIGFSTLTMESDKFICIREKVGEQAQVTIIDMSDPMAPIRRPISAESAIMNPASKVIALKAGKTLQIFNIEMKSKMKAHTMAEEVIFWKWVSVNTVALVTETAVYHWSMEGDSQPMKMFDRHTSLVGCQVIHYRTDEYQKWLLLVGISAQQNRVVGAMQLYSVDRKVSQPIEGHAAAFAEFKMEGNAKPATLFCFAVRNPTGGKLHIIEVGQPAAGNQPFVKKAVDVFFPPEAQNDFPVAMQIGAKHGVIYLITKYGYLHLYDLESGVCICMNRISADTIFVTAPHKPTSGIIGVNKKGQVLSVCVEEDNIVNYATNVLQNPDLGLRLAVRSNLAGAEKLFVRKFNTLFAQGSYAEAAKVAASAPKGILRTRETVQKFQSIPAQSGQASPLLQYFGILLDQGQLNKLESLELCHLVLQQGRKQLLEKWLKEDKLECSEELGDLVKTTDPMLALSVYLRANVPSKVIQCFAETGQFQKIVLYAKKVGYTPDWIFLLRGVMKISPEQGLQFSRMLVQDEEPLANISQIVDIFMENSLIQQCTSFLLDALKNNRPAEGLLQTWLLEMNLVHAPQVADAILGNKMFTHYDRAHIAQLCEKAGLLQQALEHYTDLYDIKRAVVHTHLLNPEWLVNFFGSLSVEDSVECLHAMLSANIRQNLQLCVQVASKYHEQLGTQALVELFESFKSYKGLFYFLGSIVNFSQDPDVHLKYIQAACKTGQIKEVERICRESSCYNPERVKNFLKEAKLTDQLPLIIVCDRFGFVHDLVLYLYRNNLQRYIEIYVQKVNPSRTPAVIGGLLDVDCSEEVIKHLIMAVRGQFSTDELVAEVEKRNRLKLLLPWLESQIQEGCEEPATHNALAKIYIDSNNSPECFLRENAYYDSSVVGRYCEKRDPHLACVAYERGQCDLELIKVCNENSLFKSEARYLVCRKDPELWAHVLEETNPSRRQLIDQVVQTALSETRDPEEISVTVKAFMTADLPNELIELLEKIVLDNSVFSEHRNLQNLLILTAIKADRTRVMEYISRLDNYDALDIASIAVSSALYEEAFTVFHKFDMNASAIQVLIEHIGNLDRAYEFAERCNEPAVWSQLAQAQLQKDLVKEAINSYIRGDDPSSYLEVVQSASRSNNWEDLVKFLQMARKKGRESYIETELIFALAKTSRVSELEDFINGPNNAHIQQVGDRCYEEGMYEAAKLLYSNVSNFARLASTLVHLGEYQAAVDNSRKASSTRTWKEVCFACMDGQEFRFAQLCGLHIVIHADELEELMCYYQDRGYFEELILLLEAALGLERAHMGMFTELAILYSKFKPQKMLEHLELFWSRVNIPKVLRAAEQAHLWAELVFLYDKYEEYDNAVLTMMSHPTEAWKEGQFKDIITKVANVELCYRALQFYLDYKPLLINDLLLVLSPRLDHTWTVSFFSKAGQLPLVKPYLRSVQSHNNKSVNEALNHLLTEEEDYQDAMQHAAESRDAELAQKLLQWFLEEGKRECFAACLFTCYDLLRPDMVLELAWRHNLVDLAMPYFIQVMREYLSKVDKLDALESLRKQEEHVTEPAPLVFDFDGHE

SEQ ID NO: 875331 - protein, 1165 aa, Homo sapiens
MAQILPVRFQEHFQLQNLGINPANIGFSTLTMESDKFICIREKVGEQAQVTIIDMSDPMAPIRRPISAESAIMNPASKVIALKAGKTLQIFNIEMKSKMKAHTMAEEVIFWKWVSVNTVALVTETAVYHWSMEGDSQPMKMFDRHTSLVGCQVIHYRTDEYQKWLLLVGISAQQNRVVGAMQLYSVDRKVSQPIEGHAAAFAEFKMEGNAKPATLFCFAVRNPTGGKLHIIEVGQPAAGNQPFVKKAVDVFFPPEAQNDFPVAMQIGAKHGVIYLITKYGYLHLYDLESGVCICMNRISADTIFVTAPHKPTSGIIGVNKKGQVLSVCVEEDNIVNYATNVLQNPDLGLRLAVRSNLAGAEKLFVRKFNTLFAQGSYAEAAKVAASAPKGILRTRETVQKFQSIPAQSGQASPLLQYFGILLDQGQLNKLESLELCHLVLQQGRKQLLEKWLKEDKLECSEELGDLVKTTDPMLALSVYLRANVPSKVIQCFAETGQFQKIVLYAKKVGYTPDWIFLLRGVMKISPEQGLQFSRMLVQDEEPLANISQIVDIFMENSLIQQCTSFLLDALKNNRPAEGLLQTWLLEMNLVHAPQVADAILGNKMFTHYDRAHIAQLCEKAGLLQQALEHYTDLYDIKRAVVHTHLLNPEWLVNFFGSLSVEDSVECLHAMLSANIRQNLQLCVQVASKYHEQLGTQALVELFESFKSYKGLFYFLGSIVNFSQDPDVHLKYIQAACKTGQIKEVERICRESSCYNPERVKNFLKEAKLTDQLPLIIVCDRFGFVHDLVLYLYRNNLQRYIEIYVQKVNPSRTPAVIGGLLDVDCSEEVIKHLIMAVRGQFSTDELVAEVEKRNRLKLLLPWLESQIQEGCEEPATHNALAKIYIDSNNSPECFLRENAYYDSSVVGRYCEKRDPHLACVAYERGQCDLELIKVCNENSLFKSEARYLVCRKDPELWAHVLEETNPSRRQLIDQVVQTALSETRDPEEISVTVKAFMTADLPNELIELLEKIVLDNSVFSEHRNLQNLLILTAIKADRTRVMEYISRLDNYDALDIASIAVSSALYEEAFTVFHKFDMNASAIQVLIEHIGNLDRAYEFAERCNEPAVWSQLAQAQLQKDLVKEAINSYIRGDDPSSYLEVVQSASRSSWRPLLRGGNVRGCQAAL

SEQ ID NO: 875332 - protein, 1685 aa, Homo sapiens
MAQILPVRFQEHFQLQNLGINPANIGFSTLTMESDKFICIREKVGEQAQVTIIDMSDPMAPIRRPISAESAIMNPASKVIALKAGKTLQIFNIEMKSKMKAHTMAEEVIFWKWVSVNTVALVTETAVYHWSMEGDSQPMKMFDRHTSLVGCQVIHYRTDEYQKWLLLVGISAQQNRVVGAMQLYSVDRKVSQPIEGHAAAFAEFKMEGNAKPATLFCFAVRNPTGGKLHIIEVGQPAAGNQPFVKKAVDVFFPPEAQNDFPVAMQIGAKHGVIYLITKYGYLHLYDLESGVCICMNRISADTIFVTAPHKPTSGIIGVNKKGQVLSVCVEEDNIVNYATNVLQNPDLGLRLAVRSNLAGAEKLFVRKFNTLFAQGSYAEAAKVAASAPKGILRTRETVQKFQSIPAQSGQASPLLQYFGILLDQGQLNKLESLELCHLVLQQGRKQLLEKWLKEDKLECSEELGDLVKTTDPMLALSVYLRANVPSKVIQCFAETGQFQKIVLYAKKVGYTPDWIFLLRGVMKISPEQGLQFSRMLVQDEEPLANISQIVDIFMENSLIQQCTSFLLDALKNNRPAEGLLQTWLLEMNLVHAPQVADAILGNKMFTHYDRAHIAQLCEKAGLLQQALEHYTDLYDIKRAVVHTHLLNPEWLVNFFGSLSVEDSVECLHAMLSANIRQNLQLCVQVASKYHEQLGTQALVELFESFKSYKGLFYFLGSIVNFSQDPDVHLKYIQAACKTGQIKEVERICRESSCYNPERVKNFLKEAKLTDQLPLIIVCDRFGFVHDLVLYLYRNNLQRYIEIYVQKVNPSRTPAVIGGLLDVDCSEEVIKHLIMAVRGQFSTDELVAEVEKRNRLKLLLPWLESQIQEGCEEPATHNALAKIYIDSNNSPECFLRENAYYDSSVVGRYCEKRDPHLACVAYERGQCDLELIKVCNENSLFKSEARYLVCRKDPELWAHVLEETNPSRRQLIDQVVQTALSETRDPEEISVTVKAFMTADLPNELIELLEKIVLDNSVFSEHRNLQNLLILTAIKADRTRVMEYISRLDNYDALDIASIAVSSALYEEAFTVFHKFDMNASAIQVLIEHIGNLDRAYEFAERCNEPAVWSQLAQAQLQKDLVKEAINSYIRGDDPSSYLEVVQSASRSNNWEDLVKFLQMARKKGRESYIETELIFALAKTSRVSELEDFINGPNNAHIQQVGDRCYEEGMYEAAKLLYSNVSNFARLASTLVHLGEYQAAVDNSRKASSTRTWKEVCFACMDGQEFRFAQLCGLHIVIHADELEELMCYYQDRGYFEELILLLEAALGLERAHMGMFTELAILYSKFKPQKMLEHLELFWSRVNIPKVLRAAEQAHLWAELVFLYDKYEEYDNAVLTMMSHPTEAWKEGQFKDIITKVANVELCYRALQFYLDYKPLLINDLLLVLSPRLDHTWTVSFFSKVSRRCPWLQSWTIQVDGTHVPPVPLPSVPITSLAKCLDGSLNFVKAGQLPLVKPYLRSVQSHNNKSVNEALNHLLTEEEDYQGLRASIDAYDNFDNISLAQQLEKHQLMEFRCIAAYLYKGNNWWAQSVELCKKDHLYKDAMQHAAESRDAELAQKLLQWFLEEGKRECFAACLFTCYDLLRPDMVLELAWRHNLVDLAMPYFIQVMREYLSKVDKLDALESLRKQEEHVTEPAPLVFDFDGHE

SEQ ID NO: 875333 - protein, 103 aa, Homo sapiens [sequence omitted]

SEQ ID NO: 875334 - protein, 1679 aa, Homo sapiens
MAQILPVRFQEHFQLQNLGINPANIGFSTLTMESDKFICIREKVGEQAQVTIIDMSDPMAPIRRPISAESAIMNPASKVIALKAGKTLQIFNIEMKSKMKAHTMAEEVIFWKWVSVNTVALVTETAVYHWSMEGDSQPMKMFDRHTSLVGCQVIHYRTDEYQKWLLLVGISAQQNRVVGAMQLYSVDRKVSQPIEGHAAAFAEFKMEGNAKPATLFCFAVRNPTGGKLHIIEVGQPAAGNQPFVKKAVDVFFPPEAQNDFPVAMQIGAKHGVIYLITKYGYLHLYDLESGVCICMNRISADTIFVTAPHKPTSGIIGVNKKGQVLSVCVEEDNIVNYATNVLQNPDLGLRLAVRSNLAGAEKLFVRKFNTLFAQGSYAEAAKVAASAPKGILRTRETVQKFQSIPAQSGQASPLLQYFGILLDQGQLNKLESLELCHLVLQQGRKQLLEKWLKEDKLECSEELGDLVKTTDPMLALSVYLRANVPSKVIQCFAETGQFQKIVLYAKKVGYTPDWIFLLRGVMKISPEQGLQFSRMLVQDEEPLANISQIVDIFMENSLIQQCTSFLLDALKNNRPAEGLLQTWLLEMNLVHAPQVADAILGNKMFTHYDRAHIAQLCEKAGLLQQALEHYTDLYDIKRAVVHTHLLNPEWLVNFFGSLSVEDSVECLHAMLSANIRQNLQLCVQVASKYHEQLGTQALVELFESFKSYKGLFYFLGSIVNFSQDPDVHLKYIQAACKTGQIKEVERICRESSCYNPERVKNFLKEAKLTDQLPLIIVCDRFGFVHDLVLYLYRNNLQRYIEIYVQKVNPSRTPAVIGGLLDVDCSEEVIKHLIMAVRGQFSTDELVAEVEKRNRLKLLLPWLESQIQEGCEEPATHNALAKIYIDSNNSPECFLRENAYYDSSVVGRYCEKRDPHLACVAYERGQCDLELIKVCNENSLFKSEARYLVCRKDPELWAHVLEETNPSRRQLIDQVVQTALSETRDPEEISVTVKAFMTADLPNELIELLEKIVLDNSVFSEHRNLQNLLILTAIKADRTRVMEYISRLDNYDALDIASIAVSSALYEEAFTVFHKFDMNASAIQVLIEHIGNLDRAYEFAERCNEPAVWSQLAQAQLQKDLVKEAINSYIRGDDPSSYLEVVQSASRSNNWEDLVKFLQMARKKGRESYIETELIFALAKTSRVSELEDFINGPNNAHIQQVGDRCYEEGMYEAAKLLYSNVSNFARLASTLVHLGEYQAAVDNSRKASSTRTWKEVCFACMDGQEFRFAQLCGLHIVIHADELEELMCYYQDRGYFEELILLLEAALGLERAHMGMFTELAILYSKFKPQKMLEHLELFWSRVNIPKVLRAAEQAHLWAELVFLYDKYEEYDNAVLTMMSHPTEAWKEGQFKDIITKVANVELCYRALQFYLDYKPLLINDLLLVLSPRLDHTWTVSFFSKAGQLPLVKPYLRSVQSHNNKSVNEALNHLLTEEEDYQGLRASIDAYDNFDNISLAQQLEKHQLMEFRCIAAYLYKGNNWWAQSVELCKKDHLYKEQCGSGGSDRSAACQRGRLLSGASSAHRVHADVGTGRPQGSPKRNSEDAMQHAAESRDAELAQKLLQWFLEEGKRECFAACLFTCYDLLRPDMVLELAWRHNLVDLAMPYFIQVDKLDALESLRKQEEHVTEPAPLVFDFDGHE

SEQ ID NO: 875335 - protein, 1149 aa, Homo sapiens
MAQILPVRFQEHFQLQNLGINPANIGFSTLTMESDKFICIREKVGEQAQVTIIDMSDPMAPIRRPISAESAIMNPASKVIALKAGKTLQIFNIEMKSKMKAHTMAEEVIFWKWVSVNTVALVTETAVYHWSMEGDSQPMKMFDRHTSLVGCQVIHYRTDEYQKWLLLVGISAQQNRVVGAMQLYSVDRKVSQPIEGHAAAFAEFKMEGNAKPATLFCFAVRNPTGGKLHIIEVGQPAAGNQPFVKKAVDVFFPPEAQNDFPVAMQIGAKHGVIYLITKYGYLHLYDLESGVCICMNRISADTIFVTAPHKPTSGIIGVNKKGQVLSVCVEEDNIVNYATNVLQNPDLGLRLAVRSNLAGAEKLFVRKFNTLFAQGSYAEAAKVAASAPKGILRTRETVQKFQSIPAQSGQASPLLQYFGILLDQGQLNKLESLELCHLVLQQGRKQLLEKWLKEDKLECSEELGDLVKTTDPMLALSVYLRANVPSKVIQCFAETGQFQKIVLYAKKVGYTPDWIFLLRGVMKISPEQGLQFSRMLVQDEEPLANISQIVDIFMENSLIQQCTSFLLDALKNNRPAEGLLQTWLLEMNLVHAPQVADAILGNKMFTHYDRAHIAQLCEKAGLLQQALEHYTDLYDIKRAVVHTHLLNPEWLVNFFGSLSVEDSVECLHAMLSANIRQNLQLCVQVASKYHEQLGTQALVELFESFKSYKGLFYFLGSIVNFSQDPDVHLKYIQAACKTGQIKEVERICRESSCYNPERVKNFLKEAKLTDQLPLIIVCDRFGFVHDLVLYLYRNNLQRYIEIYVQKVNPSRTPAVIGGLLDVDCSEEVIKHLIMAVRGQFSTDELVAEVEKRNRLKLLLPWLESQIQEGCEEPATHNALAKIYIDSNNSPECFLRENAYYDSSVVGRYCEKRDPHLACVAYERGQCDLELIKVCNENSLFKSEARYLVCRKDPELWAHVLEETNPSRRQLIDQVVQTALSETRDPEEISVTVKAFMTADLPNELIELLEKIVLDNSVFSEHRNLQNLLILTAIKADRTRVMEYISRLDNYDALDIASIAVSSALYEEAFTVFHKFDMNASAIQVLIEHIGNLDRAYEFAERCNEPAVWSQLAQAQLQKDLVKEAINSYIRGDDPSSYLEVVQSASRSSK

SEQ ID NO: 875336 - protein, 1561 aa, Homo sapiens
MAQILPVRFQEHFQLQNLGINPANIGFSTLTMESDKFICIREKVGEQAQVTIIDMSDPMAPIRRPISAESAIMNPASKVIALKAGKTLQIFNIEMKSKMKAHTMAEEVIFWKWVSVNTVALVTETAVYHWSMEGDSQPMKMFDRHTSLVGCQVIHYRTDEYQKWLLLVGISAQQNRVVGAMQLYSVDRKVSQPIEGHAAAFAEFKMEGNAKPATLFCFAVRNPTGGKLHIIEVGQPAAGNQPFVKKAVDVFFPPEAQNDFPVAMQIGAKHGVIYLITKYGYLHLYDLESGVCICMNRISADTIFVTAPHKPTSGIIGVNKKGQVLSVCVEEDNIVNYATNVLQNPDLGLRLAVRSNLAGAEKLFVRKFNTLFAQGSYAEAAKVAASAPKGILRTRETVQKFQSIPAQSGQASPLLQYFGILLDQGQLNKLESLELCHLVLQQGRKQLLEKWLKEDKLECSEELGDLVKTTDPMLALSVYLRANVPSKVIQCFAETGQFQKIVLYAKKVGYTPDWIFLLRGVMKISPEQGLQFSRMLVQDEEPLANISQIVDIFMENSLIQQCTSFLLDALKNNRPAEGLLQTWLLEMNLVHAPQVADAILGNKMFTHYDRAHIAQLCEKAGLLQQALEHYTDLYDIKRAVVHTHLLNPEWLVNFFGSLSVEDSVECLHAMLSANIRQNLQLCVQVASKYHEQLGTQALVELFESFKSYKGLFYFLGSIVNFSQDPDVHLKYIQAACKTGQIKEVERICRESSCYNPERVKNFLKEAKLTDQLPLIIVCDRFGFVHDLVLYLYRNNLQRYIEIYVQKVNPSRTPAVIGGLLDVDCSEEVIKHLIMAVRGQFSTDELVAEVEKRNRLKLLLPWLESQIQEGCEEPATHNALAKIYIDSNNSPECFLRENAYYDSSVVGRYCEKRDPHLACVAYERGQCDLELIKVCNENSLFKSEARYLVCRKDPELWAHVLEETNPSRRQLIDQVVQTALSETRDPEEISVTVKAFMTADLPNELIELLEKIVLDNSVFSEHRNLQNLLILTAIKADRTRVMEYISRLDNYDALDIASIAVSSALYEEAFTVFHKFDMNASAIQVLIEHIGNLDRAYEFAERCNEPAVWSQLAQAQLQKDLVKEAINSYIRGDDPSSYLEVVQSASRSNNWEDLVKFLQMARKKGRESYIETELIFALAKTSRVSELEDFINGPNNAHIQQVGDRCYEEGMYEAAKLLYSNVSNFARLASTLVHLGEYQAAVDNSRKASSTRTWKEVCFACMDGQEFRFAQLCGLHIVIHADELEELMCYYQDRGYFEELILLLEAALGLERAHMGMFTELAILYSKFKPQKMLEHLELFWSRVNIPKVLRAAEQAHLWAELVFLYDKYEEYDNAVLTMMSHPTEAWKEGQFKDIITKVANVELCYRALQFYLDYKPLLINDLLLVLSPRLDHTWTVSFFSKAGQLPLVKPYLRSVQSHNNKSVNEALNHLLTEEEDYQGLRASIDAYDNFDNISLMPCSMLQSRGMLSWPRSCCSGSWRKARGSASQLVSSPAMTCFAQTWCLSWPGGTTSWTWPCPTSSR

SEQ ID NO: 875337 - protein, 466 aa, Homo sapiens
MCLAENRMGGIEPLFKIISSGLTYLCFLSLDNWEDLVKFLQMARKKGRESYIETELIFALAKTSRVSELEDFINGPNNAHIQQVGDRCYEEGMYEAAKLLYSNVSNFARLASTLVHLGEYQAAVDNSRKASSTRTWKEVCFACMDGQEFRFAQLCGLHIVIHADELEELMCYYQDRGYFEELILLLEAALGLERAHMGMFTELAILYSKFKPQKMLEHLELFWSRVNIPKVLRAAEQAHLWAELVFLYDKYEEYDNAVLTMMSHPTEAWKEGQFKDIITKVANVELCYRALQFYLDYKPLLINDLLLVLSPRLDHTWTVSFFSKAGQLPLVKPYLRSVQSHNNKSVNEALNHLLTEEEDYQDAMQHAAESRDAELAQKLLQWFLEEGKRECFAACLFTCYDLLRPDMVLELAWRHNLVDLAMPYFIQVMREYLSKVDKLDALESLRKQEEHVTEPAPLVFDFDGHE

SEQ ID NO: 875338 - protein, 1687 aa, Homo sapiens
MAQILPVRFQEHFQLQNLGINPANIGFSTLTMESDKFICIREKVGEQAQVTIIDMSDPMAPIRRPISAESAIMNPASKVIALKAGKTLQIFNIEMKSKMKAHTMAEEVIFWKWVSVNTVALVTETAVYHWSMEGDSQPMKMFDRHTSLVGCQVIHYRTDEYQKWLLLVGISAQQNRVVGAMQLYSVDRKVSQPIEGHAAAFAEFKMEGNAKPATLFCFAVRNPTGGKLHIIEVGQPAAGNQPFVKKAVDVFFPPEAQNDFPVAMQIGAKHGVIYLITKYGYLHLYDLESGVCICMNRISADTIFVTAPHKPTSGIIGVNKKGQVLSVCVEEDNIVNYATNVLQNPDLGLRLAVRSNLAGAEKLFVRKFNTLFAQGSYAEAAKVAASAPKGILRTRETVQKFQSIPAQSGQASPLLQYFGILLDQGQLNKLESLELCHLVLQQGRKQLLEKWLKEDKLECSEELGDLVKTTDPMLALSVYLRANVPSKVIQCFAETGQFQKIVLYAKKVGYTPDWIFLLRGVMKISPEQGLQFSRMLVQDEEPLANISQIVDIFMENSLIQQCTSFLLDALKNNRPAEGLLQTWLLEMNLVHAPQVADAILGNKMFTHYDRAHIAQLCEKAGLLQQALEHYTDLYDIKRAVVHTHLLNPEWLVNFFGSLSVEDSVECLHAMLSANIRQNLQLCVQVASKYHEQLGTQALVELFESFKSYKGLFYFLGSIVNFSQDPDVHLKYIQAACKTGQIKEVERICRESSCYNPERVKNFLKEAKLTDQLPLIIVCDRFGFVHDLVLYLYRNNLQRYIEIYVQKVNPSRTPAVIGGLLDVDCSEEVIKHLIMAVRGQFSTDELVAEVEKRNRLKLLLPWLESQIQEGCEEPATHNALAKIYIDSNNSPECFLRENAYYDSSVVGRYCEKRDPHLACVAYERGQCDLELIKVCNENSLFKSEARYLVCRKDPELWAHVLEETNPSRRQLIDQVVQTALSETRDPEEISVTVKAFMTADLPNELIELLEKIVLDNSVFSEHRNLQNLLILTAIKADRTRVMEYISRLDNYDALDIASIAVSSALYEEAFTVFHKFDMNASAIQVLIEHIGNLDRAYEFAERCNEPAVWSQLAQAQLQKDLVKEAINSYIRGDDPSSYLEVVQSASRSNNWEDLVKFLQMARKKGRESYIETELIFALAKTSRVSELEDFINGPNNAHIQQVGDRCYEEGMYEAAKLLYSNVSNFARLASTLVHLGEYQAAVDNSRKASSTRTWKEVCFACMDGQEFRFAQLCGLHIVIHADELEELMCYYQDRGYFEELILLLEAALGLERAHMGMFTELAILYSKFKPQKMLEHLELFWSRVNIPKVLRAAEQAHLWAELVFLYDKYEEYDNAVLTMMSHPTEAWKEGQFKDIITKVANVELCYRALQFYLDYKPLLINDLLLVLSPRLDHTWTVSFFSKAGQLPLVKPYLRSVQSHNNKSVNEALNHLLTEEEDYQGLRASIDAYDNFDNISLAQQLEKHQLMEFRCIAAYLYKGNNWWAQSVELCKKDHLYKEQCGSGGSDRSAACQRGRLLSGASSAHRVHADVGTGRPQGSPKRNSEDAMQHAAESRDAELAQKLLQWFLEEGKRECFAACLFTCYDLLRPDMVLELAWRHNLVDLAMPYFIQVMREYLSKVDKLDALESLRKQEEHVTEPAPLVFDFDGHE

SEQ ID NO: 875339 - protein, 1191 aa, Homo sapiens
MAQILPVRFQEHFQLQNLGINPANIGFSTLTMESDKFICIREKVGEQAQVTIIDMSDPMAPIRRPISAESAIMNPASKVIALKAGKTLQIFNIEMKSKMKAHTMAEEVIFWKWVSVNTVALVTETAVYHWSMEGDSQPMKMFDRHTSLVGCQVIHYRTDEYQKWLLLVGISAQQNRVVGAMQLYSVDRKVSQPIEGHAAAFAEFKMEGNAKPATLFCFAVRNPTGGKLHIIEVGQPAAGNQPFVKKAVDVFFPPEAQNDFPVAMQIGAKHGVIYLITKYGYLHLYDLESGVCICMNRISADTIFVTAPHKPTSGIIGVNKKGQVLSVCVEEDNIVNYATNVLQNPDLGLRLAVRSNLAGAEKLFVRKFNTLFAQGSYAEAAKVAASAPKGILRTRETVQKFQSIPAQSGQASPLLQYFGILLDQGQLNKLESLELCHLVLQQGRKQLLEKWLKEDKLECSEELGDLVKTTDPMLALSVYLRANVPSKVIQCFAETGQFQKIVLYAKKVGYTPDWIFLLRGVMKISPEQGLQFSRMLVQDEEPLANISQIVDIFMENSLIQQCTSFLLDALKNNRPAEGLLQTWLLEMNLVHAPQVADAILGNKMFTHYDRAHIAQLCEKAGLLQQALEHYTDLYDIKRAVVHTHLLNPEWLVNFFGSLSVEDSVECLHAMLSANIRQNLQLCVQVASKYHEQLGTQALVELFESFKSYKGLFYFLGSIVNFSQDPDVHLKYIQAACKTGQIKEVERICRESSCYNPERVKNFLKEAKLTDQLPLIIVCDRFGFVHDLVLYLYRNNLQRYIEIYVQKVNPSRTPAVIGGLLDVDCSEEVIKHLIMAVRGQFSTDELVAEVEKRNRLKLLLPWLESQIQEGCEEPATHNALAKIYIDSNNSPECFLRENAYYDSSVVGRYCEKRDPHLACVAYERGQCDLELIKVCNENSLFKSEARYLVCRKDPELWAHVLEETNPSRRQLIDQVVQTALSETRDPEEISVTVKAFMTADLPNELIELLEKIVLDNSVFSEHRNLQNLLILTAIKADRTRVMEYISRLDNYDALDIASIAVSSALYEEAFTVFHKFDMNASAIQVLIEHIGNLDRAYEFAERCNEPAVWSQLAQAQLQKDLVKEAINSYIRGDDPSSYLEVVQSASRSNNWEDLVKFLQMARKKGRESYIETELIFALAKTSLGDRARLRLK

SEQ ID NO: 875340 - protein, 50 aa, Homo sapiens
GKIHWQGPLGGSGGGLEGHGREEGACLPATWVFPLPRRGAEISLYHLDLS

SEQ ID NO: 875341 - protein, 115 aa, Homo sapiens
MLPPGQIPNPTLSTHTLSSGQERPENVCTNGFREALEIKEPEAATHGSQKLNAAQTTGMTSPILLPPAIAVTKAALGPQLSTSEDKSWGDSCHLREKEKTKRQRLLLEDPFTWAA

SEQ ID NO: 875342 - protein, 38 aa, Homo sapiens
MTTRALVFIGYHPVCQGMWTQCLPCPLLRASRPRLCSH

SEQ ID NO: 875343 - protein, 41 aa, Homo sapiens
MAVRRFDEILEASDGIMVARGDLGIESCREVFIAQKLMIDV

SEQ ID NO: 875344 - protein, 186 aa, Homo sapiens
MENLKHIITLGQVIHKRCEEMKYCKKQCRRLGHRVLGLIKPLEMLQDQGKRSVPSEKLTTAMNRFKAALEEANGEIEKFSNRSNICRFLTASQDKILFKDVNRKLSDVWKELSLLLQVEQRMPVSPISQGASWAQEDQQDADEDRRAFQMLRRDNEKIEASLRRLEINMKEIKETLRQCKLSCALL

SEQ ID NO: 875345 - protein, 186 aa, Homo sapiens; identical to SEQ ID NO: 875344

SEQ ID NO: 875346 - protein, 186 aa, Homo sapiens; identical to SEQ ID NO: 875344

SEQ ID NO: 875347 - protein, 79 aa, Homo sapiens
HGSFDSHVYKDATGVPRGVPDKFKARNQTASGFESVLFWWSTVNKNVDRINYIYYNQQRFVNYTRHAIKGTASQLGPIN

SEQ ID NO: 875348 - protein, 479 aa, Homo sapiens
MANFTPVNGSSGNQSVRLVTSSSHNRYETVEMVFIATVTGSLSLVTVVGNILVMLSIKVNRQLQTVNNYFLFSLACADLIIGAFSMNLYTVYIIKGYWPLGAVVCDLWLALDYVVSNASVMNLLIISFDRYFCVTKPLTYPARRTTKMAGLMIAAAWVLSFVLWAPAILFWQFVVGKRTVPDNQCFIQFLSNPAVTFGTAIAAFYLPVVIMTVLYIHISLASRSRVHKHRPEGPKEKKAKTLAFLKSPLMKQSVKKPPPGEAAREELRNGKLEEAPPPALPPPPRPVADKDTSNESSSGSATQNTKERPATELSTTEATTPAMPAPPLQPRALNPASRWSKIQIVTKQTGNECVTAIEIVPATPAGMRPAANVARKFASIARNQVRKKRQMAARERKVTRTIFAILLAFILTWTPYNVMVLVNTFCQSCIPDTVWSIGYWLCYVNSTINPACYALCNATFKKTFRHLLLCQYRNIGTAR

SEQ ID NO: 875349 - protein, 110 aa, Homo sapiens
ICSFCPVVSLMGFFSLFAGLLSAMALVGDPAGGQTPPPFWVWTRAPGGGILQWSPRLSRDGVSAEAGAPISHWKGPGVWGSPLPGNPGSPPLPAACPPASASLWVLVWEP

SEQ ID NO: 875350 - protein, 133 aa, Homo sapiens
LQPILTRPIPSFPPHFPFCLPSCSLPHLQLCHVTVALLLKVCSLISGPSSCHFKTSPPETMSSSKGRKQLLKFSSMCGWSEEGCWDKILREKPQPRGMGPNTEGQNLNQKHLYDEKVKKKKDDSKMVLELGTS

SEQ ID NO: 875351 - protein, 74 aa, Homo sapiens
CSWGMVSTFSSKFLGTPDQCQHVRNAPSRFCPERAKQESSSVCHIFVESCPFAVNLNSGKVKSALEPNENFKRS

SEQ ID NO: 875352 - protein, 75 aa, Homo sapiens
SLEEVRGGPVWAEPEGGALGTSWWLDVGHEGKEALGITSGMAWPDLMELLSTEMVKSTRRAGVGAAGAQFGTRQA

SEQ ID NO: 875353 - protein, 33 aa, Homo sapiens
LLPSGVTGAQVKHNFGSHLLPNQPHALQTSLTT

SEQ ID NO: 875354 - protein, 104 aa, Homo sapiens
MPQNTTNKKPTHTLAGGCYSAIGCRLLFRSLQQSGKEVFFLPELRRPVFSTNVSSGLANKEVRSHCEKTIILNNRPINGWQKCHARPSEDGAACLKSHHGSDIL

SEQ ID NO: 875355 - protein, 220 aa, Homo sapiens
PLQQHFAASISPPESRRLAPFLGSAPLPSSPIPSSPIPSFPPHPDLLPFPLLPPPPPPAAPSFPPASVGRQRQQRRGRPQSPSVSRLRGNQVSVPLLSSSPHRPAPQLGFSAGFPSLSPPCLAPALPSLSTRHHAPSPGRSPGFLTALCAAPTPPGCRETPSSSRWTQASWTLALPLRGPPISRRDPVDFVGSGPRLGPWFTSASSLPRSRSSEPEGGFA

SEQ ID NO: 875356 - protein, 114 aa, Homo sapiens
GERRFEKSARRDGARCGFEEGGAGPRKEHARSDSENWRSLREEQEEEEEGSWRLGAGPRRDGDRWRSASPDGGPRSAGWREHGERRRKFEFDLRGDRGGCGEEEGRGGGGSSHL

SEQ ID NO: 875357 - protein, 85 aa, Homo sapiens
QRLAGVGVAGTAALEVLRELQQRGPLASLGYPLFFSLTFPVQMVVPALLAGGNMGNGGASLNLICEGIEEGVVKRRGGEGEAALT

SEQ ID NO: 875358 - protein, 43 aa, Homo sapiens
RSPLSIPTEKDREAKFLAYPGRCPCELPVSCKRWPLNHRASVC

SEQ ID NO: 875359 - protein, 118 aa, Homo sapiens
SIPHRFPGVEFVVPRTGFYCKLCGLFYTSEETAKMSHCRSAVHYRNLQVKIHSPCPACQGLPSLHNRARCLASLALLASESSSYLQGLLQATGYLPFPKHTRLFSASVSVSFRYMENP

SEQ ID NO: 875360 - protein, 71 aa, Homo sapiens
MTKLQWLFGFLEHSQRPAISPENFLSASWTPWFSPGTQQDCSEYLKYLLDRLHEEEKRAPGSARKAEAEAV

SEQ ID NO: 875361 - protein, 232 aa, Homo sapiens
FYEDPEGARWRVHSDKNGEIDHHREQYENLKWTLERKLEELDGELALQRQELLLEFESKMRKREHEFRLQADNMSNTALSRELKVKLLHKELEALKEAGAKAAESLQRAEATNAELERKLQSRAGELQDLEAMSRARVKDLEDKLHSVQLTRKKEEETFKRKHEELDRLAREKDAVLVAVKGAHVEQLQELQTRVLELQAHCETLEAHLRRAEWRQADTAKEKAPPRAIERV

SEQ ID NO: 875362 - protein, 224 aa, Homo sapiens
MRKREHEFRLQADNMSNTALSRELKVKLLHKELEALKEAGAKAAESLQRAEATNAELERKLQSRAGELQDLEAMSRARLRESFISRGVLCGSLAGQDWSLGDSTFSAHSRLVFAFISLAPFHKYLFLFRVKDLEDKLHSVQLTRKKEEETFKRKHEELDRLAREKDAVLVAVKGAHVEQLQELQTRVLELQAHCETLEAHLRRAEWRQADTAKEKAPPRAIERV

SEQ ID NO: 875363 - protein, 170 aa, Homo sapiens
MRKREHEFRLQADNMSNTALSRELKVKLLHKELEALKEAGAKAAESLQRAEATNAELERKLQSRAGELQDLEAMSRARVKDLEDKLHSVQLTRKKEEETFKRKHEELDRLAREKDAVLVAVKGAHVEQLQELQTRVLELQAHCETLEAHLRRAEWRQADTAKEKAPPRDE

SEQ ID NO: 875364 - protein, 283 aa, Homo sapiens
FYEDPEGARWRVHSDKNGEIDHHREQYENLKWTLERKLEELDGELALQRQELLLEFESKMRKREHEFRLQADNMSNTALSRELKVKLLHKELEALKEAGAKAAESLQRAEATNAELERKLQSRAGELQDLEAMSRARLRESFISRGVLCGSLAGQDWSLGDSTFSAHSRLVFAFISLAPFHKYLFLFRVKDLEDKLHSVQLTRKKEEETFKRKHEELDRLAREKDAVLVAVKGAHVEQLQELQTRVLELQAHCETLEAHLRRAEWRQADTAKEKAPPRAIERV

SEQ ID NO: 875365 - protein, 45 aa, Homo sapiens
GGWLSAHWLGPVPLIFQQASWVLLTQQRWSPRDNSRNVYGISWPR

SEQ ID NO: 875366 - protein, 100 aa, Homo sapiens
CLCGEVGLCVCVSVCGGGAVCVWRRGCVCLRRQGCVYVWRLGCVCVCGGWAVCVCGGGAVCVEAGLCVCVEVWMLCGGVDAVWMCGGVVVIPSPYFVVVA

SEQ ID NO: 875367 - protein, 266 aa, Homo sapiens
MGTPLDSTGSRNSSRANKTHSTEKLKMTATNMTHKQQGINNSTVNKSETWGNQHNDCAKEHANKHAVQCTTPEMNPNTKEKYPKEEQRKRQGTQDKKDKKTEMKKGPKLSHKGEKKAETNKKTKKQEQKTNKRKTNRRLKNTKTIKTKKRQKPNARGYRERRKNKKQREEKNSKEAKERRDADNKRVSERKDKKKSAENKTKEEQSEGEGSKGPRASRDEQPKTAEADRKGRNRSQEGKIEKGNKRSGENLKQKTQKGKQTKRNRK

SEQ ID NO: 875368 - protein, 44 aa, Homo sapiens
MGGRWSPPLPSNQLATNGTETYEYTDYGGLIFNSYILPPLFLEP

SEQ ID NO: 875369 - protein, 153 aa, Homo sapiens
MADEIDFTTGDAGASSTYPMQCSALRKNGFVVLKGRPCKIVEMSTSKTGKHGHAKVHLVGIDIFTGKKYEDICPSTHNMDVPNIKRNDYQLICIQDGYLSLLTETGEVREDLKLPEGELGKEIEGKYNAGEDVQVSVMCAMSEEYAVAIKPCK

SEQ ID NO: 875370 - protein, 168 aa, Homo sapiens
LICIVSLPLSHSLQRGRGPRGLHRGETLRLESQSRQRVSKSKASEAWKHAGCRQTDFQHMVCWVETRELQRAGLAFGVAGKSLLGHKLHICIHAPSQLSALQQACTWVVSDGNNQFTTRQPGHLFLFMYFFGTEFHSCCAGWSAMMCSWLTATSASRVQAILLPQPPE

SEQ ID NO: 875371 - protein, 139 aa, Homo sapiens
KAKSSAVYHVKTLGQGVAHEVARNGLHFLPQKTTIALMKLKGFDESSKPYLIPFPKAWLRQASSSPTKFWSPRRLRKKYRNECMRLREDKAGKAQARGCYRRGIGGRSNPSPSGCTYLHGKSRVKSQLRKLAWSGKGES

SEQ ID NO: 875372 - protein, 112 aa, Homo sapiens
MEEGFRDRAAFIRGAKDIAKEVKKHAAKKVVKGLDRVQDEYSRRSYSRFEEEDDDDDFPAPSDGYYRGEGTQDEEEGGASSDATEGHDEDDEIYEGEYQGIPRAESGGKGER

SEQ ID NO: 875373 - protein, 145 aa, Homo sapiens
MWNPNAGQPGPNPYPPNIGCPGGSNPAHPPPINPPFPPGPCPPPPGAPHGNPAFPPGGPPHPVPQPGYPGCQPLGPYPPPYPPPAPGIPPVNPLAPGMVGPAVIVDKKMQKKMKKAHKKMHKHQKHHKYHKHGKHFLLFLLLFQQ

SEQ ID NO: 875374 - protein, 111 aa, Homo sapiens
MGNWAQRGGVTIPRELARSHSRARAVTRPELLSTLRTLEPGSPGPCAAPSFRRPRFNPRSARAVMSWARVPNSRGWADEAGMPGIIITCLLPLSWLLGLNEPLLRLAGKGV

SEQ ID NO: 875375 - protein, 123 aa, Homo sapiens
KIHCGQAPLLHQVGLLDLELNRLTKALFLALVALSIVMVTLQGFVGPWYRNLFRFLLLFSYIIPISLRVNLDMGKAVYGWMMMKDENIPGTVVRTSTIPEELGRLVYLLTDKTEPSPRMNDIN

SEQ ID NO: 875376 - protein, 72 aa, Homo sapiens
VAGMIKEKRDLVWSREGGCLLGAIQVENKICGWVRWLTPVILARWEAEADDHFGCHMNGGRWKEPAAETRRV

SEQ ID NO: 875377 - protein, 120 aa, Homo sapiens
RSPLPPVGFGELIWCMQQPQKASFLRSGPSLQEPLVLWEIRMYHFQKTWLGTPLFHPHICPASPNTGSPPPTPKPPRNAASNGVKCPTSVVLESTGHTQIRALTPNDRQISWACVSPLLA

SEQ ID NO: 875378 - protein, 267 aa, Homo sapiens
MMSSKPTSHAEVNETIPNPYPPSSFMAPGFQQPLGSINLENQAQGAQRAQPYGITSPGIFASSQPGQGNIQMINPSVGTAVMNFKEEAKALGVIQIMVGLMHIGFGIVLCLISFSFREVLGFASTAVIGGYPFWGGLSFIISGSLSVSASKELSRCLVKGSLGMNIVSSILAFIGVILLLVDMCINGVAGQDYWAVLSGKGISATLMIFSLLEFFVACATAHFANQANTTTNMSVLVIPNMYESNPVTPASSSAPPRCNNYSANAPK

SEQ ID NO: 875379 - protein, 69 aa, Homo sapiens
EFISVSKRSYPGQAGKEDLRLLQQGSRLLQEERERELNCAETKEELLITGVSKWKSIRKLNWVTLVILT

SEQ ID NO: 875380 - protein, 223 aa, Homo sapiens
MPAPVEGTDFPGAGRQAWGSPALSLPVAPPAVSPPSVPLPSHQVGAMFLSPGEGPATEGGGLGPGEEAPKKKHRRNRTTFTTYQLHQLERAFEASHYPDVYSREELAAKVHLPEVRVQVWFQNRRAKWRRQERLESGSGAVAAPRLPEAPALPFARPPAMSLPLEPWLGPGPPAVPGLPRLLGPGGVEGLGLMLVHLEIVAGEVSVCRMRLKLALMGSAFGTE

SEQ ID NO: 875381 - protein, 230 aa, Homo sapiens
MPAPVEGTDFPGAGRQAWGSPALSLPVAPPAVSPPSVPLPSHQVGAMFLSPGEGPATEGGGLGPGEEAPKKKHRRNRTTFTTYQLHQLERAFEASHYPDVYSREELAAKVHLPEVRVQVWFQNRRAKWRRQERLESGSGAVAAPRLPEAPALPFARPPAMSLPLEPWLGPGPPAVPGLPRLLGPGPGLQASFGPHAFAPTFADGFALEEASLRLLAKEHAQALDRAWPPA

SEQ ID NO: 875382 - protein, 230 aa, Homo sapiens; identical to SEQ ID NO: 875381

SEQ ID NO: 875383 - protein, 122 aa, Homo sapiens
HILKKQAGDCDQGLHVGTWPRRGAELREKFGSANLWENSLRGFHVTAGGRGGQWALQTLQKDQVVWGKCTSRERQFSSSHVEVFPSPELQGGCYGSESQARIGGRAWAETGRGERSWSNFPP

SEQ ID NO: 875384 - protein, 104 aa, Homo sapiens
SISRMGEIAQSWSQTLHATGCVQLESRTQRPARPLPSQGDPGPPGHRSPLKRLPPLNPRPRVFFCSRHWAIALCLFGRNDLYEKLYFWDSLIPSSLRTVQFFIS

SEQ ID NO: 875385 - protein, 122 aa, Homo sapiens
HWQSKNTPHQTQADLTLQLLQSLFQPELQVLQSQATGPATRGRQPPLAHCQEPCQVGPRHPHGAHPPVSQEHLRLRSVRGSKRGKRCLSLHTALHPVYPKIKDLKKPFVFQKTTHPDNLCTH

SEQ ID NO: 875386 - protein, 124 aa, Homo sapiens
MSPAARLRLGVAEQESMEIRCVKRVTAWRPSFPRGHRGVLCEVRWSMPPLLLQRPDTSPLHQFTTHVNNCRGQLIYGWKKMFFTNFSLQEHRDKTQFTESSISATKECEASETSASQRSEFGGI

SEQ ID NO: 875387 - protein, 118 aa, Homo sapiens
HPTFDNPVPSKSEAKDNFFEVFTPVFERNSRWSNKKNVPKLGDMNSSFEDVDIFYSFWYNFDSWREFSYLDEEEKEKAECRDERRWPLAPIRQLHCYQVSYQIFERMVLNLKPNISFY

SEQ ID NO: 875388 - protein, 482 aa, Homo sapiens
FHADKRVLHETGFSTELDRVKNLPHCETEIFEVRFDPQGANLPVGSKEVILPIKVVGGPTVHICLQAKVTIPTMTLSRGKVDFATIQCGQCLVETIQLSNHLQVPCEWFVQSQKPVDKLEKHMPKYLRQKLRAELKPKTRIFEIQPISGVLDPGEKSNVQVKFMPKEEKFYSQTLVFQIAQSAQKLTLLARGQGLEPRLEFSPSVLDLGPLLLCAPGDEAEVIVKNPCNFPIEFYSLEFDQQYLIEEKILRKLKGYDSYNTLLLPPRNPGEKLPPELYEYFKEIKKSKEEQMRAKYLENLAQENEEEDITSSDQGTSNSTKRTSLSRGISVTSNLEEWHALLVESKTYLEEEEDEESLEKIIFQTDKLQSIDSHSMEEVGEVENNPVSKAIARHLGIDISAEGRLAKNRKGIAIIIHGTPLSGKSANAVSVAKYYNAACLSIDSIVLEAVANSNNIPGIRACELCIRAAIEQSMKEGEEAAE

SEQ ID NO: 875389 - protein, 161 aa, Homo sapiens
MGARMVNLFFIFFFLFCLHLPCPPPNSSPGVFILCYLAEEEDITSSDQGTSNSTKRTSLSRGISVTSNLEEWHALLVESKTYLEEEEDEESLEKIIFQTDKLQSIDSHSMEEVGEVENNPVSKAIARHLGIDISAEGRLAKNRKGIAIIIHGTPLSGRQQF

SEQ ID NO: 875390 - protein, 104 aa, Homo sapiens
KELDELKKEVAMDDHKLSLDELGRKYQVDLSKGLTNQRAQDVLARDGPNALTPPPTTPEWVKFCRQLFGGFSILLWIGAILCFLAYGIQAAMEDEPSNDNVSPH

SEQ ID NO: 875391 - protein, 327 aa, Homo sapiens
MARRLLPAHVQESVTFRDVAVFFSQDEWLHLDSAQRALYREVMLENYSILVSLGILFSKPKVISQLEQGEDPWMVESGVPQGAHLGWESLFGTIVSKEENQEVMKKLIIDGTFDFKLEKTYINEDKLEKQQGKKNRLFSKVLVTIKKVYMKERSFKGVEFGKNLGLKSSLIRKPRIVSRGRRPRSQQYSVLFKQLGVNTVRKCYKCNICGKIFLHSSSLSKHQRIHTGEKLYKCKECRKAFSQSSSLTQHLRVHTGEKPYICSECGKAFSFTTSLIGHQRMHTGERPYKCKECGKTFKGSSSLNNHQRIHTGEKPYKCNECGRAFSQ

SEQ ID NO: 875392 - protein, 264 aa, Homo sapiens
ATGNVSELGVPLASCAVWSCAPPAEAGPGAFSKRGSREGEMARRLLPAHVQESVTFRDVAVFFSQDEWLHLDSAQRALYREVMLENYSILVSLGILFSKPKVISQLEQGEDPWMVESGVPQGAHLGWESLFGTIVSKEENQEVMKKLIIDGTFDFKLEKTYINEDKLEKQQGHRTALSVRVITIHHRSMQDRLQVRLGPLAKSRFATISSRTRHAISLPRATGLLCTGLSVSVLTWTHARHYATRVGIRPPYEAGDTLCTSRRP

SEQ ID NO: 875393 - protein, 148 aa, Homo sapiens
LEQLNKDLNKVLHKVQQYCYELAPDQGLQPADQPTDMRRRCEEEAQEIVRHANSSTGQPCVENENLTDLISRLTAILLQIKCLAEGGDLNSFEFKSLTDSLNDIKSTIDASNISCFQNNVEIHVAHIQSGLSQMGNLHAFAANNTNRD

SEQ ID NO: 875394 - protein, 134 aa, Homo sapiens
NHDGKKLRKLPSDKRLIIRKYKDLKQVYRKKILVIQLKMGKRFEYIFPQRRHINGKQAYERYSTQNRHMKRYLTSLIRELQIKTTMRCHVTPVKMALSKKKKITNASEDVEKREPPYTAGGVKGKYLRPPELRS

SEQ ID NO: 875395 - protein, 120 aa, Homo sapiens
HDHRGLFPVPPRLPPSVLHAAASQPGDPFKTQSDQVLPLLKTLSDSPQTWIKIPVPRPDLQGPGWSVLDLSASGLSPSQLPLHSPLPGSFLEDPSLLVGLPDLPLPCTDPRPPTSLHTSL

SEQ ID NO: 875396 - protein, 102 aa, Homo sapiens
GKQGNHQWPPRSQAWGFLSNSLNPVSPWPAQILLLMVCPVAFSLTTVLVLDEPFVFQGSLLLYFLLPTSYSFVFNNVFKHLNCCIYSMPGRYLSTGGGGIRR

SEQ ID NO: 875397 - protein, 67 aa, Homo sapiens
PRWVHSLWGTVTASRQDGCSVIVTHQVSWEQRRWLPTRSRCADVMGENGERQARQAFQFESSAIQKL

SEQ ID NO: 875398 - protein, 82 aa, Homo sapiens
RVDLRQNCEWSDFNMPESAQRNPGRRHQVVADTLGPQGPGLGGGAASRAAKLPAHAVPSEHQSRDLLLTLDPSDELLLQSGR

SEQ ID NO: 875399 - protein, 407 aa, Homo sapiens
MASVLGSGRGSGGLSSQLKCKSKRRRRRRSKRKDKVSILSTFLAPFKHLSPGITNTEDDDTLSTSSAEVKENRNVGNLAARPPPSGDRARGGAPGAKRKRPLEEGNGGHLCKLQLVWKKLSWSVAPKNALVQLHELRPGLQYRTVSQTGPVHAPVFAVAVEVNGLTFEGTGPTKKKAKMRAAELALRSFVQFPNACQAHLAMGGGPGPGTDFTSDQADFPDTLFQEFEPPAPRPGLAGGRPGDAALLSAAYGRRRLLCRALDLVGPTPATPAAPGERNPVVLLNRLRAGLRYVCLAEPAERRARSFVMAVSVDGRTFEGSGRSKKLARGQAAQAALQELFDIQMPGHAPGRARRTPMPQEFADSISQLVTQKFREVTTDLTPMHARHKALAGIVMTKGREFHSEKQG

SEQ ID NO: 875400 - protein, 739 aa, Homo sapiens
MASVLGSGRGSGGLSSQLKCKSKRRRRRRSKRKDKVSILSTFLAPFKHLSPGITNTEDDDTLSTSSAEVKENRNVGNLAARPPPSGDRARGGAPGAKRKRPLEEGNGGHLCKLQLVWKKLSWSVAPKNALVQLHELRPGLQYRTVSQTGPVHAPVFAVAVEVNGLTFEGTGPTKKKAKMRAAELALRSFVQFPNACQAHLAMGGGPGPGTDFTSDQADFPDTLFQEFEPPAPRPGLAGGRPGDAALLSAAYGRRRLLCRALDLVGPTPATPAAPGERNPVVLLNRLRAGLRYVCLAEPAERRARSFVMAVSVDGRTFEGSGRSKKLARGQAAQAALQELFDIQMPGHAPGRARRTPMPQEFADSISQLVTQKFREVTTDLTPMHARHKALAGIVMTKGLDARQAQVVALSSGTKCISGEHLSDQGLVVNDCHAEVVARRAFLHFLYTQLELHLSKRREDSERSIFVRLKEGGYRLRENILFHLYVSTSPCGDARLHSPYEITTDLHSSKHLVRKFRGHLRTKIESGEGTVPVRGPSAVQTWDGVLLGEQLITMSCTDKIARWNVLGLQGALLSHFVEPVYLQSIVVGSLHHTGHLARVMSHRMEGVGQLPASYRHNRPLLSGVSDAEARQPGKSPPFSMNWVVGSADLEIINATTGRRSCGGPSRLCKHVLSARWARLYGRLSTRTPSPGDTPSMYCEAKLGAHTYQSVKQQLFKAFQKAGLGTWVRKPPEQQQFLLTL

SEQ ID NO: 875401 - protein, 35 aa, Homo sapiens
MGHPERCKLGLEDVECSQGKRVGWSDCKEKVSGGG

SEQ ID NO: 875402 - protein, 69 aa, Homo sapiens
ELGLQACATVPSIGQAVLLLQPPEELGLQACATVPSIGQAVLLLQPPEELGLQACTAVPSVPFTFKSST

SEQ ID NO: 875403 - protein, 677 aa, Homo sapiens
MSDPRQSQEEKHKLGRASSKFKDPPRIMQSDDYFARKFKAINGNMGPTTSLNASNSNETGGGGPANGTPAVPKMGVRARVSEWPPKKDCSKELTCKALWESRSQTSYESITSVLQNGQSDQSEGQQDEQLDLDFVEAKYTIGDIFVHSPQRGLHPIRQRSNSDVTISDIDAEDVLDQNAVNPNTGAALHREYGSTSSIDRQGLSGENFFAMLRGYRVENYDHKAMVPFGFPEFFRCDPAISPSLHAAAQISRGEFVRISGLDYVDSALLMGRDRDKPFKRRLKSESVETSLFRKLRTVKSEHETFKFTSELEESRLERGIRPWNCQRCFAHYDVQSILFNINEAMATRANVGKRKNITTGASAASQTQMPTGQTGNCESPLGSKEDLNSKENLDADEGDGKSNDLVLSCPYFRNETGGEGDRRIALSRANSSSFSSGESCSFESSLSSHCTNAGVSVLEVPRENQPIHREKVKRYIIEHIDLGAYYYRKFFYGKEHQNYFGIDENLGPVAVSIRREKVEDAKEKEGSQFNYRVAFRTSELTTLRGAILEDAIPSTARHGTARGLPLKEVLEYVIPELSIQCLRQASNSPKVSEQLLKLDEQGLSFQHKIGILYCKAGQSTEEEMYNNETAGPAFEEFLDLLGQRVRLKGFSKYRAQLDNKTDFTGTHSLYTTYRDLR

SEQ ID NO: 875404 - protein, 118 aa, Homo sapiens
VGFVLHLRYQLNHRTVKHQMVLGNANSRTCLLDGIYGPTLGQRGAHCPGGGGPMPGSIHHQLVEDSLGLKRTSAVVWQYSLWACGGGGHGVRHLCLGKAEAREGRTASCGFSASSPAV

SEQ ID NO: 875405 - protein, 96 aa, Homo sapiens
MQAAAQTCGAEAREHAHWRQCECPLKGFAAQGTDGLSRTQVGQARVGRTKGRETKGPSSCSSQSWGPGYNNLDLRSQEDSELGQGTMEVKAIDSEV

SEQ ID NO: 875406 - protein, 110 aa, Homo sapiens
MSAFPVGKTDNVPICAFPCKIQLSQEHEQISLARPPHPQHLITCLILHDATGGLQGCLHEVITSLPRPGLSMPSLARRRKQIPGIHFQVLHDVMSEEKTGIYETGAITRT

SEQ ID NO: 875407 - protein, 38 aa, Homo sapiens
MEPVLDHFLQLPTGPHPPRATPSEHLPPGAAVSFPVVK

SEQ ID NO: 875408 - protein, 149 aa, Homo sapiens
AGSQARGTRDPEAAQAMLHHLGAQLQAPGNSQAGWRAQPRRPGRGCRRGCGQARRSARRRLHRGRNRPSAPSPVAADGPWRGPDLSSEEKRGGSQGQAGPQAGRDACLRFRDIPRQPRRTRKPAAPVSLCDSVRNHQIVFHGKCIIFYS

SEQ ID NO: 875409 - protein, 184 aa, Homo sapiens
  misc_feature (41)..(41): Xaa can be any naturally occurring amino acid
LCPRGSTPLLQQGEPETHTASGIPQRDQAGREEKGVVVSSXYSLHVPDPVPWELCSSRMLAPVRWVSRRNRTVGRPREQLASGTSSGSLRTCSPSSLLFPLRQRLGRTHRQPLVTRTPHPVCLRRNGVCESGLSLHAAVSAEPGAGVASASQQSEHAQLVQGTVFCLHCSRHRHLHLMMITRQL

SEQ ID NO: 875410 - protein, 184 aa, Homo sapiens; identical to SEQ ID NO: 875409
  misc_feature (41)..(41): Xaa can be any naturally occurring amino acid

SEQ ID NO: 875411 - protein, 43 aa, Homo sapiens
EQMPSSPPVPCSSESLPPRTWPWCGSQAEAGSHPPPLSFLQWC

SEQ ID NO: 875412 - protein, 69 aa, Homo sapiens
GSYCAPVKFKGKDRLSGLLSRGAGRGRGGGRWPLSLCNRKRGECLGQKMTSEDTKRFTVSGATSELLWW

SEQ ID NO: 875413 - protein, 526 aa, Homo sapiens [sequence omitted]

SEQ ID NO: 875414 - protein, 83 aa, Homo sapiens
VAMVIADSRGYTRETTFDIPFIFFNIITVDNSYFVEAVSFALPNYDKEETEERRGGNIVSLSPGLFILWEFKSSPFLPRHIML

SEQ ID NO: 875415 - protein, 304 aa, Homo sapiens
MLKKLSDCIFLWFCIVPPMEDCKEQEPIMDNNISLVPFERPAVIEKLTGNMGKRKSSTPQKFVGEKLMRFSYPDIHFDMNLTYEKEAELMQSHMMDQAINNAITYLGAEALHPLMQHPPSTIAEVAPVISSAYSQVYHPNRIERPISRETADSHENNMDGPISLIRPKSRPQEREASPSNSCLDSTDSESSHDDHQSYQGHPALNPKRKQSPAYMKEDVKALDTTKAPKGSLKDIYKVFNGEGEQIRAFKCEHCRVLFLDHVMYTIHMGCHGYRDPLECNICGYRSQDRYEFSSHIVRGEHTFH

SEQ ID NO: 875416 - protein, 500 aa, Homo sapiens
METEAIDGYITCDNELSPEREHSNMAIDLTSSTPNGQHASPSHMTSTNSVKLEMQSDEECDRKPLSREDEIRGHDEGSSLEEPLIESSEVADNRKVQELQGEGGIRLPNGERPFHCNQCGASFTQKGNLLRHIKLHSGEKPFKCPFCSYACRRRDALTGHLRTHSVGKPHKCNYCGRSYKQRSSLEEHKERCHNYLQNVSMEAAGQVMSHHVPPMEDCKEQEPIMDNNISLVPFERPAVIEKLTGNMGKRKSSTPQKFVGEKLMRFSYPDIHFDMNLTYEKEAELMQSHMMDQAINNAITYLGAEALHPLMQHPPSTIAEVAPVISSAYSQVYHPNRIERPISRETADSHENNMDGPISLIRPKSRPQEREASPSNSCLDSTDSESSHDDHQSYQGHPALNPKRKQSPAYMKEDVKALDTTKAPKGSLKDIYKVFNGEGEQIRAFKCEHCRVLFLDHVMYTIHMGCHGYRDPLECNICGYRSQDRYEFSSHIVRGEHTFH

SEQ ID NO: 875417 - protein, 121 aa, Homo sapiens
NTRPQQSENASLLNYHLVWNETDSSVALAAAGPGWDGGDAGSLDMPGTLPLPASLWIAASLGHLDSTKQKCCERAILLKKLDFERAKEGMPTKKYSVFPITLALLQKNHTFYPRLALSVKS

SEQ ID NO: 875418 - protein, 142 aa, Homo sapiens
PLPEFASGPGAAFFHSGRLQRSLTKDSAGCFSQCRSRAMLVLRSGLTKALASRTLAPQVCSSFATGPRQYDGTFYEFRTYYLKPSNMNAFMENLKKNIHLRTSYSELVGFWSVEFGGRTNKVFHIWKYGNSAHRAEVRALAL

SEQ ID NO: 875419 - protein, 100 aa, Homo sapiens
PLSSLPKLILKAPFSLATLRAPLCFCRGVEPCQGRPCVGPSPSDPPHQSLLLNPTPGGSSAESRTAAELGATGHEESGVEEKTAEENPPAMLNCGFLSRL

SEQ ID NO: 875420 - protein, 43 aa, Homo sapiens
DDGLSLKGTIIFPYVEKFLCQSQQNDTITVNTERMSMPLPALI

SEQ ID NO: 875421 - protein, 57 aa, Homo sapiens
LTLPFSLKDHLLRNALADHLAQAAPITHYPLFYCHLKFSVFTHCLGLSYQIQEPLVA

SEQ ID NO: 875422 - protein, 673 aa, Homo sapiens
NEGAGGGGSVMASGRGASSRWFFTREQLENTPSRRCGVEADKELSCRQQAANLIQEMGQRLNVSQLTINTAIVYMHRFYMHHSFTKFNKNIISSTALFLAAKVEEQARKLEHVIKVAHACLHPLEPLLDTKCDAYLQQTQELVILETIMLQTLGFEITIEHPHTDVVKCTQLVRASKDLAQTSYFMATNSLHLTTFCLQYKPTVIACVCIHLACKWSNWEIPVSTDGKHWWEYVDPTVTLELLDELTHEFLQILEKTPNRLKKIRNWRANQAARKPKVDGQVSETPLLGSSLVQNSILVDSVTGVPTNPSFQKPSTSAFPAPVPLNSGNISVQDSHTSDNLSMLATGMPSTSYGLSSHQEWPQHQDSARTEQLYSQKQETSLSGSQYNINFQQGPSISLHSGLHHRPDKISDHSSVKQEYTHKAGSSKHHGPISTTPGIIPQKMSLDKYREKRKLETLDLDVRDHYIAAQVEQQHKQGQSQAASSSSVTSPIKMKIPIANTEKYMADKKEKSGSLKLRIPIPPTDKSASKEELKMKIKVSSSERHSSSDEGSGKSKHSSPHISRDHKEKHKEHPSSRHHTSSHKHSHSHSGSSSGGSKHSADGIPPTVLRSPVGLSSDGISSSSSSSRKRLHVNDASHNHHSKMSKSSKSSGGLRTSQHPRETGQEASGDQRS

SEQ ID NO: 875423 - protein, 740 aa, Homo sapiens
NEGAGGGGSVMASGRGASSRWFFTREQLENTPSRRCGVEADKELSCRQQAANLIQEMGQRLNVSQLTINTAIVYMHRFYMHHSFTKFNKNIISSTALFLAAKVEEQARKLEHVIKVAHACLHPLEPLLDTKCDAYLQQTQELVILETIMLQTLGFEITIEHPHTDVVKCTQLVRASKDLAQTSYFMATNSLHLTTFCLQYKPTVIACVCIHLACKWSNWEIPVSTDGKHWWEYVDPTVTLELLDELTHEFLQILEKTPNRLKKIRNWRANQAARKPKVDGQVSETPLLGSSLVQNSILVDSVTGVPTNPSFQKPSTSAFPAPVPLNSGNISVQDSHTSDNLSMLATGMPSTSYGLSSHQEWPQHQDSARTEQLYSQKQETSLSGSQYNINFQQGPSISLHSGLHHRPDKISDHSSVKQEYTHKAGSSKHHGPISTTPGIIPQKMSLDKYREKRKLETLDLDVRDHYIAAQVEQQHKQGQSQAASSSSVTSPIKMKIPIANTEKYMADKKEKSGSLKLRIPIPPTDKSASKEELKMKIKVSSSERHSSSDEGSGKSKHSSPHISRDHKEKHKEHPSSRHHTSSHKHSHSHSGSSSGGSKHSADGIPPTVLRSPVGLSSDGISSSSSSSRKRLHVNDASHNHHSKMSKSSKSSGSSSSSSSSVKQYISSHNSVFNHPLPPPPPVTYQVGYGHLSTLVKLDKKPVETNGPDANHEYSTSSQHMDYKDTFDMLDSLLSAQGMNM

SEQ ID NO: 875424 - protein, 393 aa, Homo sapiens
MPSTSYGLSSHQEWPQHQDSARTEQLYSQKQETSLSGSQYNINFQQGPSISLHSGLHHRPDKISDHSSVKQEYTHKAGSSKHHGPISTTPGIIPQKMSLDKYREKRKLETLDLDVRDHYIAAQVEQQHKQGQSQAASSSSVTSPIKMKIPIANTEKYMADKKEKSGSLKLRIPIPPTDKSASKEELKMKIKVSSSERHSSSDEGSGKSKHSSPHISRDHKEKHKEHPSSRHHTSSHKHSHSHSGSSSGGSKHSADGIPPTVLRSPVGLSSDGISSSSSSSRKRLHVNDASHNHHSKMSKSSKSSGSSSSSSSSVKQYISSHNSVFNHPLPPPPPVTYQVGYGHLSTLVKLDKKPVETNGPDANHEYSTSSQHMDYKDTFDMLDSLLSAQGMNM

SEQ ID NO: 875425 - protein, 393 aa, Homo sapiens; identical to SEQ ID NO: 875424

SEQ ID NO: 875426 - protein, 771 aa, Homo sapiens
NEGAGGGGSVMASGRGASSRWFFTREQLENTPSRRCGVEADKELSCRQQAANLIQEMGQRLNVSQLTINTAIVYMHRFYMHHSFTKFNKNIISSTALFLAAKVEEQARKLEHVIKVAHACLHPLEPLLDTKCDAYLQQTQELVILETIMLQTLGFEITIEHPHTDVVKCTQLVRDLWGIARNIGVNVVKIFSSIENDGALVIFVSTSKDLAQTSYFMATNSLHLTTFCLQYKPTVIACVCIHLACKWSNWEIPVSTDGKHWWEYVDPTVTLELLDELTHEFLQILEKTPNRLKKIRNWRANQAARKPKVDGQVSETPLLGSSLVQNSILVDSVTGVPTNPSFQKPSTSAFPAPVPLNSGNISVQDSHTSDNLSMLATGMPSTSYGLSSHQEWPQHQDSARTEQLYSQKQETSLSGSQYNINFQQGPSISLHSGLHHRPDKISDHSSVKQEYTHKAGSSKHHGPISTTPGIIPQKMSLDKYREKRKLETLDLDVRDHYIAAQVEQQHKQGQSQAASSSSVTSPIKMKIPIANTEKYMADKKEKSGSLKLRIPIPPTDKSASKEELKMKIKVSSSERHSSSDEGSGKSKHSSPHISRDHKEKHKEHPSSRHHTSSHKHSHSHSGSSSGGSKHSADGIPPTVLRSPVGLSSDGISSSSSSSRKRLHVNDASHNHHSKMSKSSKSSGSSSSSSSSVKQYISSHNSVFNHPLPPPPPVTYQVGYGHLSTLVKLDKKPVETNGPDANHEYSTSSQHMDYKDTFDMLDSLLSAQGMNM

SEQ ID NO: 875427 - protein, 176 aa, Homo sapiens
NEGAGGGGSVMASGRGASSRWFFTREQLENTPSRRCGVEADKELSCRQQAANLIQEMGQRLNVSQLTINTAIVYMHRFYMHHSFTKFNKNIISSTALFLAAKVEEQARKLEHVIKVAHACLHPLEPLLDTKCDAYLQQTQELVILETIMLQTLGFEITIEHPHTDVVKCTQLVRGR

SEQ ID NO: 875428 - protein, 740 aa, Homo sapiens; identical to SEQ ID NO: 875423

SEQ ID NO: 875429 - protein, 393 aa, Homo sapiens; identical to SEQ ID NO: 875424

SEQ ID NO: 875430 - protein, 133 aa, Homo sapiens
CRQAKKKTHQLWANDAISEDNFMFLVLVHSFNKCLFFVISMQMSYRLLEIILFYSKFLVVHSQYDMALTKQFISTMDGQVGWLTPVIQQFRKLRQEDCLRAGIQDQPRQHSETLISTRNLNKKEKKREAWTLV

SEQ ID NO: 875431 - protein, 36 aa, Homo sapiens
KVRAGYQYGRRTVLWSETPAAVQFAEIMKVEGISQT

SEQ ID NO: 875432 - protein, 69 aa, Homo sapiens
IRPASVLGRCQVISTAILIYPVHITKDETTLSSSASKTHCGWFHCGTNSLQLLLTCYSKVISSKVPPIR

SEQ ID NO: 875433 - protein, 119 aa, Homo sapiens
MKLACFMVLSLPLPRNQCRISRMPEDSSGFGSGIQLKECLSGRLCPEDKEMQRQRQRTPSWEGKLALPLPKTVPATTDEKQHSPHSHLTRSFDRPELLCPTDPRECPFASSGLCHIVLP

SEQ ID NO: 875434 - protein, 32 aa, Homo sapiens
GGGKKDDKDKKKKYEPPVPTGVGKKKKTKGSD

SEQ ID NO: 875435 - protein, 114 aa, Homo sapiens
QPSPHSRHGALHYPVTSLLSYLSHLIPPLTLGNPGWFLLLDNRIVFSRVSSEWNHTIMNEKHTGILFCVWPLWLGIMSLQILSHCCMYQYFIRFYFRVAFHCIDISSFAYAFIY

SEQ ID NO: 875436 - protein, 266 aa, Homo sapiens
TFVSRCIWSSRSPLRYSVSSAPRGPPSVALCPVGIGRSTAKMPGPLRSLEMESLQFRDVAVEFSLEEWHCLDTAQQNLYRDVMLENYRHLVFLGIIVSKPDLITCLEQGIKPLTMKRHEMIAKPPVVCSHFAQDLWPEQSIKDSYQKVILRKFEKCGHGNLHFKKGCESVDECKLHKRGYNGLNQCLTTTQSKIFQCGKYVKVFHQFSNSKRHKRRHTEKKPLKYIEGDKAFNQSSTHTTHKKIDTGEKPYKCEECGKAFNRSSCL

SEQ ID NO: 875437 - protein, 254 aa, Homo sapiens
TFVSRCIWSSRSPLRYSVSSAPRGPPSVALCPVGIGRSTAKMPGPLRSLEMESLQFRDVAVEFSLEEWHCLDTAQQNLYRDVMLENYRHLVFLGIIVSKPDLITCLEQGIKPLTMKRHEMIAKPPVVCSHFAQDLLCSALGATSSRREAAEPATTDPAEPPPPRAPMAAAKDTHEDHDTSTENTDESNHDPQFEPIVSLPEQEIKTLEEDEEELFKMRAKLFRFASENDLPEWKERGTGDVKLLKHKEKGASAP

SEQ ID NO: 875438 - protein, 143 aa, Homo sapiens
VCSHFAQDLWPEQSIKDSYQKVILRKFEKCGHGNLHFKKGCESVDECKLHKRGYNGLNQCLTTTQSKIFQCGKYVKVFHQFSNSKRHKRRHTEKKPLKYIEGDKAFNQSSTHTTHKKIDTGEKPYKCEECGKAFNRSLTPYYT

SEQ ID NO: 875439 - protein, 505 aa, Homo sapiens
TIQNLKETLKSRERETEELYQVIEGQNDTMAKLREMLHQSQLGQLHSSEGTSPAQQQVALLDLQSALFCSQLEIQKLQRVVRQKERQLADAKQCVQFVEAAAHESEQQKEASWKHNQELRKALQQLQEVLQNKSQQLRAWEAEKYNEIRTQEQNIQHLNHSLSHKEQLLQEFRELLQYRDNSDKTLEANEMLLEKLRQRIRDKAVALERAIDEKFSALEEKEKELRQLRLAVRERDHDLERLRDVLSSNEATMQTMESLLRAKGLEVEQLSTTCQNLQWLKEEMETKFSRWQKEQESIIQQLQTSLHDRNKEVEDLSATLLCKLGPGQSEIAEELCQRLQWKERMLQDLLSDRNKQVLEHEMEIQGLLQSVSTREQESQAAAEKLVQALMERNSELQALHQYLGGRDSLMSQAPISNQQAEVTPTGRLGKQTDQGSMQIPSRDDSTSLTAKEDVSIPRSTLGDLDTVAGLEKELSNAKEELELMAKKERESQLYPSNMGEKVSAF

SEQ ID NO: 875440 - protein, 664 aa, Homo sapiens
TIQNLKETLKSRERETEELYQVIEGQNDTMAKLREMLHQSQLGQLHSSEGTSPAQQQVALLDLQSALFCSQLEIQKLQRVVRQKERQLADAKQCVQFVEAAAHESEQQKEASWKHNQELRKALQQLQEVLQNKSQQLRAWEAEKYNEIRTQEQNIQHLNHSLSHKEQLLQEFRELLQYRDNSDKTLEANEMLLEKLRQRIRDKAVALERAIDEKFSALEEKEKELRQLRLAVRERDHDLERLRDVLSSNEATMQTMESLLRAKGLEVEQLSTTCQNLQWLKEEMETKFSRWQKEQESIIQQLQTSLHDRNKEVEDLSATLLCKLGPGQSEIAEELCQRLQWKERMLQDLLSDRNKQVLEHEMEIQGLLQSVSTREQESQAAAEKLVQALMERNSELQALHQYLGGRDSLMSQAPISNQQAEVTPTGRLGKQTDQGSMQIPSRDDSTSLTAKEDVSIPRSTLGDLDTVAGLEKELSNAKEELELMAKKERESQMELSALQSMMAVQEEELQVQAADMESLTRNIQIKEDLIKDLQMQLVDPEDIPAMERLTQEVLLLREKVASVESQGQEISGNRRQQLLLMLEGLVDERSRLNEALQAERQLYSSLVKFLPIQRGAAAGDDTEDTSTEFTDSIEEEAAHHSHQQVSQCQGLGLPGWTAHSPSEV

SEQ ID NO: 875441 - protein, 87 aa, Homo sapiens
PLTTLPQPLISYSTKNKTLKPPHTPPCSLISPFLDLSQPQGSEMEANEAESSRRLRGPEPQQVLRLERATGKMRPFTGLCLQLTPID

SEQ ID NO: 875442 - protein, 238 aa, Homo sapiens
GARAAARLPPRGMRDPGVPRTWLVPRQFRGCLETGLWLPSSPLRLFFFFFFFLSPPRPFYNSSRGRVGGHLPLEKGPLGRGGARGITAPRGFSGGAPMEDLPWAAPQKHFVRPPIFFPPGVPLFWARDRAPSSYAPPNLEGSPLLQPGEQLIAAQSALRKRGRSTSNKNCVCPVEPPHTFLLLPNCARYSTYGAALSLLPPPATRFPYRGDPKYNTVAKEGAGHPLWGHIPVSTLPPC

SEQ ID NO: 875443 - protein, 122 aa, Homo sapiens
MVWASKLAFQGGRKKRSLEASTTTQRGLLTHSTPYCTRAGRKEGAPVWGLQEQAVLRGQPGLKNKEMDEGPGVVAHACHPSPLGGQGGQITLRSGVRDQPGQHGETPSLLIQKLARHSGTHL

SEQ ID NO: 875444 - protein, 94 aa, Homo sapiens
QLRNTQWVFGIVVYTGHDTKLMQNSTKAPLKRSNVEKVTNVQILVLFGILLVMALVSSAGALYWNRSHGEKNWYIKKMGKCRGGLLVPVEENHF

SEQ ID NO: 875445 - protein, 105 aa, Homo sapiens
QLRNTQWVFGIVVYTGHDTKLMQNSTKAPLKRSNVEKVTNVQILVLFGILLVMALVSSAGALYWNRSHGEKNWYIKKMDTTSDNFGYNLLTFIILYNNLIPISLL

SEQ ID NO: 875446 - protein, 88 aa, Homo sapiens
GSGCNAGRGSSGPGSGGSRWGAWLPPSPPPRLPSSPRAPSPPASSLSGRHHRHPRIHKSVKARCFHFWMTYRAVATLPTKRLFTLLSY

SEQ ID NO: 875447 - protein, 78 aa, Homo sapiens
MSCIGAPPPPPPPPPPPPPPPPPPPPPPPPPPPPPPPPPPPPLPPPPPPPPPPPPPPPPPPPPPPPPPPPPPPPPPPP

SEQ ID NO: 875448 - protein, 101 aa, Homo sapiens
SHQYFASQLHTHASLPCFVTVGVWWDEGASLPLFLGSSSADCQQDMSALAAQLKDSSFQSQLESPSLPTSAQPLWSSSGPGQPREQEVILHPLDHSLGPGL

SEQ ID NO: 875449 - protein, 78 aa, Homo sapiens
VLMRQKGTHWAPEVTKSSQCGLRFKEGGLLGVAYLKSLHQKLKQERAGEDSCLIRQPTNMCPVYAGRHQCCLEALTVL

SEQ ID NO: 875450 - protein, 288 aa, Homo sapiens
TRYHQAASDSYLELLKEATKRDLNLSDEDGMTPTLLAAYHGNLEALEIICSRGGDPDRCDIWGNTPLHFAASNGHAHCVSFLVNFGANIFALDNDLQTPLDAAASREQNECVALLDKAATAQNIMNPKKVTRLKEQAQKNARRQIKECERLQEKHQNKMAHTYSKEESGTLSSSKGTFSRSSPSNASAPGTFGSLSKGIKDTFKIKFKKNKDTAEQVGKEGRSGQRNVMEVFREEEEDSFSGDFKEKLQLSAEEDGSVHHESILNRPGLGSIVFRRNRISSPEDISDS

SEQ ID NO: 875451 - protein, 179 aa, Homo sapiens
TRYHQAASDSYLELLKEATKRDLNLSDEDGMTPTLLAAYHGNLEALEIICSRGGDPDRCDIWGNTPLHFAASNGHAHCVSFLVNFGANIFALDNDLQTPLDAAASREQNECVALLDKAATAQNIMNPKKVTRLKEQAQKNARRQIKECERLQEKHQNKMAHTYSKEEETLRWKAHREAT

SEQ ID NO: 875452 - protein, 125 aa, Homo sapiens [sequence omitted]

SEQ ID NO: 875453 - protein, 79 aa, Homo sapiens
GQGPTVSTGMARGETQCSAHRGLGAGRSHLLPSRVPASQPSHLSHPGAMLRWSLGPPVPALLLPGTLAEGSALPPLHTH

SEQ ID NO: 875454 - protein, 176 aa, Homo sapiens
KRGTVMTVHFDTTILPRDAMTSMCVTLEGKGLHLSLLVPRMGFTVDVPLTPPLHQNVDAQRTGTPEPQGGKEEEHSQDQKSEETMMSHRSQGVSSCSRGEPKSGDSLSKLLAGGELVVVISSQLWQWLWPNSWRQEQGSDKNQQLHRGLINFQSSIQKRTGHAQAAPKRKDKGEEF

SEQ ID NO: 875455 - protein, 183 aa, Homo sapiens
KRGTVMTVHFDTTILPRDAMTSMCVTLEGKGLHLSLLVPRMGFTVDVPLTPPLHQNVDAQRTGTPEPQGGKEEEHSQDQKSEETMMSHRSQGVSSCSRGEPKSGDSLSKLLAGGELVVVMCLSTCSSSSQLWQWLWPNSWRQEQGSDKNQQLHRGLINFQSSIQKRTGHAQAAPKRKDKGEEF

SEQ ID NO: 875456 - protein, 92 aa, Homo sapiens
PVPSPTPPLPASVPSSPLGKAAGLPRECPLVPPLALCPVLNPSSHTYPFSQGSLPQNFLSLDHGAVQGGQEAGWKDCKGDCFSCYPQVLKPK

SEQ ID NO: 875457 - protein, 106 aa, Homo sapiens
PRRRSLQCVEITPLHSSLGDRARLCLKKKRQGRRRGWVSGLLRGWEIKRAFVLPGLLGVALCRGRAKIASNPDSQIGWRSGQAAVEIEESRLLGRHSSQLEAPAIP

SEQ ID NO: 875458 - protein, 71 aa, Homo sapiens
MVTRHEEEVGYYRDMSCLTAILLLYLPEEDNFWALDQRMAEERHSLQGKSGDFLKPLYENGETSQEMLMDS

SEQ ID NO: 875459 - protein, 140 aa, Homo sapiens
PKHQPHSRPDWQQQTPKDKGGIFNKVSRFPRVGHSTVTCCKRQASQSPSPESLPLPALLRLNACGGQKTWGLRSTPSEAHTPLQRRARGLPPGRVPAAANQLFAPKPAPPLPWLMAALNERNRCRLRIYECAGEEGRDIM

SEQ ID NO: 875460 - protein, 41 aa, Homo sapiens
MLTGRLLTSYCVAWFLTGHGLVTICGLGTGDPDLKNRGHTH

SEQ ID NO: 875461 - protein, 138 aa, Homo sapiens [sequence omitted]

SEQ ID NO: 875462 - protein, 116 aa, Homo sapiens
MPHLLGNNQMSFCSFPFSWALYWETVYAHRPRTPPKISTFRAPSSSPLLRQPRLTPRISPCSFLCSVSITRLYGRHMPTEPPPLLLPRGLKPALGQSTEAAFSSGQAAGASGVLEV

SEQ ID NO: 875463 - protein, 91 aa, Homo sapiens
ARNIWIHDSSLALTKEEQLPILSSLGLRDTQTTSLLNSLFAKAWAEDQNRKRGEPNDNSEEMIRTEKERRKSKRPDPHVDPIVSSFQPPSL

SEQ ID NO: 875464 - protein, 129 aa, Homo sapiens
MNEAQKKGSRSPQGHRGSVQGQISSWGHAEICAVHNQPGDAAPARSMHHWVHVNISARSRAQKKRAKGTSRAAASVTLDGGPGCEALLDAPFGDPGVRLAWPRRVRGLEAFVCLSAGRGPGWGPRAGRP

SEQ ID NO: 875465 - protein, 164 aa, Homo sapiens
EISSDSHAPLHSVTNSPEVAVKKLNPQKEEQVHLENKENEPIDSEVSLDYNIIFHSVTGRSEDPIKEISLHTKEHMYLENKSVFETSLDSDVPLQAATHKPEVIVKETWLQREKHAEFQGRSTEFSGSKTSLDSGVPHYSVTEPQVAVNKINRKKQYVLENKND

SEQ ID NO: 875466 - protein, 346 aa, Homo sapiens
MERKFMSLQPSISVSEMEPNGTFSNNNSRNCTIENFKREFFPIVYLIIFFWGVLGNGLSIYVFLQPYKKSTSVNVFMLNLAISDLLFISTLPFRADYYLRGSNWIFGDLACRIMSYSLYVNMYSSIYFLTVLSVVRFLAMVHPFRLLHVTSIRSAWILCGIIWILIMASSIMLLDSGSEQNGSVTSCLELNLYKIAKLQTMNYIALVVGCLLPFFTLSICYLLIIRVLLKVEVPESGLRVSHRKALTTIIITLIIFFLCFLPYHTLRTVHLTTWKVGLCKDRLHKALVITLALAAANACFNPLLYYFAGENFKDRLKSALRKGHPQKAKTKCVFPVSVWLRKETRV

SEQ ID NO: 875467 - protein, 346 aa, Homo sapiens; identical to SEQ ID NO: 875466

SEQ ID NO: 875468 - protein, 36 aa, Homo sapiens
MGPTSMSHTECSEQRLAQICAHCRFARMEGCAIHKR

SEQ ID NO: 875469 - protein, 168 aa, Homo sapiens
MSGSGIGTFILAPVVQLLIEQFSWRGALLILGGFVLNLCVCGALMRPITLKEDHTTPEQNHVCRTQKEDIKRVSPYSSLTKEWAQTCLCCCLQQEYSFLLMSDFVVLAVSVLFMAYGCSPLFVYLVPYALSVGVSHQQAAFLMSILGVIDIIGNITFGWLTDRRCLKN

SEQ ID NO: 875470 - protein, 168 aa, Homo sapiens; identical to SEQ ID NO: 875469

SEQ ID NO: 875471 - protein, 143 aa, Homo sapiens
QSEVRGLSTSGSLGEAKTPPPEPHSLGGRKTPPRSTWREGRKPPAPGHGEGQKPRTSKSWSWRLRLPSLEHEGAGSATPENCPNPVPPGTGLGSPGARRELRRRRAAAPRRSGKLTGGHPDSSAPPTRPYCARGEGARCSPAA

SEQ ID NO: 875472 - protein, 156 aa, Homo sapiens
ASFRASIVRASLQEQEGQPRPQSPRSQVRPEADPGPSPLTKMSAENEYRPPSPPKLAAERDKPSPRLRPRGVPVLPGIAQDSSQRAPRTRGTARSGAGSLQRPPGPHRPVPRPEGPARPNKVGAGSPGTAPHTAGCPPARRRGTRGRARGRRRGSR

SEQ ID NO: 875473 - protein, 162 aa, Homo sapiens
QQGNEECFDLRKMKNEDRTRGFKLTAAKIAECGFVFETVPQISTYLMRVVDKDSIRSGGPVVVLVQLEREKKVTGPVIAPLFLQKREEGWWVVIGDAKSNSLISIKRLTLQQKAKVKLDFVAPATGAHNYTLYFMSDAYMGCDQEYKFSVDVKEAETDSDSD

SEQ ID NO: 875474 - protein, 140 aa, Homo sapiens
TESQLLPDVGAIVTCKVSSINSRFAKVHILYVGSMPLKNSFRGTIRKEDVRATEKDKVEIYKSFRPGDIVLAKVVTEISLGDAQSNYLLTTAENELGVVVAHSESGIQMVPISWCEMQCPKTHTKEFRKVARVQPEFLQT

SEQ ID NO: 875475 - protein, 60 aa, Homo sapiens
METDLAEMPEKGVLSSQDSPHFQEKSTEEGEVAALRLTARSQNCLFVEHRKRRKFAFPMS

SEQ ID NO: 875476 - protein, 130 aa, Homo sapiens
METDLAEMPEKGVLSSQDSPHFQEKSTEEGEVAALRLTARSQAAAAAAAPGSRSLRGVHVPPPLHPAPAREESARTPAAAGRAAKMAEAPASPAPLSPLEVELDPEFEPQSRPRSCTWPLQRPELQASPA

SEQ ID NO: 875477 - protein, 108 aa, Homo sapiens
QYKNGQLLKPNLASPIIRTSLYKNLPSANIIFLIQPKAAFKDFLKPTPIDSSPLFSPATLIGQALLYICATVNSRSIVGALDPAQCNTTSTIIDISQNFVSLNILNIK

SEQ ID NO: 875478 - protein, 77 aa, Homo sapiens
PGAGGSVTRPLPCHSWRLTNSRRRRENSPRHPRHQPSRSAALQDLPAGSPGVRGSAEGPSPRPLGSEAHPWNTNSFS

SEQ ID NO: 875479 - protein, 85 aa, Homo sapiens
TELPRNITYHCKNSIAYMDQASGNVKKALKLMESNEGEFKAEGNSKFTYTVLEDGCTKHTDGIFSHQANQKQYRRDHATALQPGP

SEQ ID NO: 875480 - protein, 76 aa, Homo sapiens
PGLGSRVSPVTWEMAPGPSPPLLPQGPLLTQGHQAGPLAESSVSPLWRVKSSVWGAISGSGAARPTGLSSGRTAEL

SEQ ID NO: 875481 - protein, 215 aa, Homo sapiens
MSETVPPAPAASAAPEKPLAGKKAKKPAKAAAASKKKPAGPSVSELIVQAASSSKERGGVSLAALKKALAAAGYDVEKNNSRIKLGIKSLVSKGTLVQTKGTGASGSFKLNKKASSVETKPGASKVATKTKATGASKKLKKATGASKKSVKTPKKAKKPAATRKSSKNPKKPKTVKPKKVAKSPAKAKAVKPKAAKARVTKPKTAKPKKAAPKKK

SEQ ID NO: 875482 - protein, 121 aa, Homo sapiens
PCGHSIHHDYHQYFSYNQMVASFSYSPIRLLEVCVPLPKIFIKRQAPLKVSLLQDLKDFFQKVSQVYVAIDERLASLKTDTFSKTREEKMEDIFAQKEMEEGEFKNWIEKMQARLMSSSVD

SEQ ID NO: 875483 - protein, 144 aa, Homo sapiens
HNTPLENKPLPRSQTPGGIRPQLRRDTSRSGGQDLVLAPRLAGISELPAPGRAPLPRPAPHKGPLSRRAPGTPVPEKFQEKNQRESKIGELRRAGGARPRWQLLRDPKEEGSIEGYSGNCKNPKLQFEQEVDFFFFLSRDLGRQ

SEQ ID NO: 875484 - protein, 131 aa, Homo sapiens
SPLVSAPLRARGASGASVLPAAPARCPQPSLRCTERARRSHSPLLPRPRLTWLSGHPEATKAAPCPDAGLPLSLTSLPGLWSVFCVRIWIPVALERQKGRGDRKAAKEASGRSLPQPPPAGNLGGALGVSV

SEQ ID NO: 875485 - protein, 199 aa, Homo sapiens
MDFSKFLADDFDVKEWINAAFRAGSKEAASGKADGHAATLVMKLQLFIQEVNHAVEETSHQALQNMPKVLRDVEALKQEASFLKEQMILVKEDIKKFEQDTSQSMQVLVEIDQVKSRMQLAAESLQEADKWSTLSADIEETFKTQDIAVISGQANRYAEQLMMLLIPDYSESVALGAGNGGGPPSRCAGPPGGSPVVGS

SEQ ID NO: 875486 - protein, 158 aa, Homo sapiens
MDFSKFLADDFDVKEWINAAFRAGSKEAASGKADGHAATLVMKLQLFTKETSHQALQNMPKVLRDVEALKQEASFLKEQMILVKEDIKKFEQDTSQSMQVLVEIDQVKSRMQLAAESLQEADKWSTLSADIEETFKTQDIAVISAQANRYAEQLNDAC

SEQ ID NO: 875487 - protein, 102 aa, Homo sapiens
AGELEKNQAETHGCGGSTGKPLKAWAMVTHLAWANLQTQGYPTAQPGKPHSRHRNHKAHSNGTPPVRRVPHREPGCMILRSPNSRASLVCLDRERGEDWLQE

SEQ ID NO: 875488 - protein, 67 aa, Homo sapiens
AGGFSLSLFPGESSCELFLLQQCHAAPETCSHPPLWFILIPRASFPSSLVDAGMVWDRAVLIAPPWG

SEQ ID NO: 875489 - protein, 120 aa, Homo sapiens
AIQLTFKQVSKNFSEVFQKLVPGGKATLVMKKGDVEGSQSQDEGEGSGESERGSSSQSSVPSVEQFTGVGIRVSFTGVALALIFAIQKCDPAPFYLFDEIDQALDAQHRKAVSDMIMELA

SEQ ID NO: 875490 - protein, 102 aa, Homo sapiens
MLSHLHREFRDRKAVGRDVNGGSGVDEMVKCWRKEAIYEYDHCHSDKISGLLSLKKVSLCFYLKANHYAFLRKKKNGESGYAGKCLIQTISSLRRPRVTLYG

SEQ ID NO: 875491 - protein, 73 aa, Homo sapiens
MEMSLMQAPGNQYVSSVSLARYSLLDPQSGEIMLISPTSYENYARKLCGAYRCPVACWLEALTLKSGRPGWNS

SEQ ID NO: 875492 - protein, 66 aa, Homo sapiens
GDELDKMESSLVASELPLLIEDLLEHEKKELQKKQQLSAQLQPAQQQQQQQQQHSLLSAPGPAQAM

SEQ ID NO: 875493 - protein, 70 aa, Homo sapiens
IGIQGTYLNVIKAIYDKPTADIILNGKKLKAFPLRTGTRQGCPLSPLLFNIVLEVLARVIWQEKERHRNW

SEQ ID NO: 875494 - protein, 69 aa, Homo sapiens
GAARAEPPPEPQGRSERGLGASRAQTAPPGALSLAPGKEENPLPPGRAGRRAGSQPQAPGPRRSHGSQD

SEQ ID NO: 875495 - protein, 142 aa, Homo sapiens
VVHLPLGRTQGPGMAPDQGGTVLWENLWYVTTCTPVCAQPEMSWSQSPLERLQSTFMSPQDLKGPLRSRRACGGRSRGSDQPQGEWGKQRGSPQPPVPCLVFSGVSRHCLGLRDGHAAFGWGLRVEEGRLVGTGSKSFSCPC

SEQ ID NO: 875496 - protein, 231 aa, Homo sapiens
QCLKQYMQLAIREGCGPPITCPDMVCLNHGTLQEAEIACLVPVDQFQLYQRLKFEREVHLDPYRTWCPVADCQTVCPVASSDPGQPVLVECPSCHLKFCSCCKDAWHAEVSCRDSQPIVLPTEHRALFGTDAEAPIKQCPVCRVYIERNEGCAQMMCKNCKHTFCWYCLQNLDNDIFLRHYDKGPCRNKLGHSRASVMWNRTQVVGILVGLGIIALVTSPLLLLASPCIIC

SEQ ID NO: 875497 - protein, 113 aa, Homo sapiens
ERRREWKSSCPVCQQPGLAVSAREATEKPGDGGTQVCCQGLRRLKNAEDRLMGSAGRLHYLAMTAENPTPGDLAPAPLITCKLCLCEQSLDKMTTLQECQCIFCTAMDNVLMV

SEQ ID NO: 875498 - protein, 301 aa, Homo sapiens
ERRREWKSSCPVCQQPGLAVSAREATEKPGDGGTQVCCQGLRRLKNAEDRLMGSAGRLHYLAMTAENPTPGDLAPAPLITCKLCLCEQSLDKMTTLQECQCIFCTAIACLVPVDQFQLYQRLKFEREVHLDPYRTWCPVADCQTVCPVASSDPGQPVLVECPSCHLKFCSCCKDAWHAEVSCRDSQPIVLPTEHRALFGTDAEAPIKQCPVCRVYIERNEGCAQMMCKNCKHTFCWYCLQNLDNDIFLRHYDKGPCRNKLGHSRASVMWNRTQVVGILVGLGIIALVTSPLLLLASPCIIC

SEQ ID NO: 875499 - protein, 246 aa, Homo sapiens
AVCLFLADCPQGSSTCLRPSPATWQGGAPYRAIFAAGPRLSAPSAEAEEVPGGHTASNPTYEPLSSRRTKAPSEGRDSPSSPATSTHYLDRESGLGSVNSHPSRSPYNLEPAQPLSPSLKPMGPHCSVPRRPRMGSGKVSMCPQGQVSGPDSHPQGGGAQRAQSPPLGGPAAPAFPVSPASVPGILDLGLALRKRGSSVPQQGRGTLGLRDHISGCGENVNHISRISPPWAQPGHGPLKMFLIAGS

SEQ ID NO: 875500 - protein, 374 aa, Homo sapiens
LPQPPPLQPRLGSASPPRLAAPLAGSRAPSLSPFPRRCRRRAERSPAGHGLPLPRSLSRGGEVVGARRRRGGEERRVRGRRQGCALGSPPIPAGPAAPGRAGERRAARQWRKRGGGPGVSPREGAQGEGVRGGVTPRARGSSTCLRPSPATWQGGAPYRAIFAAGPRLSAPSAEAEEVPGGHTASNPTYEPLSSRRTKAPSEGRDSPSSPATSTHYLDRESGLGSVNSHPSRSPYNLEPAQPLSPSLKPMGPHCSVPRRPRMGSGKVSMCPQGQVSGPDSHPQGGGAQRAQSPPLGGPAAPAFPVSPASVPGILDLGLALRKRGSSVPQQGRGTLGLRDHISGCGENVNHISRISPPWAQPGHGPLKMFLIAGS

SEQ ID NO: 875501 - protein, 51 aa, Homo sapiens
MQRPYDSRTCIGSSHSRGPLSWAPCGPIAGSRQALSFEVPPCNYDPEKWIQ

SEQ ID NO: 875502 - protein, 97 aa, Homo sapiens
YCFSSASSLVSSSTKRASSFSATFFGMIVFARSFLFSPISFLHSSNFVLNFCAFSIFRKWMASSSGLGHSLAKSAWVFQTQAWSLPMLGFSSIISVK

SEQ ID NO: 875503 - protein, 111 aa, Homo sapiens
ENGDSTQKETNPAFRVQHHQALHFSYSDTAWFTGAGLPGPACSLHCQQYDELSSYCLLSKGPAETHVGSREAAALGENPMLHLYRHVVITSANAPGLQTTVCLLDALHQRH

SEQ ID NO: 875504 - protein, 68 aa, Homo sapiens
AGELMTGVLEEEVSCGELRALKEATHGGGLGTWQFQSIHHVKEGPCRSPKSMFSCLSLVDDGGWWQGH

SEQ ID NO: 875505 - protein, 97 aa, Homo sapiens
PSGGRGPPRVSPGQVTLSKPLWWARTSTRVTRPGDFSASPSTRVTRPGDSQQAPPVGEDLCTCLQRPKQKKTLAQESLDFTKRSQDCGFSGSAVSVV

SEQ ID NO: 875506 - protein, 105 aa, Homo sapiens; identical to SEQ ID NO: 767212

SEQ ID NO: 875507 - protein, 111 aa, Homo sapiens
RVKGKVAQPGLGGAGWAQPSISSGRPRQRAGGARWAGSSQLVAFEAPPTAVGEGQPRRVGSGPAAGWGGRGPAFPQQRRRPPWHVVRFWRHRPRWARHPGCQAHRQPRPVL

SEQ ID NO: 875508 - protein, 110 aa, Homo sapiens
LNNAAAVVLQPLSPVIGTCISSEVHCICQISGRQEDGKKRQGKRKEKEILPSYRIQPHVLYLESDYNVAAPNTAAPGPDCLEPNLGLPLSGLRSVAIESTSVQLSSSSIR

SEQ ID NO: 875509 - protein, 71 aa, Homo sapiens
DPFVMAERGKGFPIKNNKHLDVSRAWNLVTHYNFLSLLTGNEERCVVYVANIKEVHNLFLIVRKKSGELSH

SEQ ID NO: 875510 - protein, 46 aa, Homo sapiens
WKNKEFKKYPKYPVCDEKEHYYTNRLNGHLWNNKFPLINQYLVNLS

SEQ ID NO: 875511 - protein, 53 aa, Homo sapiens
MSNSYSSTKRHSKKTAIGETGRRPSSEPNLCGTLILDFPTSRVMRNKFMLFKP

SEQ ID NO: 875512 - protein, 36 aa, Homo sapiens
MMNILRATNNTTISKIILVITQFFLERLFTTENVNT

SEQ ID NO: 875513 - protein, 211 aa, Homo sapiens
MAEPRQEFEVMEDHAGTYGLGDRKDQGGYTMHQDQEGDTDAGLKESPLQTPTEDGSEEPGSETSDAKSTPTAEAEEAGIGDTPSLEDEAAGHVTQARMVSKSKDGTGSDDKKAKTSTRSSAKTLKNRPCLSPKHPTPGSSDPLIQPSSPAVCPEPPSSPKYVSSVTSRTGSSGAKEMKLKGADGKTKIATPRGAAPPGQKGQANATRIPAK

SEQ ID NO: 875514 - protein, 332 aa, Homo sapiens
  misc_feature (83)..(83): Xaa can be any naturally occurring amino acid
  misc_feature (119)..(119): Xaa can be any naturally occurring amino acid
AKGQRREERAGRRRTAERQGARARPLVAGGEGSRGGRAARPLPWGEASLFSCCVVAMQLVAGSDASAITRTSFSTGVAARASXHPHTPSQSVRRLISRPDARRGATGAQPVSCAALANXQSQLVITLLRLILRHRSIGLLFVCIKVNFEPGMAEPRQEFEVMEDHAGTYGLGDRKDQGGYTMHQDQEGDTDAGLKAEEAGIGDTPSLEDEAAGHVTQARMVSKSKDGTGSDDKKAKTSTRSSAKTLKNRPCLSPKHPTPGSSDPLIQPSSPAVCPEPPSSPKYVSSVTSRTGSSGAKEMKLKGADGKTKIATPRGAAPPGQKGQANATRIPA

SEQ ID NO: 875515 - protein, 207 aa, Homo sapiens
APLYPVQSCWSSTDPQQPRAHSRGVEVPRLPLGYMNKTGAKLRPWPRLRFAQEGPERLEGPAPHNHPKPLWTLEKPIGQSGFSGSQDRATSRGGPQYLGHQAQYLSPNNNEQIAQALLSLGGPGTVTWEETCKTETEEAGIGDTPSLEDEAAGHVTQARMVSKSKDGTGSDDKKAKGADGKTKIATPRGAAPPGQKGQANATRIPAK

SEQ ID NO: 875516 - protein, 80 aa, Homo sapiens
PSVPAEEVQQPEMAAVLNAERLEVSVDGLTLSPDPEERPGAEGAPLLPPPLPPPSPPGSGRGPGASGEQPEPGEAAAGGA

SEQ ID NO: 875517 - protein, 123 aa, Homo sapiens
TPLLISGGRTVSELFVSISHLSLVVKDWLMITMHRKTFRRKGECFVDHFGFLFCVWQNSRGGEGWNKIGQWPLCLLAPQPQAASLWEPGNIHTARTWLFPQSDTTGQPGSPLLLKNALPCSSH

SEQ ID NO: 875518 - protein, 37 aa, Homo sapiens
MAARTRHDRTDHTQHEPRTRTHELRAHEHPTHRTTTV

SEQ ID NO: 875519 - protein, 101 aa, Homo sapiens
  misc_feature (15)..(16): Xaa can be any naturally occurring amino acid
  misc_feature (18)..(22): Xaa can be any naturally occurring amino acid
  misc_feature (26)..(26): Xaa can be any naturally occurring amino acid
LKFFAALHMACRVTXXLXXXXXWHCXLFWGVLKKFYPVGKFRNAAFTNNENLPYIESRAGWTWWLMPVIPAFWEAEADGSLEARSSRPTWPLAIMVKPCLY

SEQ ID NO: 875520 - protein, 142 aa, Homo sapiens
SPGDTHQSSRDSVHLAIRGHSASSPRTTDPCTATTPGPPDTLPYPVPVPSSPASTKGFLGPTPGHCADTSGGGGGVGQKFCSCWPWGKDAGRSSCCPLTSPSGRLTGAEWAPVAPPGQGTGSLPIPATHSLTRASPVVSPSS

SEQ ID NO: 875521 - protein, 105 aa, Homo sapiens
FPFTLRQPTSVTLIKIIQYLSNWSLCLLSSLSLSNTPVPIHKLIYYSKTLTFVIIMALILLFFCLRNKRLPLQQILFVTFPHICNITYLFLSILFVTIPCIHSLF

SEQ ID NO: 875522 - protein, 144 aa, Homo sapiens
YIQSDRKWVAWCGPFLSSLFSLLSPTDILCPTTLSHFSSFLNLSKCLLARVPLLGMPSCPLSPATCKLFTFCGIHLNRIDHSFLVLSLYLLHILMSVLVTPNCSYLFPCHSLLLGCELLENRDCVCFIFMKSKNFMRNLTLSRK

SEQ ID NO: 875523 - protein, 67 aa, Homo sapiens
ASAVRERRSNVAPRGTGSIGPGEPILLPPSRPPSKAPRTHGSPKEGWPQAGVTQKRYKTKCQNPPNV

SEQ ID NO: 875524 - protein, 146 aa, Homo sapiens
THHHTHMSPPHTHHIPYTHNIPHTQHHTYHTHTCTHTTHTTYTSHHIYYTHKHTTYYTHHTHTTSPTIRTCHHHTHTHTHTPHTHTQVPHHKLWGKFLAFLLGERAVPREDWLISELEGLCGTGQPLQLSGTATQWVVRGFIRCTR

SEQ ID NO: 875525 - protein, 119 aa, Homo sapiens
LCGGQRSQAAQIQGVVSSQSVPIDHSSLRMLRLCFQVYLLFRFSCEISCIEIFSQMCKEPFKCIKRPGAVADTVIQTLWEAKVGGSHEARSSRPAQPTWQNPISTKNTKEFARHGGTHL

SEQ ID NO: 875526 - protein, 106 aa, Homo sapiens
MTGIPIRVTLGIQSETNLDIKTLHKVKPGDNNKGQYSHKQPTIQNDRIINEAARGGSHPKKARHRDCRNPVKHQDKRGNHGLPTGDLLTRMVARGTRPTYYSLHIG

SEQ ID NO: 875527 - protein, 155 aa, Homo sapiens
LNPGLSDFELLILVSLDVLREVVAAHEALAALGTGKALLARVSPQVPLQLVRAREALPAEEPVAHEGSLARVPAQVRLQVRRLPVHLAAARHVAHVLLLLPRLRLGGAARRLAVGTAAAAAPPGRGRQGGLGLQQRGDLALVLRKVRRAQHQASL

SEQ ID NO: 875528 - protein, 251 aa, Homo sapiens
AQGEAEVRHPPVGIAVAVARQKDSGGSGRLGPGLVDQERSLSLSNVKGHGRADEDCVDDRARHREERLLGARLDRDQEKLLRESKELADLARLHPTSCAPNGLNPNLMVTGGPALAGSGRWSADPAAHLATHPWLPRSGNASMWLAGHPYGLGPPSLHQGMAPAFPPGLGGSLPSAYQFVRDPQSGQLVVIPSDHLPHFAELMERATVPPLWPALYPPGRSPLHHAQQLQLFSQQHFLRQQEFLYLQQQAA

SEQ ID NO: 875529 - protein, 111 aa, Homo sapiens
SALYPRHLENTWHIEAVQKLFQEWMNKMTWAVSLILLLICCVTRTNANPYLFWNSMVLLYGTRGLGLSLKIYPALESTKYSGERVMPGVFDDSICPGYVVWQVNLKPLAWK

SEQ ID NO: 875530 - protein, 69 aa, Homo sapiens
CHRVFPHAVGWNKWFNPISFITKDEEGASYKELAFTSATQEGFLGEGRWLPYWRKKTRSNEVKQATRLE

SEQ ID NO: 875531 - protein, 76 aa, Homo sapiens
NNMAIGLWNSVLVVRMVQHPISNSFPEIVVITPSKRNYNQTKEPMWLLFERSPESDSSGLGHSSGYRTLSTVTRTV

SEQ ID NO: 875532 - protein, 119 aa, Homo sapiens
MCSHIAEDLCPERDIKYFFQKVILRRYDKCEHENLQLRKGCKSVDECKVCKGGYNGLNQCLITTQSKMYQCDKYVKVFYKFSNSDRHKIRHTEKKTCKCKECGKSFCMLSQLTRHKRIH

SEQ ID NO: 875533 - protein, 564 aa, Homo sapiens
LGAQPLWPCDLQVLGDPQLKTPGPPGSLEMGPLTIRDVTVEFSLEEWHCLDTAQQNLYRDVMLENYRNLVFLGIAVSKPDLITCLEQGKEPCNMKRHEMVAKPPVMCSHIAEDLCPERDIKYFFQKVILRRYDKCEHENLQLRKGCKSVDECKVCKGGYNGLNQCLITTQSKMYQCDKYVKVFYKFSNSDRHKIRHTEKKTCKCKECGKAFNQSSALTRHKMTHTGEKPYKCEECGKAFNRSSHLTQHKVIHTREKPYKCEECGKAFNRSSHITQHKRIHNREKPFKYDECCKAFKWSSALTTLTQHKRIHTGEKPYKCEECGKAFNQSSALTRHKMIHTGEKPFQCEECGKAFNRSSHLTQHKIIHTKEKPYKCEECGKAFNRSSHLTKHKRIHTREKAYKCDEYCKAFNWSSALTTLTQHKIIHTGEKPYKCEECGKAFNRSSYLIRHKIIHTGEKPYKCEECGKAFNQSSHLTQHKIIHTGEKPYKCEECGKAFNRSSHLSQHKIIHTGEKPYKCEECGKPFNRFSYLTVHKRIHAGENPNKYEECGKACNHSSNLTKHNS

SEQ ID NO: 875534 - protein, 503 aa, Homo sapiens
MLENYRNLVFLGIAVSKPDLITCLEQGKEPCNMKRHEMVAKPPVMCSHIAEDLCPERDIKYFFQKVILRRYDKCEHENLQLRKGCKSVDECKVCKGGYNGLNQCLITTQSKMYQCDKYVKVFYKFSNSDRHKIRHTEKKTCKCKECGKAFNQSSALTRHKMTHTGEKPYKCEECGKAFNRSSHLTQHKVIHTREKPYKCEECGKAFNRSSHITQHKRIHNREKPFKYDECCKAFKWSSALTTLTQHKRIHTGEKPYKCEECGKAFNQSSALTRHKMIHTGEKPFQCEECGKAFNRSSHLTQHKIIHTKEKPYKCEECGKAFNRSSHLTKHKRIHTREKAYKCDEYCKAFNWSSALTTLTQHKIIHTGEKPYKCEECGKAFNRSSYLIRHKIIHTGEKPYKCEECGKAFNQSSHLTQHKIIHTGEKPYKCEECGKAFNRSSHLSQHKIIHTGEKPYKCEECGKPFNRFSYLTVHKRIHAGENPNKYEECGKACNHSSNLTKHNS

SEQ ID NO: 875535 - protein, 136 aa, Homo sapiens
MQPLHWRRIFICQVAGPLASLILLNPARTYLQGAHFPRRASLEGGASQNAEDSGLLRLRSDAPQPWDQCPSPACQFPFSLHHEHKFGWELSLFIHFILSSHSVPGPDLCTAKRAGNSKTLSSHRGPWRMNAGGGHG

SEQ ID NO: 875536 - protein, 69 aa, Homo sapiens
MGMALELYWLCGFRSYWPLGTNAENEGNRKENRRQMQSRNERGCNVRQTKTYRDREADRHIHGIACLLF

SEQ ID NO: 875537 - protein, 129 aa, Homo sapiens
LPTGWGHKRRTIPAWVPASRPSELAVIGGGRSGWTGSAKLLRSPQDLRPAATEGTCSQGGEAAGAQAGLDVERRVSSIGAAVGPILAGQRAREGWGKARESPGGVPPFAGWSLAPVPRSHSSPVEPTRG

SEQ ID NO: 875538 - protein, 101 aa, Homo sapiens
ENKIILFFIEGFTNLRVILARGQCQSLSSSNFSICAAKVSTKTNFIKEVKTRFLLFVFFLLSLLQLSHRLCCAFGPEQKNLRLTQHAYNQHLCGGIPSSTL

SEQ ID NO: 875539 - protein, 114 aa, Homo sapiens
RPCRGLPPRCLPPFPAPLHRGLPSSPLTSGQQQSPTGRGGAGSLHLTPLLPPQATQKVGVEDSSAAAWRLTEQGTVPHTLGASGAGCHVASASRKSERTLWPLEQSWSFFGFFP

SEQ ID NO: 875540 - protein, 96 aa, Homo sapiens
VLTTRRPPRCNTPPSATAWTMMPVQRPSRDNDAQGNSLEPQLSPSTSKTLRECMLPGVQGKWCGLFIHQQENVTCIHWMQQQRQKASLKILNLPFH

SEQ ID NO: 875541 - protein, 376 aa, Homo sapiens
MHLLKVGTWRNNTASSWLMKFSVLWLVSQNCCRASVVWMAYMNISFHVGNHVLSELGETGVFGRSSTLKRVAGVIVPPEGKIQNACNPNTIFSRSKYSETWLALIERGGCTFTQKIKVATEKGASGVIIYNVPGTGNQVFPMFHQAFEDVVLVMIGNLKGTEIFHLIKKGVLITAVVEVGRKHIIWMNHYLVSFVIVTTATLAYFIFYHIHRLCLARIQNRRWQRLTTDLQNTFGQLQLRVVKEGDEEINPNGDSCVICFERYKPNDIVRILTCKHFFHKNCIDPWILPHGTCPICKCDILKVLGIQVVVENGTEPLQVLMSNELPETLSPSEEETNNEVSPAGTSDKVIHVEENPTSQNNDIQPHSVVEDVHPSP

SEQ ID NO: 875542 - protein, 109 aa, Homo sapiens
LRPDPTVSAQCCFCHCLKQGVVRQAEKSILSLLENSFKKALIHCCSSPVHTGTCEALGVRGKNKEGETPQRRRLFLLEEVGELSLCPLYATRSKRKEHPFNPYSRSWVE

SEQ ID NO: 875543 - protein, 136 aa, Homo sapiens
MDYRLKCKTQNLKILEENLGSTMQDIGIGKDFMMKTPKAIATKANMDKWDLIILKSFCTAKETNRANRQPTEWEKIFAICASEKGLKSSIYKELNKFKRKKKQPIKRWAKDMNRHFSKEDIHGANEHIILYIHCWI

SEQ ID NO: 875544 - protein, 149 aa, Homo sapiens
DIEDVTPVFPQLSRSIISKLLNESETKVQKTEVEDADMLESEECEASKGYYLTKALTGHNMSEALVTEAENMKCLQFSKDVIISDTKDYFMSKTLGIGRLKRPSFLDDPLYGISVSLSSEDQHLKLSSPENTIADEQETKDAAEECKEP

SEQ ID NO: 875545 - protein, 166 aa, Homo sapiens
PCGWLSLENFPCIPGGTCPCLSIPCKRSRSRGLQAFTPRFTCVFPCPSCLCRCRCRHLKRRIFPTPLGAPPLPLHPFRADPPGSAPGSSALSFPPDKSWGGGARRRATSHFCQRRETRVRGAPIRGLCKSTELRNKAASARRDAAPTEPPSAPALAVPAQPPASGR

SEQ ID NO: 875546 - protein, 107 aa, Homo sapiens
MAGEQQSSSLGPGLTNQCPCPEVLGSALLLSSGAGHMATWEGLGRRHIPSVTKSSGAQVPFWAPLRVFGKVQNELGWWRIQEVWPVPPCALRSRGHWREGWVARRST

SEQ ID NO: 875547 - protein, 152 aa, Homo sapiens
MGNLCGCIQGDSKKPSKKHVKRKPYSTTKVTSGSTFNENTRRYAVHTNQCRRPHGSRVKKKRYPQEDDFHHTVFSNLERLDKLQPTLEASEESLVHKDRGDGERPVNARVVQVAPLRLESTPHEDTVHDITNEDATHDIANEDTVHDIANEA

SEQ ID NO: 875548 - protein, 109 aa, Homo sapiens
MLSVSLVFRGAHIDVRNKKGNTPLWLAANGGHLDVVQLLVQAGADVDAADNRKITPLMAAFRKGHVKVVRYLVKEVNQFPSDSECMRYIATITDKVICCSLYEQGTLFG

SEQ ID NO: 875549 - protein, 1408 aa, Homo sapiens
MEAYVLEDILEVESFILDQDDLENPMLETASKLLLSGTADGADLRTVDPETQARLEALLEAAGIGKLSTADGKAFADPEVLRRLTSSVSCALDEAAAALTRMRAESTANAGQSDNRSLAEACSEGDVNAVRKLLIEGRSVNEHTEEGESLLCLACSAGYYELAQVLLAMHANVEDRGIKGDITPLMAAANGGHVKIVKLLLAHKADVNAQSSTGNTALTYACAGGYVDVVKVLLESGASIEDHNENGHTPLMEAGSAGHVEVARLLLENGAGINTHSNEFKESALTLACYKGHLEMVRFLLEAGADQEHKTDEMHTALMEACMDGHVEVARLLLDSGAQVNMPADSFESPLTLAACGGHVELAALLIERGASLEEVNDEGYTPLMEAAREGHEEMVALLLGQGANINAQTEETQETALTLACCGGFLEVADFLIKAGADIELGCSTPLMEAAQEGHLELVKYLLAAGANVHATTATGDTALTYACENGHTDVADVLLQAGADLEHESEGGRTPLMKAARAGHVCTVQFLISKGANVNRTTANNDHTVLSLACAGGHLAVVELLLAHGADPTHRLKDGSTMLIEAAKGGHTSVVCYLLDYPNNLLSAPPPDVTQLTPPSHDLNRAPRVPVQALPMVVPPQEPDKPPANVATTLPIRNKAASKQKSSSHLPANSQDVQGYITNQSPESIVEEAQGKLTELEQRIKEAIEKNAQLQSLELAHADQLTKEKIEELNKTREEQIQKKQKILEELQKVERELQLKTQQQLKKQYLEVKAQRIQLQQQQQQSCQHLGLLTPVGVGEQLSEGDYARLQQVDPVLLKDEPQQTAAQMGFAPIQPLRCLKLCLWRQVPCLQGPSQILQNPSPIISPSAMLPIYPAIDIDAQTESNHDTALTLACAGGHEELVQTLLERGASIEHRDKKGFTPLILAATAGHVGVVEILLDNGADIEAQSERTKDTPLSLACSGGRQEVVELLLARGANKEHRNVSDYTPLSLAASGGYVNIIKILLNAGAEINSRTGSKLGISPLMLAAMNGHTAAVKLLLDMGSDINAQIETNRNTALTLACFQGRTEVVSLLLDRKANVEHRAKTGLTPLMEAASGGYAEVGRVLLDKGADVNAPPVPSSRDTALTIAADKGHYKFCELLIGRGAHIDVRNKKGNTPLWLAANGGHLDVVQLLVQAGADVDAADNRKITPLMAAFRKGHVKVVRYLVKEVNQFPSDSECMRYIATITDKEMLKKCHLCMESIVQAKDRQAAEANKNASILLEELDLEKLREESRRLALAAKREKRKEKRRKKKEEQRRKLEEIEAKNKENFELQAAQEKEKLKVEDEPEVLTEPPSATTTTTIGISATWTTLAGSHGKRNNTITTTSSKRKNRKNKITPENVQIIFDDPLPISYSQPETVPGESKS

SEQ ID NO: 875550 - protein, 1354 aa, Homo sapiens
MEKATVPVAAATAAEGEGSPPAVAAVAGPPAAAEVGGGVGGSSRARSASSPRGMVRVCDLLLKKKPPQQQHHKAKRNRTCRPPSSSESSSDSDNSGGGGGGGGGGGGGGGTSSNNSEEEEDDDDEEEEVSEVESFILDQDDLENPMLETASKLLLSGTADGADLRTVDPETQARLEALLEAAGIGKLSTADGKAFADPEVLRRLTSSVSCALDEAAAALTRMRAESTANAGQSDNRSLAEACSEGDVNAVRKLLIEGRSVNEHTEEGESLLCLACSAGYYELAQVLLAMHANVEDRGIKGDITPLMAAANGGHVKIVKLLLAHKADVNAQSSTGNTALTYACAGGYVDVVKVLLESGASIEDHNENGHTPLMEAGSAGHVEVARLLLENGAGINTHSNEFKESALTLACYKGHLEMVRFLLEAGADQEHKTDEMHTALMEACMDGHVEVARLLLDSGAQVNMPADSFESPLTLAACGGHVELAALLIERGASLEEVNDEGYTPLMEAAREGHEEMVALLLGQGANINAQTEETQETALTLACCGGFLEVADFLIKAGADIELGCSTPLMEAAQEGHLELVKYLLAAGANVHATTATGDTALTYACENGHTDVADVLLQAGADLEHESEGGRTPLMKAARAGHVCTVQFLISKGANVNRTTANNDHTVLSLACAGGHLAVVELLLAHGADPTHRLKDGSTMLIEAAKGGHTSVVCYLLDYPNNLLSAPPPDVTQLTPPSHDLNRAPRVPVQALPMVVPPQEPDKPPANVATTLPIRNKAVSGRASAMSNTPTHSIAASISQPQTPTPSPIISPSAMLPIYPAIDIDAQTESNHDTALTLACAGGHEELVQTLLERGASIEHRDKKGFTPLILAATAGHVGVVEILLDNGADIEAQSERTKDTPLSLACSGGRQEVVELLLARGANKEHRNVSDYTPLSLAASGGYVNIIKILLNAGAEINSRTGSKLGISPLMLAAMNGHTAAVKLLLDMGSDINAQIETNRNTALTLACFQGRTEVVSLLLDRKANVEHRAKTGLTPLMEAASGGYAEVGRVLLDKGADVNAPPVPSSRDTALTIAADKGHYKFCELLIGRGAHIDVRNKKGNTPLWLAANGGHLDVVQLLVQAGADVDAADNRKITPLMAAFRKGHVKVVRYLVKEVNQFPSDSECMRYIATITDKEMLKKCHLCMESIVQAKDRQAAEANKNASILLEELDLEKLREESRRLALAAKREKRKEKRRKKKEEQRRKLEEIEAKNKENFELQAAQEKEKLKVEDEPEVLTEPPSATTTTTIGISATWTTLAGSHGKRNNTITTTSSKRKNRKNKITPENVQIIFDDPLPISYSQPETVPGESKS

SEQ ID NO: 875551 - protein, 1458 aa, Homo sapiens
MEKATVPVAAATAAEGEGSPPAVAAVAGPPAAAEVGGGVGGSSRARSASSPRGMVRVCDLLLKKKPPQQQHHKAKRNRTCRPPSSSESSSDSDNSGGGGGGGGGGGGGGGTSSNNSEEEEDDDDEEEEVSEVESFILDQDDLENPMLETASKLLLSGTADGADLRTVDPETQARLEALLEAAGIGKLSTADGKAFADPEVLRRLTSSVSCALDEAAAALTRMRAESTANAGQSDNRSLAEACSEGDVNAVRKLLIEGRSVNEHTEEGESLLCLACSAGYYELAQVLLAMHANVEDRGIKGDITPLMAAANGGHVKIVKLLLAHKADVNAQSSTGNTALTYACAGGYVDVVKVLLESGASIEDHNENGHTPLMEAGSAGHVEVARLLLENGAGINTHSNEFKESALTLACYKGHLEMVRFLLEAGADQEHKTDEMHTALMEACMDGHVEVARLLLDSGAQVNMPADSFESPLTLAACGGHVELAALLIERGASLEEVNDEGYTPLMEAAREGHEEMVALLLGQGANINAQTEETQETALTLACCGGFLEVADFLIKAGADIELGCSTPLMEAAQEGHLELVKYLLAAGANVHATTATGDTALTYACENGHTDVADVLLQAGADLEHESEGGRTPLMKAARAGHVCTVQFLISKGANVNRTTANNDHTVLSLACAGGHLAVVELLLAHGADPTHRLKDGSTMLIEAAKGGHTSVVCYLLDYPNNLLSAPPPDVTQLTPPSHDLNRAPRVPVQALPMVVPPQEPDKPPANVATTLPIRNKAASKQKSSSHLPANSQDVQGYITNQSPESIVEEAQGKLTELEQRIKEAIEKNAQLQSLELAHADQLTKEKIEELNKTREEQIQKKQKILEELQKVERELQLKTQQQLKKQYLEVKAQRIQLQQQQQQSCQHLGLLTPVGVGEQLSEGDYARLQQVDPVLLKDEPQQTAAQMGFAPIQPLAMPQALPLAAGPLPPGSIANLTELQGVIVGQPVLGQAQLAGLGQGILTETQQGLMVASPAQTLNDTLDDIMAAVSGRASAMSNTPTHSIAASISQPQTPTPSPIISPSAMLPIYPAIDIDAQTESNHDTALTLACAGGHEELVQTLLERGASIEHRDKKGFTPLILAATAGHVGVVEILLDNGADIEAQSERTKDTPLSLACSGGRQEVVELLLARGANKEHRNVSDYTPLSLAASGGYVNIIKILLNAGAEINSRTGSKLGISPLMLAAMNGHTAAVKLLLDMGSDINAQIETNRNTALTLACFQGRTEVVSLLLDRKANVEHRAKTGLTPLMEAASGGYAEVGRVLLDKGADVNAPPVPSSRDTALTIAADKGHYKFCELLIGRGAHIDVRNKKGNTPLWLAANGGHLDVVQLLVQAGADVDAADNRKITPLMAAFRKGHVKVVRYLVKEVNQFPSDSECMRYIATITDKGKKVGGWLWLRKEKKEKRREGRKRKNKEGN

SEQ ID NO: 875552 - protein, 307 aa, Homo sapiens
VDSEIPQVADILCSSGCGTWRFCQDFRLIFNFKAFLFLELLIGRGAHIDVRNKKGNTPLWLAANGGHLDVVQLLVQAGADVDAADNRKITPLMAAFRKGHVKVVRYLVKEVNQFPSDSECMRYIATITDKEMLKKCHLCMESIVQAKDRQAAEANKNASILLEELDLEKLREESRRLALAAKREKRKEKRRKKKEEQRRKLEEIEAKNKENFELQAAQEKEKLKVEDEPEVLTEPPSATTTTTIGISATWTTLAGSHGKRNNTITTTSSKRKNRKNKITPENVQIIFDDPLPISYSQPETVPGESKS

SEQ ID NO: 875553 - protein, 1605 aa, Homo sapiens
MEKATVPVAAATAAEGEGSPPAVAAVAGPPAAAEVGGGVGGSSRARSASSPRGMVRVCDLLLKKKPPQQQHHKAKRNRTCRPPSSSESSSDSDNSGGGGGGGGGGGGGGGTSSNNSEEEEDDDDEEEEVSEVESFILDQDDLENPMLETASKLLLSGTADGADLRTVDPETQARLEALLEAAGIGKLSTADGKAFADPEVLRRLTSSVSCALDEAAAALTRMRAESTANAGQSDNRSLAEACSEGDVNAVRKLLIEGRSVNEHTEEGESLLCLACSAGYYELAQVLLAMHANVEDRGIKGDITPLMAAANGGHVKIVKLLLAHKADVNAQSSTGNTALTYACAGGYVDVVKVLLESGASIEDHNENGHTPLMEAGSAGHVEVARLLLENGAGINTHSNEFKESALTLACYKGHLEMVRFLLEAGADQEHKTDEMHTALMEACMDGHVEVARLLLDSGAQVNMPADSFESPLTLAACGGHVELAALLIERGASLEEVNDEGYTPLMEAAREGHEEMVALLLGQGANINAQTEETQETALTLACCGGFLEVADFLIKAGADIELGCSTPLMEAAQEGHLELVKYLLAAGANVHATTATGDTALTYACENGHTDVADVLLQAGADLEHESEGGRTPLMKAARAGHVCTVQFLISKGANVNRTTANNDHTVLSLACAGGHLAVVELLLAHGADPTHRLKDGSTMLIEAAKGGHTSVVCYLLDYPNNLLSAPPPDVTQLTPPSHDLNRAPRVPVQALPMVVPPQEPDKPPANVATTLPIRNKAASKQKSSSHLPANSQDVQGYITNQSPESIVEEAQGKLTELEQRIKEAIEKNAQLQSLELAHADQLTKEKIEELNKTREEQIQKKQKILEELQKVERELQLKTQQQLKKQYLEVKAQRIQLQQQQQQSCQHLGLLTPVGVGEQLSEGDYARLQQVDPVLLKDEPQQTAAQMGFAPIQPLAMPQALPLAAGPLPPGSIANLTELQGVIVGQPVLGQAQLAGLGQGILTETQQGLMVASPAQTLNDTLDDIMAAVSGRASAMSNTPTHSIAASISQPQTPTPSPIISPSAMLPIYPAIDIDAQTESNHDTALTLACAGGHEELVQTLLERGASIEHRDKKGFTPLILAATAGHVGVVEILLDNGADIEAQSERTKDTPLSLACSGGRQEVVELLLARGANKEHRNVSDYTPLSLAASGGYVNIIKILLNAGAEINSRTGSKLGISPLMLAAMNGHTAAVKLLLDMGSDINAQIETNRNTALTLACFQGRTEVVSLLLDRKANVEHRAKTGLTPLMEAASGGYAEVGRVLLDKGADVNAPPVPSSRDTALTIAADKGHYKFCELLIGRGAHIDVRNKKGNTPLWLAANGGHLDVVQLLVQAGADVDAADNRKITPLMAAFRKGHVKVVRYLVKEVNQFPSDSECMRYIATITDKEMLKKCHLCMESIVQAKDRQAAEANKNASILLEELDLEKLREESRRLALAAKREKRKEKRRKKKEEQRRKLEEIEAKNKENFELQAAQEKEKLKVEDEPEVLTEPPSATTTTTIGISATWTTLAGSHGKRNNTITTTSSKRKNRKNKITPENVQIIFDDPLPISYSQPETVPGESKS

SEQ ID NO: 875554 - protein, 1528 aa, Homo sapiens
MEKATVPVAAATAAEGEGSPPAVAAVAGPPAAAEVGGGVGGSSRARSASSPRGMVRVCDLLLKKKPPQQQHHKAKRNRTCRPPSSSESSSDSDNSGGGGGGGGGGGGGGGTSSNNSEEEEDDDDEEEEVSEVESFILDQDDLENPMLETASKLLLSGTADGADLRTVDPETQARLEALLEAAGIGKLSTADGKAFADPEVLRRLTSSVSCALDEAAAALTRMRAESTANAGQSDNRSLAEACSEGDVNAVRKLLIEGRSVNEHTEEGESLLCLACSAGYYELAQVLLAMHANVEDRGIKGDITPLMAAANGGHVKIVKLLLAHKADVNAQSSTGNTALTYACAGGYVDVVKVLLESGASIEDHNENGHTPLMEAGSAGHVEVARLLLENGAGINTHSNEFKESALTLACYKGHLEMVRFLLEAGADQEHKTDEMHTALMEACMDGHVEVARLLLDSGAQVNMPADSFESPLTLAACGGHVELAALLIERGASLEEVNDEGYTPLMEAAREGHEEMVALLLGQGANINAQTEETQETALTLACCGGFLEVADFLIKAGADIELGCSTPLMEAAQEGHLELVKYLLAAGANVHATTATGDTALTYACENGHTDVADVLLQAGADLEHESEGGRTPLMKAARAGHVCTVQFLISKGANVNRTTANNDHTVLSLACAGGHLAVVELLLAHGADPTHRLKDGSTMLIEAAKGGHTSVVCYLLDYPNNLLSAPPPDVTQLTPPSHDLNRAPRVPVQALPMVVPPQEPDKPPANVATTLPIRNKAASKQKSSSHLPANSQDVQGYITNQSPESIVEEAQGKLTELEQRIKEAIEKNAQLQSLELAHADQLTKEKIEELNKTREEQIQKKQKILEELQKVERELQLKTQQQLKKQYLEVKAQRIQLQQQQQQSCQHLGLLTPVGVGEQLSEGDYARLQQVDPVLLKDEPQQTAAQMGFAPIQPLRCLKLCLWRQVPCLQGPSQILQNPSPIISPSAMLPIYPAIDIDAQTESNHDTALTLACAGGHEELVQTLLERGASIEHRDKKGFTPLILAATAGHVGVVEILLDNGADIEAQSERTKDTPLSLACSGGRQEVVELLLARGANKEHRNVSDYTPLSLAASGGYVNIIKILLNAGAEINSRTGSKLGISPLMLAAMNGHTAAVKLLLDMGSDINAQIETNRNTALTLACFQGRTEVVSLLLDRKANVEHRAKTGLTPLMEAASGGYAEVGRVLLDKGADVNAPPVPSSRDTALTIAADKGHYKFCELLIGRGAHIDVRNKKGNTPLWLAANGGHLDVVQLLVQAGADVDAADNRKITPLMAAFRKGHVKVVRYLVKEVNQFPSDSECMRYIATITDKEMLKKCHLCMESIVQAKDRQAAEANKNASILLEELDLEKLREESRRLALAAKREKRKEKRRKKKEEQRRKLEEIEAKNKENFELQAAQEKEKLKVEDEPEVLTEPPSATTTTTIGISATWTTLAGSHGKRNNTITTTSSKRKNRKNKITPENVQIIFDDPLPISYSQPETVPGESKS

SEQ ID NO: 875555 - protein, 1442 aa, Homo sapiens
MEKATVPVAAATAAEGEGSPPAVAAVAGPPAAAEVGGGVGGSSRARSASSPRGMVRVCDLLLKKKPPQQQHHKAKRNRTCRPPSSSESSSDSDNSGGGGGGGGGGGGGGGTSSNNSEEEEDDDDEEEEVSEVESFILDQDDLENPMLETASKLLLSGTADGADLRTVDPETQARLEALLEAAGIGKLSTADGKAFADPEVLRRLTSSVSCALDEAAAALTRMRAESTANAGQSDNRSLAEACSEGDVNAVRKLLIEGRSVNEHTEEGESLLCLACSAGYYELAQVLLAMHANVEDRGIKGDITPLMAAANGGHVKIVKLLLAHKADVNAQSSTGNTALTYACAGGYVDVVKVLLESGASIEDHNENGHTPLMEAGSAGHVEVARLLLENGAGINTHSNEFKESALTLACYKGHLEMVRFLLEAGADQEHKTDEMHTALMEACMDGHVEVARLLLDSGAQVNMPADSFESPLTLAACGGHVELAALLIERGASLEEVNDEGYTPLMEAAREGHEEMVALLLGQGANINAQTEETQETALTLACCGGFLEVADFLIKAGADIELGCSTPLMEAAQEGHLELVKYLLAAGANVHATTATGDTALTYACENGHTDVADVLLQAGADLEHESEGGRTPLMKAARAGHVCTVQFLISKGANVNRTTANNDHTVLSLACAGGHLAVVELLLAHGADPTHRLKDGSTMLIEAAKGGHTSVVCYLLDYPNNLLSAPPPDVTQLTPPSHDLNRAPRVPVQALPMVVPPQEPDKPPANVATTLPIRNKAASKQKSSSHLPANSQDVQGYITNQSPESIVEEAQGKLTELEQRIKEAIEKNAQLQSLELAHADQLTKEKIEELNKTREEQIQKKQKILEELQKVERELQLKTQQQLKKQYLEVKAQRIQLQQQQQQSCQHLGLLTPVGVGEQLSEGDYARLQQVDPVLLKDEPQQTAAQMGFAPIQPLAMPQALPLAAGPLPPGSIANLTELQGVIVGQPVLGQAQLAGLGQGILTETQQGLMVASPAQTLNDTLDDIMAAVSGRASAMSNTPTHSIAASISQPQTPTPSPIISPSAMLPIYPAIDIDAQTESNHDTALTLACAGGHEELVQTLLERGASIEHRDKKGFTPLILAATAGHVGVVEILLDNGADIEAQSERTKDTPLSLACSGGRQEVVELLLARGANKEHRNVSDYTPLSLAASGGYVNIIKILLNAGAEINSRTGSKLGISPLMLAAMNGHTAAVKLLLDMGSDINAQIETNRNTALTLACFQGRTEVVSLLLDRKANVEHRAKTGLTPLMEAASGGYAEVGRVLLDKGADVNAPPVPSSRDTALTIAADKGHYKFCELLIGRGAHIDVRNKKGNTPLWLAANGGHLDVVQLLVQAGADVDAADNRKITPLMAAFRKGHVKVVRYLVKEVNQFPSDSECMRYIATITDKVICCSLYEQGTLFG

SEQ ID NO: 875556 - protein, 727 aa, Homo sapiens
MCGFQPDTVFSPQLRILLACVDKHFVGSVFQGTICDNTPGSWDISRDPNSSFYFTSLSYLYTNVVPLFALLPAGTDSNGFPSPWALVGAFVWLSFEILKDAVKGWAWLPSPNRCSGPVYVELGSCPPPTSVLLCSPSLTLSKYSKASALVSEACPLAFPLIPVAGFAFSGHQYIVGHETPLQKLHFLPLVACLHLSSVSPCFITSYTCPSRDRQPGLGSPGSPLGPSNSNSTGNSWDLLSTDSAAGSVELSMPVPSYHPHSPSMRWVQLFSDEKMAQEAGEVTVRNECWQLSPWTHRSAGPCSTGITLVRHLFMRPPRVWWSFVSFHLLPSTSWVIRAGEPRPHTVLLPDARHSLTPQQGLQSPKQMSLGVEAAGPPIPGVYCFALVIHPHCNLPSCHPNSAFGSLTPPRLAQSRAWRGLTGHSPCVLLPVSLHRDFFECLFFRPLAYIFSRLLIKYLKIIHKEPRNCLENQFLSSVVSNYMSSCCKKFPFFNAGASCGGFHGFPRPRPPGLGWLLAAHPRAPPGAVSVRVSGWSLKFLFLLGAFLLNKNDIVTKKSTAIEIWKVKASLPDLQSHLLEVNVVPSFICSFILLFIGKYFLSIFDSPGMMLGSEHTAVNNTATSSLCLLDILVRFNRSKAGLLDSFELQKWLRLAENPLRRCPTGLNKSSKNLNQDSNFRNERMRGALYGFLKECCNPTACVSYVLIQSDFITLFAFLFFTNLINNYWL

SEQ ID NO: 875557 - protein, 74 aa, Homo sapiens
HEIPFMLIRVIGNLSSSASREPNLTQVLRLGNGISISSSLQYSQSRKGKRKGVLVPGDVKVGSSYCCASKSHVD

SEQ ID NO: 875558 - protein, 68 aa, Homo sapiens
HYSDIHTTEDVSDELGNLDDIRQMSGLSVHPPAGGKSTKNSIGIFRIFTGSRKNTKETYYQKHWCKLF

SEQ ID NO: 875559 - protein, 71 aa, Homo sapiens
TDPVLTCITPMMASQRGFRSPVGLPHQRGLLTSRATNVDTIPSGTTYFCIPSTVLRSQGGPSKLWNNQTRD

SEQ ID NO: 875560 - protein, 109 aa, Homo sapiens
MERLCLQPGLLPTAVYLPHWERSSRDREEKEAPFFRLLSRRLMFCVHARQRTQNVPINKYQRLVVKMKEEEALREKLNMQNITHKENQNAGSLEMIDNMLKQEERRELK

SEQ ID NO: 875561 - protein, 226 aa, Homo sapiens
MSSLEISSSCFSLETKLPLSPPLVEDSAFEPSRKDMDEVEEKSKDVINFTAEKLSVDEVSQLVISPLCGAISLFVGTTRNNFEGKKVISLEYEAYLPMAENEVRKICSDIRQKWPVKHIAVFHRLGLVPVSEASIIIAVSSAHRAASLEAVSYAIDTLKAKVPIWKKEYWRVSWEGHKGFGFQGNTFLSMGLLVPFLPLGFPSEVWPSFGRGKQRGGSTGGERRPS

SEQ ID NO: 875562 - protein, 206 aa, Homo sapiens
MSSLEISSSCFSLETKLPLSPPLVEDSAFEPSRKDMDEVEEKSKDVINFTAEKLSVDEVSQLVISPLCGAISLFVGTTRNNFEGKKVISLEYEAYLPMAENEVRKICSDIRQKWPVKHIAVFHRLGLVPVSEASIIIAVSSAHRAASLEAVSYAIDTLKAKVPIWKKEIYEESSTWKGKQRVLLGIQQLITYVLEHAILTLLNYYY

SEQ ID NO: 875563 - protein, 210 aa, Homo sapiens
MSSLEISSSCFSLETKLPLSPPLVEDSAFEPSRKDMDEVEEKSKDVINFTAEKLSVDEVSQLVISPLCGAISLFVGTTRNNFEGKKVISLEYEAYLPMAENEVRKICSDIRQKWPVKHIAVFHRLGLVPVSEASIIIAVSSAHRAASLEAVSYAIDTLKAKVPIWKKEIYEESSTWKGKQRVLLGIQQLITYVFRACNLNFVKLLLLITF

SEQ ID NO: 875564 - protein, 109 aa, Homo sapiens
ERCPFGQAGGLMGVPGEGVWLPAQDASQPCQGPVQRAGPHLCCSGRVVAARSVVLPCLGARFHSAHEYAVWEAPLLSLGRTNVAPLLMPDFSCWCSDGARGLGNLELAC

SEQ ID NO: 875565 - protein, 124 aa, Homo sapiens
MDSRAGGRPFGVFWGEGRGKEGSWTPGRALSNLSRWPSLLFPPNPSPLPSSSLPPPTRERWVACCLGQGAGVGVAEVGGMFSSAEHSSFGPGPVPRGKINSGQRLFSVGLHFRSPRTLCILDVG

SEQ ID NO: 875566 - protein, 48 aa, Homo sapiens
MTPSHSSLGARSEWRSRHCTPTQEAELAVSGDHAIALQPGRQGETGVS

SEQ ID NO: 875567 - protein, 165 aa, Homo sapiens
MQRCGYSRCLTYVPPAVHRRPLTLGLHGAESGTPLPQAPQSPRGLGAFSEATRRTSVPGGGWFSPLSRGPPSVAAGCSGGERYPQLAPGVPGGRIGVCRGPCDQEATVPSAAAPRPPRPQATRGNLAATPVPQVSLAGRAVPTGQGRQRAAACSAPADSAPAAPS

SEQ ID NO: 875568 - protein, 111 aa, Homo sapiens
MSAVMGKAESFCKYFSSFFGSVLVARRTCSFPTARSVVDPAAISPELCRRRCPRGRGSVRARGGGTGSLGWPVLAARSPGGDLGMWSHSLERAGSSEQRATWSGTPVLADS

SEQ ID NO: 875569 - protein, 123 aa, Homo sapiens
VSLEQNIPWSIRQVYQTQRRSTFNSLCPEPMSSFPKTRSSCAPSCMMKGITDSTLPKRQPEHHPEPHSPASSPFTNLTSCTSCLLLAKSSAPKMKGYQGPPVPTPEGRMKPTLFLCLTFSMVQ

SEQ ID NO: 875570 - protein, 188 aa, Homo sapiens
PDDPSSNQYFAHSCYQNLWSSDVICNCLQGYTGTQCGECSTGFYGNPRISGAPCQPCACNNNIDVTDPESCSRVTGECLRCLHNTQGANCQLCKPGHYGSALNQTCRRCSCHASGVSPMECPPGGGACLCDPVTGACPCLPNVTGLACDRCADGYWNLVPGRGCQSCDCDPRTSQSSHCDQARYFKAY

SEQ ID NO: 875571 - protein, 339 aa, Homo sapiens
PDDPSSNQYFAHSCYQNLWSSDVICNCLQGYTGTQCGECSTGFYGNPRISGAPCQPCACNNNIDVTDPESCSRVTGECLRCLHNTQGANCQLCKPGHYGSALNQTCRRCSCHASGVSPMECPPGGGACLCDPVTGACPCLPNVTGLACDRCADGYWNLVPGRGCQSCDCDPRTSQSSHCDQLTGQCPCKLGYGGKRCSECQENYYGDPPGRCIPCDCNRAGTQKPICDPDTGMCRCREGVSGQRCDRCARGHSQEFPTCLQCHLCFDQWDHTISSLSKAVQGLMRLAANMEDKRETLPVCEADFKDLRGNVSEIERILKHPVFPSGKFLKVKDYHDSVR

SEQ ID NO: 875572 - protein, 75 aa, Homo sapiens
RSPARVPTRGVKGQRMKKLRLKEVHQIESEVGETAFNAYILMICVRAAGQAIQRKRWNYQDGIKDASKQRGYLKP

SEQ ID NO: 875573 - protein, 114 aa, Homo sapiens
HFNIQVDHGMLWAPVLYKDVGQELPVVSTAPSHIALLMETFTPDVLSRLMGRIQMKKLRLKEVHQIESEVGETAFNAYILMICVRAAGQAIQRKRWNYQDGIKDASKQRGYLKP

SEQ ID NO: 875574 - protein, 149 aa, Homo sapiens
MLLFDLAVAKPNPQGHPSWLAKQWFLSLLFFFYYALQKLYYNGNRSRFTTCISFQELVSTLGLRFCRIPLFGWELSPSFLSKHMAFFSVGTGWIGMDRGHYSQAGYSRQKEVGHVLERPKLQRVHFSRGGVCKIVRGHKGNSPQVLAKE

SEQ ID NO: 875575 - protein, 127 aa, Homo sapiens
MPPCKVPRENTCKLPISSELCSLPFTNLLKHSFVLYWILLKQHLGLRLFSRSFRWQWPSQAVNPGCVIPQLTLWPVCLLIVETWCFLILSCSRMEVHCLASVPRWRWAIYFTRFFSGLPAGSRASGR

SEQ ID NO: 875576 - protein, 124 aa, Homo sapiens
VTGRGVFHKSLARSSTRAAAGPQALRPFSRSSQADAPVSAPPSSAPTEALARERIAGPRWLSHIPGAPPPRTPRPRPPASPADPAALNADAQPLFFHSRPLPHSHGNPRCFPKLGAFSEFKIQA

SEQ ID NO: 875577 - protein, 165 aa, Homo sapiens
SQLNAPTGLSPVSIQSVEIKDSSFLLISILVSILNLETSCFYDISHLIFFIFYLRNMKKKYTKMVKLLHKSAPAQSDSCKCPFICCVCISRISVGSRSGYQYIMHRSVGCLKAKQENHMNPGSGGCNEPKSCHCILAWAQSKTPSQKTKWSSKVAHACNPSTLGG

SEQ ID NO: 875578 - protein, 35 aa, Homo sapiens
MERIQSLCAWIFRARYLPVGIPRSQGLGSESETFD

SEQ ID NO: 875579 - protein, 390 aa, Homo sapiens
SGGGVVSLVRMLSPRCGLAVVFFFFPRAARRLRTGCGMGSEAPASGCSGAVGSSQREAAASLVSSWEEQNRGGAPAGAGGGPTMAIRKKSTKSPPVLSHEFVLQNHADIVSCVAMVFLLGLMFEITAKASIIFVTLQYNVTLPATEEQATESVSLYYYGIKDLATVFFYMLVAIIIHAVIQEYMLDKINRRMHFSKTKHSKFNESGQLSAFYLFACVWGTFILISENYISDPTILWRAYPHNLMTFQMKFFYISQLAYWLHAFPELYFQKTKKEDIPRQLVYIGLYLFHIAGAYLLNLNHLGLVLLVLHYFVEFLFHISRLFYFSNEKYQKGFSLWAVLFVLGRLLTLILSVTKGRSSKKKEQKNWVLKWNIKLPNCLAESPRNKKEKSS

SEQ ID NO: 875580 - protein, 426 aa, Homo sapiens
SGGGVVSLVRMLSPRCGLAVVFFFFPRAARRLRTGCGMGSEAPASGCSGAVGSSQREAAASLVSSWEEQNRGGAPAGAGGGPTMAIRKKSTKSPPVLSHEFVLQNHADIVSCVAMVFLLGLMFEITAKASIIFVTLQYNVTLPATEEQATESVSLYYYGIKDLATVFFYMLVAIIIHAVIQEYMLDKINRRMHFSKTKHSKFNESGQLSAFYLFACVWGTFILISENYISDPTILWRAYPHNLMTFQMKFFYISQLAYWLHAFPELYFQKTKKEDIPRQLVYIGLYLFHIAGAYLLNLNHLGLVLLVLHYFVEFLFHISRLFYFSNEKYQKGFSLWAVLFVLGRLLTLILSVLTVGFGLARAENQKLDFSTGNFNVLAVRIAVLGIHLRYSGIYDVEISLIFTFERRKENFCFSGTKLLKEETNSY

SEQ ID NO: 875581 - protein, 367 aa, Homo sapiens
MEPSDMPAGYHCPLDSAPWDETRDPQSTELIPRRAISRSPTCARCRNHGVTAHLKGHKRLCLFQACECHKCVLILERRRVMAAQVALRRQQEAQLKKHLMRRGEASPKAPNHFRKGTTQPQVPSGKENIAPQPQTPHGAVLLAPTPPGKNSCGPLLLSHPPEASPLSWTPVPPGPWVPGHWLPPGFSMPPPVVCRLLYQEPAVSLPPFPGFDPGTSLQLPTHGPFTTCPGSHPVLTAPLSGEPQGPPSQPRTHSTLILQPCGTPDPLQLQPQASGASCLARTSGPSEWQLQQEAAEALVGLKDSSQAPRVTPSVPPNPAWISLLHPCGPPAPAGGRGFQPVGPCLRPSPAPSVALHIGRLGSISLLS

SEQ ID NO: 875582 - protein, 157 aa, Homo sapiens
GTRSYENRCPLLARDPLCSRSHPVLTAPLSGEPQGPPSQPRTHSTLILQPCGTPDPLQLQPQASGASCLARTSGPSEWQLQQEAAEALVGLKDSSQAPRVTPSVPPNPAWISLLHPCGPPAPAGGRGFQPVGPCLRPSPAPSVALHIGRLGSISLLS

SEQ ID NO: 875583 - protein, 114 aa, Homo sapiens
TPVEIASVFPSDLEAKSICWQAFIEHLLLCARGWGAQDEPGIGPAFNQPGPYAALAWHSHFHLLLLPATPTHHCLKQPTSTAGCLHCCFRVCWPVGPVCVVSWPRQELVLSSVP

SEQ ID NO: 875584 - protein, 86 aa, Homo sapiens
HTLGSSPEPRPGCSSFPCPVTHCVWLLDNQGELGRSFWTYSEQVDAGVPTAQKEKAKQNNAVFGPLLSFHHSIPHRHFSMVSLYAV

SEQ ID NO: 875585 - protein, 193 aa, Homo sapiens
MGVLIGRGHLATGGCEGRTSCERVDLHAEEGPGTDPSFTASEGTNLLAPRSQIPASRTGRQGVSVVEATQAVALCYGSPSERIQSLLFPREAELNELPQEIFLQYLGRVCVCVDRAVCRRTSMRRWQAPPVSPFRHPGKEADASQLFRVQAWLSRGFRPEGGRWLKLVLGLFEPLKELSGCIRNHPCAAGSSC

SEQ ID NO: 875586 - protein, 188 aa, Homo sapiens
MAHALVTFRDVAIDFSQKEWECLDTTQRKLYRDVMLENYNNLVSLGYSGSKPDVITLLEQGKEPCVVARDVTGRQCPGLLSRHKTKKLSSEKDIHEISLSKESIIEKSKTLRLKGSIFRNEWQNKSEFEGQQGLKERSISQKKIVSKKMSTDRKRPSFTLNQRIHNSEKSCDSHLVQHGKIDSDVKHD

SEQ ID NO: 875587 - protein, 101 aa, Homo sapiens
QAILPPRPPKVLGLQARATMPGQDSPFFLDNAWTHEAHRHPPSRVLGRHTCRWAHLAKVRQLGQHLTSVRLISSLGALQEPAVNWALKHPVCAFPGRFCDS

SEQ ID NO: 875588 - protein, 98 aa, Homo sapiens
RYLNLSPERMYSMLMSSFSPVVRNPVDCSVLTALSVPCLTLAHGSGAGSALLLLPITRGRNPLPAEGRGPQLLQPLVYPCSVDPYFWSCIQEQDHADN

SEQ ID NO: 875589 - protein, 122 aa, Homo sapiens
MDASHTTSSGSLFPLGHKHEGERKKTIIPREQVKEQSSTTRLNLSCLMNLYCSQFSCTQILQGHMEWWLPMEVARPQRCPPQLHLLPGDLHRCSLTLRGGRASAVSQLTLIQQLRYNCYVFI

SEQ ID NO: 875590 - protein, 79 aa, Homo sapiens
DMWNSTPKAAACGGALSSQAASWRSWHTCCRLRSSVGNASCGPSPPLEETRCSPQPPFIILIHRLRNVRSVSAPERLSD

SEQ ID NO: 875591 - protein, 123 aa, Homo sapiens
TGGRQLMRTTCVPWSCPTPVSLVFVVLLGNIFICKNGCFCTWLWLRASAHVKSFTSHLEEKRNTGKTLVIYCSQPRPSQNAVHCVHGVHGPSWKLAHSEIILSFLISKISKAFLRHILVLPLS

SEQ ID NO: 875592 - protein, 65 aa, Homo sapiens
SSTSFLSHTYLINKTRSTTRKVEEHSWFTCTGAKYFAIPLAERNTKRLTKRSTHAQLLRGKQDGS

SEQ ID NO: 875593 - protein, 89 aa, Homo sapiens
RAAGGVLPVDLERERAALCARQSGHGPPAVRWLLGSRGAESGGLARRRVAAEHAQPSANLVCRSALETSAFPPSKPKSPRGRVRGRSLQ

SEQ ID NO: 875594 - protein, 157 aa, Homo sapiens
ANSMREVASPSPELEAGRSVYLKMSWHRTIVWVHTSVNCPKESLLSCIMVSVLEPRDSQYIADRHSQESYTLCSWNNEAGEDGALLRTTEGLQPASNATLISATSLLPPALRLASKEAPSARSCEAARECRQVGGAPQSWRGRESPQGFVRLGVIKG

SEQ ID NO: 875595 - protein, 180 aa, Homo sapiens
RAAGGVLPVDLERERAALCARQSGHGPPAVRWLLGSRGAESGGLARRRVAAEHAQPSANLVCRSALETSAFPPSKPKSPRGRVRARSSDGRLRHPAWRAGSGGRGGRGPSAELASGYWGRRRALPGAADLRPKGARADDRRPLRAGRKLHLPEAARLPGNVGKSGEPHKAGEVGNHPRDS

SEQ ID NO: 875596 - protein, 185 aa, Homo sapiens
MRHSVARPTRLPRRLSPFWDPATCKNLEGGAGEVVRGRDPRRRRTSRSTEILGEDLAGPSAGAAARPAAPPPQPREPGAPGLRRAPPRTRMDSSGLGPCSEAPLHTSAGLSGRDLRAAGGVLPVDLERERAALCARQSGHGPPAVRWLLGSRGAESGGLARRRVAAEHAQPSANLVCRSALETSA

SEQ ID NO: 875597 - protein, 101 aa, Homo sapiens
TLWPWASMRATELPKMGASLAQPPPKWATDQAHQVHVGHYSKDVWLYSLRAGAPWSCSRFPRTNGPQVHQEESGGHVRTKMKREELSNALPAMKKVATKKD

SEQ ID NO: 875598 - protein, 118 aa, Homo sapiens
MVSTLDSEFSDQSSSLTGTFLYNSSEVPLYCSISRMGEIAQSWSQTLHATGCMQLESRTQRPARPLPSQGDPGPPGHRSPLKMLPPLNPRPRVFFCSRHWAIALCLFGRNDLYEKFYF

SEQ ID NO: 875599 - protein, 133 aa, Homo sapiens
DTLELQFLRLQNGILRDTHLALSQWVAVGAVGTAASTFLIWQTMLCATHRLLIWTRDNGAPSRPHSEPGHVTFSPTDLAQKRCATSSPRQRVLPDPSLFSGCSYSEASDSGLRQPGFLHWLGGGPSRGPFIRL

SEQ ID NO: 875600 - protein, 70 aa, Homo sapiens
GGFSPKPPSLVWPRKRAFKGYYSNYIGDRRDPRGYVTGKPFDSCSLISASSTGTIAETYGDKSEDSVSGI

SEQ ID NO: 875601 - protein, 418 aa, Homo sapiens
MYRPARVTSTSRFLNPYVVCFIVVAGVVILAVTIALLVYFLAFDQKSYFYRSSFQLLNVEYNSQLNSPATQEYRTLSGRIESLITKTFKESNLRNQFIRAHVAKLRQDGSGVRADVVMKFQFTRNNNGASMKSRIESVLRQMLNNSGNLEINPSTEITSLTDQAAANWLINECGAGPDLITLSEQRILGGTEAEEGSWPWQVSLRLNNAHHCGGSLINNMWILTAAHCFRSNSNPRDWIATSGISTTFPKLRMRVRNILIHNNYKSATHENDIALVRLENSVTFTKDIHSVCLPAATQNIPPGSTAYVTGWGAQEYAGHTVPELRQGQVRIISNDVCNAPHSYNGAILSGMLCAGVPQGGVDACQGDSGGPLVQEDSRRLWFIVGIVSWGDQCGLPDKPGVYTRVTAYLDWIRQQTGI

SEQ ID NO: 875602 - protein, 272 aa, Homo sapiens
MYRPARVTSTSRFLNPYVVCFIVVAGVVILAVTIALLVYFLAFDQKSYFYRSSFQLLNVEYNSQLNSPATQEYRTLSGRIESLITKTFKESNLRNQFIRAHVAKLRQDGSGVRADVVMKFQFTRNNNGASMKSRIESVLRQMLNNSGNLEINPSTEITSLTDQAAANWLINGHTVPELRQGQVRIISNDVCNAPHSYNGAILSGMLCAGVPQGGVDACQGDSGGPLVQEDSRRLWFIVGIVSWGDQCGLPDKPGVYTRVTAYLDWIRQQTGI

SEQ ID NO: 875603 - protein, 164 aa, Homo sapiens
MYRPARVTSTSRFLNPYVVCFIVVAGVVILAVTIALLVYFLAFDQKSYFYRSSFQLLNVEYNSQLNSPATQEYRTLSGRIESLITKTFKESNLRNQFIRAHVAKLRQDGSGVRADVVMKFQFTRNNNGASMKSRIESVLRQMLNNSGNLEINPSTEITCKYNFS

SEQ ID NO: 875604 - protein, 115 aa, Homo sapiens
RFLHFLSTPPKDCPSLPALDTNIISTSFSVLHNWSQPYFLFHTTDKCSKLQAAGAGAQHRRVALTGLRATQQASSSQSGLYTATTRELSKRTNNESPYQRFDGIDIEFDLGVRFF

SEQ ID NO: 875605 - protein, 48 aa, Homo sapiens
GVVLGKTSPFPGRGQAKLGLILDQCLLANTYATLKPSGFAISTLGALS

SEQ ID NO: 875606 - protein, 111 aa, Homo sapiens
KGATEAGRSESPFLSDLPSRKQQPSRSQQSPEAVIQLPLGQVQRAVIILSELHPNAHTPNLVLPRDNTSSRSSPVSSCTNRWCLRTACHREPSDQPCQPGAKGADKGSLSQ

SEQ ID NO: 875607 - protein, 102 aa, Homo sapiens
ELPSVCWNVMAVRRREEKWKRSVFIDPTEPCKKAPTTYMQSVHFKSNKQTKSVYQLLGEKMDYHSLQILLGKQKSATPVQREKFYICSTMGPQYNTVPSCIS

SEQ ID NO: 875608 - protein, 102 aa, Homo sapiens; identical to SEQ ID NO: 875607

SEQ ID NO: 875609 - protein, 127 aa, Homo sapiens
MGEGLVCLGYQGPLFIGRCLLFLCVAAFVSQDCHNKFITNLVAQHSTALFPSWDWAIIDSPIPGPQHSPGSWSFPLSPRIDILKDSALIPQLFHPSVLSSSAKAVIPGASCYLPQLRKEFPALSLLP

SEQ ID NO: 875610 - protein, 177 aa, Homo sapiens
VKLADFKNEAAGLTVSVTALFRNEAADTRSLRIHVKFLSWDFVVQIISSLRCKDDLSRNFHTAQVCTTELKSLKCREYILDLRVPLSSVFSKKAVSAMGSVVLASGYSPVLELINDLLYISYLIPETAKNKIRSSKTGIKGFIVPTASGYSPALELIKDLVYISYLTPETVKNKINK

SEQ ID NO: 875611 - protein, 770 aa, Homo sapiens
MLLKSLGEDVIFHPEGEFDSYEVTIPEKLSFRGEVQGVVSPVSYLLQLKGKKHVLHLWPKRLLLPRHLRVFSFTEHGELLEDHPYIPKDCNYMGSVKESLDSKATISTCMGGLRGVFNIDAKHYQIEPLKASPSFEHVVYLLKKEQFGNQVCGLSDDEIEWQMAPYENKARLRDFPGSYKHPKYLELILLFDQSRYRFVNNNLSQVIHDAILLTGIMDTYFQDVRMRIHLKALEVWTDFNKIRVGYPELAEVLGRFVIYKKSVLNARLSSDWAHLYLQRKYNDALAWSFGKVCSLEYAGSVSTLLDTNILAPATWSAHELGHAVGMSHDEQYCQCRGRLNCIMGSGRTGFSNCSYISFFKHISSGATCLNNIPGLGYVLKRCGNKIVEDNEECDCGSTEECQKDRCCQSNCKLQPGANCSIGLCCHDCRFRPSGYVCRQEGNECDLAEYCDGNSSSCPNDVYKQDGTPCKYEGRCFRKGCRSRYMQCQSIFGPDAMEAPSECYDAVNLIGDQFGNCEITGIRNFKKCESANSICGRLQCINVETIPDLPEHTTIISTHLQAENLMCWGTGYHLSMKPMGIPDLGMINDGTSCGEGRVCFKKNCVNSSVLQFDCLPEKCNTRGVCNNRKNCHCMYGWAPPFCEEVGYGGSIDSGPPGLLRGAIPSSIWVVSIIMFRLILLILSVVFVFFRQVIGNHLKPKQEKMPLSKAKTEQEESKTKTVQEESKTKTGQEESEAKTGQEESKAKTGQEESKANIESKRPKAKSVKKQKK

SEQ ID NO: 875612 - protein, 761 aa, Homo sapiens
MLLKSLGEDVIFHPEGEFDSYEVTIPEKLSFRGEVQGVVSPVSYLLQLKGKKHVLHLWPKRLLLPRHLRVFSFTEHGELLEDHPYIPKDCNYMGSVKESLDSKATISTCMGGLRGVFNIDAKHYQIEPLKASPSFEHVVYLLKKEQFGNQVCGLSDDEIEWQMAPYENKARLRDFPGSYKHPKYLELILLFDQSRYRFVNNNLSQVIHDAILLTGIMDTYFQDVRMRIHLKALEVWTDFNKIRVGYPELAEVLGRFVIYKKSVLNARLSSDWAHLYLQRKYNDALAWSFGKVCSLEYAGSVSTLLDTNILAPATWSAHELGHAVGMSHDEQYCQCRGRLNCIMGSGRTGFSNCSYISFFKHISSGATCLNNIPGLGYVLKRCGNKIVEDNEECDCGSTEECQKDRCCQSNCKLQPGANCSIGLCCHDCRFRPSGYVCRQEGNECDLAEYCDGNSSSCPNDVYKQDGTPCKYEGRCFRKGCRSRYMQCQSIFGPDAMEAPSECYDAVNLIGDQFGNCEITGIRNFKKCESANSICGRLQCINVETIPDLPEHTTIISTHLQAENLMCWGTGYHLSMKPMGIPDLGMINDGTSCGEGRVCFKKNCVNSSVLQFDCLPEKCNTRGVCNNRKNCHCMYGWAPPFCEEVGYGGSIDSGPPGLLRGAIPSSIWVVSIIMFRLILLILSVVFVFFRQVIGNHLKPKQEKMPLSKAKTEQEESKTKTVQEESKTKTGQEESEAKTGQEESKANIESKRPKAKSVKKQKK

SEQ ID NO: 875613 - protein, 131 aa, Homo sapiens
LLLPRVSERAFRHLHAHWGVPSFILGLLAHCLGATGGGSFYRPLSEHSLGSLRPKTEEKILASENPWAKGPSGVMRGAGSRSQALTTRFSCRSAGKPCAWSPPRRTIDMKTKVRGSGRMVWVSGSPRPCPL

SEQ ID NO: 875614 - protein, 30 aa, Homo sapiens
MAKPQGLVTFEDVAVDFTQEEWQYLNPPQR

SEQ ID NO: 875615 - protein, 26 aa, Homo sapiens
MHAHARARAHTHTHTHTHTHPSCGLV

SEQ ID NO: 875616 - protein, 103 aa, Homo sapiens
MPLVLLAIKSLCPWRLRKEPEVALSNMDRLLIFQGSSAPASVPSLLWAEGPGTQPQSSACFLQHAHLEIEISHIFTTQKPGCIFVLFKICQRNFSYPLNFLQK

SEQ ID NO: 875617 - protein, 92 aa, Homo sapiens [sequence omitted]

SEQ ID NO: 875618 - protein, 90 aa, Homo sapiens
GTISLFKMQPPEQSGFHMAALIPSCRWKVSSAILRVTPSIGSWDNFTQKGIITPNAYMCLFVKQELLKNSDGFNTIWHAARRGNLGSHQV

SEQ ID NO: 875619 - protein, 664 aa, Homo sapiens
MKRRNADCSKLRRPLKRNRITEGIYGSTFLYLKFLVVWALVLLADFVLEFRFEYLWPFWLFIRSVYDSFRYQGLAFSVFFVCVAFTSNIICLLFIPIQWLFFAASTYVWVQYVWHTERGVCLPTVSLWILFVYIEAAIRFKDLKNFHVDLCRPFAAHCIGYPVVTLGLGFKSYVSYKMRLRKQKEVQKENEFYMQLLQQALPPEQQMLQKQEKEAEEAAKGLPDMDSSILIHHNGGIPANKKLSTTLPEIEYREKGKEKDKDAKKHNLGINNNNILQPVDSKIQEIEYMENHINSKRLNNDLVGSTENLLKEDSCTASSKNYKNASGVVNSSPRSHSATNGSIPSSSSKNEKKQKCTSKSPSTHKDLMENCIPNNQLSKPDALVRLEQDIKKLKADLQASRQVEQELRSQISSLSSTERGIRSEMGQLRQENELLQNKLHNAVQMKQKDKQNISQLEKKLKAEQEARSFVEKQLMEEKKRKKLEEATAARAVAFAAASRGECTETLRNRIRELEAEGKKLTMDMKVKEDQIRELELKVQELRKYKENEKDTEVLMSALSAMQDKTQHLENSLSAETIIKLDLFSALGDAKRQLEIAQGQILQKDQEIKDLKQKIAEVMAVMPSITYSAATSPLSPVSPHYSSKFVETSPSGLDPNASVYQPLKK

SEQ ID NO: 875620 - protein, 487 aa, Homo sapiens
MRLRKQKEVQKENEFYMQLLQQALPPEQQMLQKQEKEAEEAAKGLPDMDSSILIHHNGGIPANKKLSTTLPEIEYREKGKEKDKDAKKHNLGINNNNILQPVDSKIQEIEYMENHINSKRLNNDLVGSTENLLKEDSCTASSKNYKNASGVVNSSPRSHSATNGSIPSSSSKNEKKQKCTSKSPSTHKDLMENCIPNNQLSKPDALVRLEQDIKKLKADLQASRQVEQELRSQISSLSSTERGIRSEMGQLRQENELLQNKLHNAVQMKQKDKQNISQLEKKLKAEQEARSFVEKQLMEEKKRKKLEEATAARAVAFAAASRGECTETLRNRIRELEAEGKKLTMDMKVKEDQIRELELKVQELRKYKENEKDTEVLMSALSAMQDKTQHLENSLSAETIIKLDLFSALGDAKRQLEIAQGQILQKDQEIKDLKQKIAEVMAVMPSITYSAATSPLSPVSPHYSSKFVETSPSGLDPNASVYQPLKK

SEQ ID NO: 875621 - protein, 437 aa, Homo sapiens
MKRRNADCSKLRRPLKRNRITEGIYGSTFLYLKFLVVWALVLLADFVLEFRFEYLWPFWLFIRSVYDSFRYQGLAFSVFFVCVAFTSNIICLLFIPIQWLFFAASTYVWVQYVWHTERGVCLPTVSLWILFVYIEAAIRFKDLKNFHVDLCRPFAAHWLEQDIKKLKADLQASRQVEQELRSQISSLSSTERGIRSEMGQLRQENELLQNKLHNAVQMKQKDKQNISQLEKKLKAEQEARSFVEKQLMEEKKRKKLEEATAARAVAFAAASRGECTETLRNRIRELEAEGKKLTMDMKVKEDQIRELELKVQELRKYKENEKDTEVLMSALSAMQDKTQHLENSLSAETIIKLDLFSALGDAKRQLEIAQGQILQKDQEIKDLKQKIAEVMAVMPSITYSAATSPLSPVSPHYSSKFVETSPSGLDPNASVYQPLKK

SEQ ID NO: 875622 - protein, 930 aa, Homo sapiens
FKIINNRRYVYFICKENMAALFLRGFVQIGNCKTGISKSKEAFIEAVERKKKDRLVLYFKSGKYSTFRLSDNIQNVVLKSYRGNQNHLHLTLQNNNGLFIEGLSSTDAEQLKIFLDRVHQNEVQPPVRPGKGGSVFSSTTQKEINKTSFHKVDEKSSSKSFEIAKGSGTGVLQRMPLLTSKLTLTCGELSENQHKKRKRMLSSSSEMNEEFLKENNSVEYKKSKADCSRCVSYNREKQLKLKELEENKKLECESSCIMNATGNPYLDDIGLLQALTEKMVLVFLLQQGYSDGYTKWDKLKLFFELFPEKICHGLPNLGNTCYMNAVLQSLLSIPSFADDLLNQSFPWGKIPLNALTMCLARLLFFKDTYNIEIKEMLLLNLKKAISAAAEIFHGNAQNDAHEFLAHCLDQLKDNMEKLNTIWKPKSEFGEDNFPKQVFADDPDTSGFSCPVITNFELELLHSIACKACGQVILKTELNNYLSINLPQRIKAHPSSIQSTFDLFFGAEELEYKCAKCEHKTSVGVHSFSRLPRILIVHLKRYSLNEFCALKKNDQEVIISKYLKVSSHCNEGTRPPLPLSEDGEITDFQLLKVIRKMTSGNISVSWPATKESKDILAPHIGSDKESEQKKGQTVFKGASRRQQQKYLGKNSKPNELESVYSGDRAFIEKEPLAHLMTYLEDTSLCQFHKAGGKPASSPGTPLSKVDFQTVPENPKRKKYVKTSKFVAFDRIINPTKDLYEDKNIRIPERFQKVSEQTQQCDGMRICEQAPQQALPQSFPKPGTQGHTKNLLRPTKLNLQKSNRNSLLALGSNKNPRNKDILDKIKSKAKETKRNDDKGDHTYRLISVVSHLGKTLKSGHYICDAYDFEKQIWFTYDDMRVLGIQEAQMQEDRRCTGYIFFYMHNEIFEEMLKREENAQLNSKEVEETLQKE

SEQ ID NO: 875623 - protein, 68 aa, Homo sapiens
AVSPGWGAAGAADEAPESTPRNGQALIAQPELVTVLLCTPASSHKNKEHTKNHTPVIPHQMSPPILSY

SEQ ID NO: 875624 - protein, 100 aa, Homo sapiens
  misc_feature (57)..(57): Xaa can be any naturally occurring amino acid
LRYKITVFKQCEATPPPRLKSTSPLRLVPRRYPRTQASSTKRTQQRHFCKNYACISXVSASEQLSRLILKPTHSTLEGFDLGHRPGKSRAHMRWDTAITA

SEQ ID NO: 875625 - protein, 105 aa, Homo sapiens
GLSRRSDEKRGCPAPPETTGHAATCQAPPFLPGEGQVFHTDSRDFKDQGFEEVLALPRKGGSFWKRRERRQTLRWDQQSLRSCGKLTEPSQRSGKEPQPQAGTVF

SEQ ID NO: 875626 - protein, 105 aa, Homo sapiens; identical to SEQ ID NO: 875625

SEQ ID NO: 875627 - protein, 156 aa, Homo sapiens
RGPAPPSPLKETSFSIGLQVLFPFLLAGFGTVAAGMVLDIVQHWEVFQKVTEVFILVPALLGLKGNLEMTLASRLSTAANIGHMDTPKELWRMITGNMALIQVQATVVGFLASIAAVVFGWIPDGHFSIPHAFLLCASSVATAFIASLVLGKKGRA

SEQ ID NO: 875628 - protein, 123 aa, Homo sapiens
SPGIACSPTVVLCPGHSEDSLLLEGYQSPVGSATCAESSPDKSALVQRRLVACGTSEDRGASWGLSSSTNKAGPLPAGSHMAFSSRAPWRKPSCVPTTENLAQARKVLGLLNKIAMFVNKIIL

SEQ ID NO: 875629 - protein, 540 aa, Homo sapiens
AAKLQIGELSGKVKKLQYENRVLLSNLQRCDLASCQSTRPMLETDAEAGDSAQCVPAPLGETHESHAVRLCRAREAEVLPGLREQAALVSKAIDVLVADANGFTAGLRLCLDNECADFRLHEAPDNSEGPRDTKLIHAILVRLSVLQQELNAFTRKADAVLGCSVKEQQESFSSLPPLGSQGLSKEILLAKDLGSDFQPPDFRDLPEWEPRIREAFRTGDLDSKPDPSRSFRPYRAEDNDSYASEIKELQLVLAEAHDSLRGLQEQLSQERQLRKEEADNFNQKMVQLKEDQQRALLRREFELQSLSLQRRLEQKFWSQEKNMLVQESQQFKHNFLLLFMKLRWFLKRWRQGKVLPSEGDDFLEVNSMKELYLLMEEEEINAQHSDNKACTGDSWTQNTPNEYIKTLADMKVTLKELCWLLRDERRGLTELQQQFAKAKATWETERAELKGHTSQMELKTGKGAGERAGPDWKAALQREREEQQHLLAESYSAVMELTRQLQISERNWSQEKLQLVERLQGEKQQVEQQVKELQNRLSQV

SEQ ID NO: 875630 - protein, 81 aa, Homo sapiens
SCCRVAACAPYITPIFQVGTVPGGCSAPCRLLLAGTFARGHVSSKEDADILLAGTFARVHVSCEGHADILLAGTSTGSHVS

SEQ ID NO: 875631 - protein, 87 aa, Homo sapiens
DRVLFDSHQQRLMAPQVVPVCCLPALRQVGGVQHRAQAPGPQCLRRASSGCGGGGVAVCLGLWLCPDHPLTGLCPLLEVKGTLVPGS

SEQ ID NO: 875632 - protein, 104 aa, Homo sapiens
LPCHLPVLARVTATTENLILSLFCQSCPTSNLRKEAQALDRALGPSLAGGFCLIPLVAPPLSVSVSDGATNRNVHLFTGYIFLFTSYICALLNSLYVYNKKFKT

SEQ ID NO: 875633 - protein, 611 aa, Homo sapiens
MQETIRNLDCVGMKWKDQNIEDQYRYPRKNLRCRMLERFVESKDGTQCGETSSQIQDSIVTKNTLPGVGPYESRMSGEVIMGHSSLNCYIRVGAGHKPYEYHECGEKPDTHKQRGKAFSYHNSLQTHERLHTGKKPYNCKECGKSFSSLGNLQRHMAVQRGDGPYKCKLCGKAFFWPSLLHMHERTHTGEKPYECKQCSKAFSFYSSYLRHERTHTGEKLYECKQCSKAFPDYSSCLRHERTHTGKKPYTCKQCGKAFSASTSLRRHETTHTDEKPYACQQCGKAFHHLGSFQRHMVMHTRDGPHKCKICGKGFDCPSSLKSHERTHTGEKLYECKQCGKALSHSSSFRRHMTMHTGDGPHKCKICGKAFVYPSVFQRHEKTHTAEKPYKCKQCGKAYRISSSLRRHETTHTGEKPYKCKCGKAFIDFYSFQNHKTTHAGEKPYECKECGKAFSCFQYLSQHRRTHTGEKPYECNTCKKAFSHFGNLKVHERIHSGEKPYECKECGKAFSWLTCFLRHERIHMREKPYECQQCGKAFTHSRFLQGHEKTHTGENPYECKECGKAFASLSSLHRHKKTHWKKTHTGENPYGCKECGKAFASLSSLHRHKKTH

SEQ ID NO: 875634 - protein, 649 aa, Homo sapiens
ASFQIFSASVALEDVAVNFTREEWALLGPCQKNLYKDVMQETIRNLDCVGMKWKDQNIEDQYRYPRKNLRCRMLERFVESKDGTQCGETSSQIQDSIVTKNTLPGVGPYESRMSGEVIMGHSSLNCYIRVGAGHKPYEYHECGEKPDTHKQRGKAFSYHNSLQTHERLHTGKKPYNCKECGKSFSSLGNLQRHMAVQRGDGPYKCKLCGKAFFWPSLLHMHERTHTGEKPYECKQCSKAFSFYSSYLRHERTHTGEKLYECKQCSKAFPDYSSCLRHERTHTGKKPYTCKQCGKAFSASTSLRRHETTHTDEKPYACQQCGKAFHHLGSFQRHMVMHTRDGPHKCKICGKGFDCPSSLKSHERTHTGEKLYECKQCGKALSHSSSFRRHMTMHTGDGPHKCKICGKAFVYPSVFQRHEKTHTAEKPYKCKQCGKAYRISSSLRRHETTHTGEKPYKCKCGKAFIDFYSFQNHKTTHAGEKPYECKECGKAFSCFQYLSQHRRTHTGEKPYECNTCKKAFSHFGNLKVHERIHSGEKPYECKECGKAFSWLTCFLRHERIHMREKPYECQQCGKAFTHSRFLQGHEKTHTGENPYECKECGKAFASLSSLHRHKKTHWKKTHTGENPYGCKECGKAFASLSSLHRHKKTH

SEQ ID NO: 875635 - protein, 643 aa, Homo sapiens
MASVALEDVAVNFTREEWALLGPCQKNLYKDVMQETIRNLDCVGMKWKDQNIEDQYRYPRKNLRCRMLERFVESKDGTQCGETSSQIQDSIVTKNTLPGVGPYESRMSGEVIMGHSSLNCYIRVGAGHKPYEYHECGEKPDTHKQRGKAFSYHNSLQTHERLHTGKKPYNCKECGKSFSSLGNLQRHMAVQRGDGPYKCKLCGKAFFWPSLLHMHERTHTGEKPYECKQCSKAFSFYSSYLRHERTHTGEKLYECKQCSKAFPDYSSCLRHERTHTGKKPYTCKQCGKAFSASTSLRRHETTHTDEKPYACQQCGKAFHHLGSFQRHMVMHTRDGPHKCKICGKGFDCPSSLKSHERTHTGEKLYECKQCGKALSHSSSFRRHMTMHTGDGPHKCKICGKAFVYPSVFQRHEKTHTAEKPYKCKQCGKAYRISSSLRRHETTHTGEKPYKCKCGKAFIDFYSFQNHKTTHAGEKPYECKECGKAFSCFQYLSQHRRTHTGEKPYECNTCKKAFSHFGNLKVHERIHSGEKPYECKECGKAFSWLTCFLRHERIHMREKPYECQQCGKAFTHSRFLQGHEKTHTGENPYECKECGKAFASLSSLHRHKKTHWKKTHTGENPYGCKECGKAFASLSSLHRHKKTH

SEQ ID NO: 875636 - protein, 643 aa, Homo sapiens; identical to SEQ ID NO: 875635

SEQ ID NO: 875637 - protein, 450 aa, Homo sapiens
MGLRSHHLSLGLLLLFLLPAECLGAEGRLALKLFRDLFANYTSALRPVADTDQTLNVTLEVTLSQIIDMDERNQVLTLYLWIRQEWTDAYLRWDPNAYGGLDAIRIPSSLVWRPDIVLYNKADAQPPGSASTNVVLRHDGAVRWDAPAITRSSCRVDVAAFPFDAQHCGLTFGSWTHGGHQLDVRPRGAAASLADFVENVEWRVLGMPARRRVLTYGCCSEPYPDVTFTLLLRRRAAAYVCNLLLPCVLISLLAPLAFHLPADSGEKVSLGVTVLLALTVFQLLLAESMPPAESVPLIGKYYMATMTMVTFSTALTILIMNLHYCGPSVRPVPAWARALLLGHLARGLCVRERGEPCGQSRPPELSPSPQSPEGGAGPPAGPCHEPRCLCRQEALLHHVATIANTFRSHRAAQRCHEDWKRLARVMDRFFLAIFFSMALVMSLLVLVQAL

SEQ ID NO: 875638 - protein, 126 aa, Homo sapiens
MPARRRVLTYGCCSEPYPDVTFTLLLRRRAAAYVCNLLLPCVLISLLAPLAFHLPADSGEKVSLGVTVLLALTVFQLLLAESMPPAESVPLIGGSGGAGGPDDALGSPQGGAATGPGSAERPHCRK

SEQ ID NO: 875639 - protein, 145 aa, Homo sapiens [sequence omitted]

SEQ ID NO: 875640 - protein, 155 aa, Homo sapiens
MGLRSHHLSLGLLLLFLLPAECLGAEGRLALKLFRDLFANYTSALRPVADTDQTLNVTLEVTLSQIIDMVRCGGGTAVESYLSQCQEMKEDERNQVLTLYLWIRQEWTDAYLRWDPNAYGGLDAIRIPSSLVWRPDIVLYNKYCLSGPLLSLTPL

SEQ ID NO: 875641 - protein, 244 aa, Homo sapiens
MPARRRVLTYGCCSEPYPDVTFTLLLRRRAAAYVCNLLLPCVLISLLAPLAFHLPADSGEKVSLGVTVLLALTVFQLLLAESMPPAESVPLIGKYYMATMTMVTFSTALTILIMNLHYCGPSVRPVPAWARALLLGHLARGLCVRERGEPCGQSRPPELSPSPQSPEGGAGPPAGPCHEPRCLCRQEALLHHVATIANTFRSHRAAQRCHEDWKRLARVMDRFFLAIFFSMALVMSLLVLVQAL

SEQ ID NO: 875642 - protein, 155 aa, Homo sapiens; identical to SEQ ID NO: 875640

SEQ ID NO: 875643 - protein, 72 aa, Homo sapiens
MFTIRGCGRKGYQDEDEEEEDGIDNKGSDTRTIGLTASSSPSCKEGAMYTNFSPPLFFCYVYLAMVDLTMTI

SEQ ID NO: 875644 - protein, 222 aa, Homo sapiens
MWDKGGPKKAKQVKTTKSTSATPETNNHVEDTAHKRQQRGATPEQQDTNTKRGEEHPHLRPKHTKQDNHKKHPQRRPHIQRKPRVTTTGLPTQQTHNKRHSTPQQTLEYNRTTYRQQTTNTQRGSTQGGQNNEREANTAATNTNTTTTTARNTTTRTENRTLTERQNATTAKEEASRRRGPHRTHKHKKQGRAGRRQTTQRTDRETNSETTTKEPDEKIKRQ

SEQ ID NO: 875645 - protein, 101 aa, Homo sapiens
GAGPSQLRLHYPRISMAVRQWVIALALAALLVVDREVPVAAGKLPFSRMPICEHMVESPTCSQMSNLVCGTDGLTYTNECQLCLARIKTKQDIQIMKDGKC

SEQ ID NO: 875646 - protein, 109 aa, Homo sapiens
MILGIGSSPHLLWTLEGTHIWSLLGDASHTDRLPEAGAGKLLSEVPVAAGKLPFSRMPICEHMVESPTCSQMSNLVCGTDGLTYTNECQLCLARIKTKQDIQIMKDGKC

SEQ ID NO: 875647 - protein, 94 aa, Homo sapiens
LLEVMGAERVCTKAPEITQDEAEIYSLTNMEGNIGIKGCEFKSWLFKFYQARSQVLLCGEVKNPYLLTSNKTTVKEQNACLTHPDRSAMAGLLL

SEQ ID NO: 875648 - protein, 119 aa, Homo sapiens
MALHRGGASFCCPSHLAGSFPPQGLCTGSFFLEGYLFRFSQEGFSLSFRSQVQCHLSESASPHVKCTSTDHASDPLHFLHVTQSYDLLLVCCLSLLIEQKPSEGRGLPVSQEPKSVYGT

SEQ ID NO: 875649 - protein, 138 aa, Homo sapiens
MTEEVWMGTWRPHRPRGPIMALYSSPGPKYLIPPTTGFMKHTPTKLRAPAYSFRGAPMLLAENCSPGPRYNVNPKILRTGKDLGPAYSILGRYQTKTMLTPGPALKSAFPSWTPPDPTWSPPVLEPRGPTPRMLGSPP

SEQ ID NO: 875650 - protein, 138 aa, Homo sapiens; identical to SEQ ID NO: 875649

SEQ ID NO: 875651 - protein, 194 aa, Homo sapiens
IQGALGGLLTGITLSFWVAIGAFIYPAPASKTWPLPLSTDQCIKSNVTATGPPVLSSRPGIADTWYSISYLYYSAVGCLGCIVAGVIISLITGRQRGEDIQPLLIRPVCNLFCFWSKKYKTLCWCGVQHDSGTEQENLENGSARKQGAESVLQNGLRRESLVHVPGYDPKDMNAHTHVQYTHTHTNSTYFLPTC

SEQ ID NO: 875652 - protein, 184 aa, Homo sapiens
IQGALGGLLTGITLSFWVAIGAFIYPAPASKTWPLPLSTDQCIKSNVTATGPPVLSSRPGIADTWYSISYLYYSAVGCLGCIVAGVIISLITGRQRGEDIQPLLIRPVCNLFCFWSKKYKTLCWCGVQHDSGTEQENLENGSARKQGAESVLQNGLRRESLVHVPGYDPKDKSYNNMAFETTHF

SEQ ID NO: 875653 - protein, 184 aa, Homo sapiens; identical to SEQ ID NO: 875652

SEQ ID NO: 875654 - protein, 184 aa, Homo sapiens; identical to SEQ ID NO: 875652

SEQ ID NO: 875655 - protein, 184 aa, Homo sapiens; identical to SEQ ID NO: 875652

SEQ ID NO: 875656 - protein, 297 aa, Homo sapiens
MIPLLLAALLCVPAGALTCYGDSGQPVDWFVVYKLPALRGSGEAAQRGLQYKYLDESSGGWRDGRALINSPEGAVGRSLQPLYRSNTSQLAFLLYNDQPPQPSKAQDSSMRGHTKGVLLLDHDGGFWLVHSVPNFPPPASSAAYSWPHSACTYGQTLLCVSFPFAQFSKMGKQLTYTYPWVYNYQLEGIFAQEFPDLENVVKGHTLAKNPGTADHTHIPGRAVSRALPSSANLEMTCTPGGWQQPWYNLQVQFWPKLWILPLMSDIGELNVTDSSWTAAKLQPRPLKGGPKPGSGAQ

SEQ ID NO: 875657 - protein, 125 aa, Homo sapiens
KQIVHPDSEKRAAAASAISEGQLSSDESGDLTFSLKNLSKTPALQLVHELFMKSKRKRLQENSGHEFLEQGDGEKIAVLQCILAGLIGKKMGIEKLDILTELKYRNLKHILAMVLESLTAESLCR

SEQ ID NO: 875658 - protein, 124 aa, Homo sapiens
PALPDRRAGATRKARLIRTSSGVELGLKPSCPARPECPRPHRHPRGLDGAGDGRRRRGVEGERRRRREELTGNPQATRGKTLNLSRTFHACRNENDSCDKKKIHLGGIWNLVSLRREGGGETPC

SEQ ID NO: 875659 - protein, 102 aa, Homo sapiens
MVDEMWKESQCSATGDWLRHHATAMQGTDTRPFKTVTLLIESNPLSPLSQHHRSLSFVAFITIIILHFFVNFFDEFLSPSLDAKLCEGKDSITFIIVPSVLS

SEQ ID NO: 875660 - protein, 65 aa, Homo sapiens [sequence omitted]

SEQ ID NO: 875661 - protein, 124 aa, Homo sapiens
CSLLEAAGARLRLWLVHPMLDQVVPNPPGLSHIWGKICGLLDSISFGYVLCLWHYAGPLGNFFCSPYFLISRPVPCTARFPLKCHLEQQWPPDRPAKQQGSHSPEQAWWPSRCGQNKKTLSASE

SEQ ID NO: 875662 - protein, 506 aa, Homo sapiens
EFRAMSCPVPACCALLLVLGLCRARPRNALLLLADDGGFESGAYNNSAIATPHLDALARRSLLFRNAFTSVSSCSPSRASLLTGLPQHQNGMYGLHQDVHHFNSFDKVRSLPLLLSQAGVRTGIIGKKHVGPETVYPFDFAYTEENGSVLQVGRNITRIKLLVRKFLQTQDDRPFFLYVAFHDPHRCGHSQPQYGTFCEKFGNGESGMGRIPDWTPQAYDPLDVLVPYFVPNTPAARADLAAQYTTVGRMDQGVGLVLQELRDAGVLNDTLVIFTSDNGIPFPSGRTNLYWPGTAEPLLVSSPEHPKRWGQVSEAYVSLLDLTPTILDWFSIPYPSYAIFGSKTIHLTGRSLLPALEAEPLWATVFGSQSHHEVTMSYPMRSVQHRHFRLVHNLNFKMPFPIDQDFYVSPTFQDLLNRTTAGQPTGWYKDLRHYYYRARWELYDRSRDPHETQNLATDPRFAQLLEMLRDQLAKWQWETHDPWVCAPDGVLEEKLSPQCQPLHNEL

SEQ ID NO: 875663 - protein, 116 aa, Homo sapiens
LVDGKGHLRLTHLQEVLEGGGDVEVLNRTTAGQPTGWYKDLRHYYYRARWELYDRSRDPHETQNLATDPRFAQLLEMLRDQLAKWQWETHDPWVCAPDGVLEEKLSPQCQPLHNEL

SEQ ID NO: 875664 - protein, 119 aa, Homo sapiens
GHRPGSPPSELTHRTRLSPRKLPWALRSVPLPCSRPQATDDLLPVTGHAFAFSRIPRNGIRQRVLLMGWLLSLSIIKRGFLHVPRIRSSFLFPAESCSVVGKATVCLPTHLVMNVWVVP

SEQ ID NO: 875665 - protein, 78 aa, Homo sapiens
ALKASRLAENYISNEKFINNIIGLISSFLVRILWVASDSDPPHTVGSQNKGKEGQQSPGWGGLWPVCRTTGLSDLGIT

SEQ ID NO: 875666 - protein, 579 aa, Homo sapiens
MKDFSDVILCMEATESSKTEFCNPAFEPESGPPCPPPVFPEDASYSVPAPWHGRRPRGLRPDCRFSWLCVLLLSSLLLLLLGLLVAIILAQLQAAPPSGASHSPLPAGGLTTTTTTPTITTSQAAGTPKGQQESGVSPSPQSTCGGLLSGPRGFFSSPNYPDPYPPNTHCVWHIQVATDHAIQLKIEALSIESVASCLFDRLELSPEPEGPLLRVCGRVPPPTLNTNASHLLVVFVSDSSVEGFGFHAWYQAMAPGRGSCAHDEFRCDQLICLLPDSVCDGFANCADGSDETNCSAKFSGCGGNLTGLQGTFSTPSYLQQYPHQLLCTWHISVPAGHSIELQFHNFSLEAQDECKFDYVEVYETSSSGAFSLLGRFCGAEPPPHLVSSHHELAVLFRTDHGISSGGFSATYLAFNATENPCGPSELSCQAGGCKGVQWMCDMWRDCTDGSDDNCSGPLFPPPELACEPVQVEMCLGLSYNTTAFPNIWVGMITQEEVVEVLSGYKSLTSLPCYQHFRRLLCGLLVPRCTPLGSVLPPCRSVCQEAEHQCQSGLALLGTPWPFNCNRLPEAADLEACAQP

SEQ ID NO: 875667 - protein, 465 aa, Homo sapiens
AVSTLSQASCVSQVSEAEINGQFESVCESVFSEVESQAMDALDLPGCFRTRSHSYLRAIQAGYSQDDECIPMMTPSDITSTIRSTAAVSYTNYKKTPPPVPPRTTSKPLISVTAQSSTESTQDAYQDSRAQRMSPWPQDSRGLYNSTDSLDSNKAMNLALETAAAQRHLPESQSSSVRTSDKAILVSKAEELLKSRCSSIGIQDSEFPEHQPYPRSDVETATDSDTESRGLREYHSVGVQVEDEKRHGRFKRSNSVTAAVQADLELEGFPGHITTEDKGLQFGSSFQRHSEPSTPTQYSAVRTVRTQGLFSYREDYRTQVDTSTLPPPDPWLEPAIDTVETGRMSPCRRDGSWFLKLLHAETKRMEGWCKEMEREAEENDLSEEKLLPAHALQENALALCQREVDGGDDGRRMLGRCCLPRDPQSPQHGCMGLVQVSTAVFRSFTRRLHFSWLAGKSDPRKSSLS

SEQ ID NO: 875668 - protein, 456 aa, Homo sapiens
AVSTLSQASCVSQVSEAEINGQFESVCESVFSEVESQAMDALDLPGCFRTRSHSYLRAIQAGYSQDDECIPMMTPSDITSTIRSTAAVSYTNYKKTPPPVPPRTTSKPLISVTAQSSTESTQDAYQDSRAQRMSPWPQDSRGLYNSTDSLDSNKAMNLALETAAAQRHLPESQSSSVRTSDKAILVSKAEELLKSRCSSIGIQDSEFPEHQPYPRSDVETATDSDTESRGLREYHSVGVQVEDEKRHGRFKRSNSVTAAVQADLELEGFPGHITTEDKGLQFGSSFQRHSEPSTPTQYSAVRTVRTQGLFSYREDYRTQVDTSTLPPPDPWLEPAIDTVETGRMSPCRRDGSWFLKLLHAETKRMEGWCKEMEREAEENDLSEEKLLPAHALQENALALCQREVDGGDDGRRMLGRCCLPRDPQSPQHGCMGLVQVSTAVFRSFTRRLHFSWLGYI

SEQ ID NO: 875669 - protein, 32 aa, Homo sapiens
MAAKRAASFRQNSASERADSIEIYIPEAQTRL

SEQ ID NO: 875670 - protein, 538 aa, Homo sapiens
AVSTLSQASCVSQVSEAEINGQFESVCESVFSEVESQAMDALDLPGCFRTRSHSYLRAIQAGYSQDDECIPMMTPSDITSTIRSTAAVSYTNYKKTPPPVPPRTTSKPLISVTAQSSTESTQDAYQDSRAQRMSPWPQDSRGLYNSTDSLDSNKAMNLALETAAAQRHLPESQSSSVRTSDKAILVSKAEELLKSRCSSIGIQDSEFPEHQPYPRSDVETATDSDTESRGLREYHSVGVQVEDEKRHGRFKRSNSVTAAVQADLELEGFPGHITTEDKGLQFGSSFQRHSEPSTPTQYSAVRTVRTQGLFSYREDYRTQVDTSTLPPPDPWLEPAIDTVETGRMSPCRRDGSWFLKLLHAETKRMEGWCKEMEREAEENDLSEEILGKIRSAVGSAQLLMSQKFQQFYWLCQQNMDPSAMPRPTSQDLAGYWDMLQLSIEDVSMKFDELQRLRLNDWKMMESPERKEERKVPPPIPKKPPKGKFPITREKSLDLPDRQRQEARRRLMAAKRAASFRQNSASERADSIEIYIPEAQTRL

SEQ ID NO: 875671 - protein, 394 aa, Homo sapiens
AVSTLSQASCVSQVSEAEINGQFESVCESVFSEVESQAMDALDLPGCFRTRSHSYLRAIQAGYSQDDECIPMMTPSDITSTIRSTAAVSYTNYKKTPPPVPPRTTSKPLISVTAQSSTESTQDAYQDSRAQRMSPWPQDSRGLYNSTDSLDSNKAMNLALETAAAQRHLPESQSSSVRTSDKAILVSKAEELLKSRCSSIGIQDSEFPEHQPYPRSDVETATDSDTESRGLREYHSVGVQVEDEKRHGRFKRSNSVTAAVQADLELEGFPGHITTEDKGLQFGSSFQRHSEPSTPTQYSAVRTVRTQGLFSYREDYRTQVDTSTLPPPDPWLEPAIDTVETGRMSPCRRDGSWFLKLLHAETKRMEGWCKEMEREAEENDLSEESKSSGFPRAS

SEQ ID NO: 875672 - protein, 110 aa, Homo sapiens
RGERRKLKDLKDMSIIFSMQFLFEFDSHKQFKQYDNISVAIGDVNAGWIFDEILEHVKLTYSNGISVTLGDRDGVSRGRLTAKKHKGTFWVMNIFYVLIEVIVYILVKIH

SEQ ID NO: 875673 - protein, 545 aa, Homo sapiens
AEQLSPAPAGPEVSELPPAAGSDTGLPAGDCSMAMEIDSRPGGLPGSSCNLGAAREHMQAVTRNYITHPRVTYRTVCSVNGPLVVLDRVKFAQYAEIVHFTLPDGTQRSGQVLEVAGTKAIVQVFEGTSGIDARKTTCEFTGDILRTPVSEDMLGRVFNGSGKPIDKGPVVMAEDFLDINGQPINPHSRIYPEEMIQTGISPIDVMNSIARGQKIPIFSAAGLPHNEIAAQICRQAGLVKKSKAVLDYHDDNFAIVFAAMGVNMETARFFKSDFEQNGTMGNVCLFLNLANDPTIERIITPRLALTTAEFLAYQCEKHVLVILTDMSSYAEALREVSAAREEVPGRRGFPGYMYTDLATIYERAGRVEGRGGSITQIPILTMPNDDITHPIPDLTGFITEGQIYVDRQLHNRQIYPPINVLPSLSRLMKSAIGEGMTRKDHGDVSNQLYACYAIGKDVQAMKAVVGEEALTSEDLLYLEFLQKFEKNFINQGPYENRSVFESLDLGWKLLRIFPKEMLKRIPQAVIDEFYSREGALQDLAPDTAL

SEQ ID NO: 875674 - protein, 500 aa, Homo sapiens
GKAEDASVCVSRVFGVRPLLTPAPPPAYRTVCSVNGPLVVLDRVKFAQYAEIVHFTLPDGTQRSGQVLEVAGTKAIVQVFEGTSGIDARKTTCEFTGDILRTPVSEDMLGRVFNGSGKPIDKGPVVMAEDFLDINGQPINPHSRIYPEEMIQTGISPIDVMNSIARGQKIPIFSAAGLPHNEIAAQICRQAGLVKKSKAVLDYHDDNFAIVFAAMGVNMETARFFKSDFEQNGTMGNVCLFLNLANDPTIERIITPRLALTTAEFLAYQCEKHVLVILTDMSSYAEALREVSAAREEVPGRRGFPGYMYTDLATIYERAGRVEGRGGSITQIPILTMPNDDITHPIPDLTGFITEGQIYVDRQLHNRQIYPPINVLPSLSRLMKSAIGEGMTRKDHGDVSNQLYACYAIGKDVQAMKAVVGEEALTSEDLLYLEFLQKFEKNFINQGPYENRSVFESLDLGWKLLRIFPKEMLKRIPQAVIDEFYSREGALQDLAPDTAL

SEQ ID NO: 875675 - protein, 102 aa, Homo sapiens
FFGFEIQVDTYLTQSLGHNMQNTRCLPRPGMGVQVCWSWKLEGQSWLMLSGDTRQGSRAETPALTPAVTGAPTKRDSKVPTSAVCYKDRAGWPGPCEHVVLV

SEQ ID NO: 875676 - protein, 102 aa, Homo sapiens
MGPRGEAPCLRAALVLEMNGKDPHNLVSGELPNLISVALSLSFRTSSCLRTILCWKALSHISLWPPSSLPSGLCFDVPFLGKSPLTRIFKLQPSTSTLHSIP

SEQ ID NO: 875677 - protein, 111 aa, Homo sapiens
SRHLSGARERGRAGRYSNRRNLDSLPRKPSTGFAALSRRVNQAISCLGTESALEKAEGPTLVTQERWQDFHPSHLTWNPWINQLPLEANPETKGAVYTETEKLAGHGGGRL

SEQ ID NO: 875678 - protein, 123 aa, Homo sapiens [sequence omitted]

SEQ ID NO: 875679 - protein, 97 aa, Homo sapiens
LIRTRSCENCLSRPSSTEATVRHMREKVNPDEAHQEQILWEPERTTPDEVHQNQILWELHFKVLQTHKHYMQHHMNALCKGEGPGRMEEIPERGDAP

SEQ ID NO: 875680 - protein, 108 aa, Homo sapiens
GIYPSPISVSRVSPQPPCRMPNGYTTREFFPPRGSLYYVHLWGTFRPYGIPQGPLIMDPLILGSPRLGETFLRPYSAAQELQCCPQGDTKGNAKLNVTRAPKNNWWDP

SEQ ID NO: 875681 - protein, 700 aa, Homo sapiens
MTTFKEGLTFKDVAVVFTEEELGLLDPVQRNLYQDVMLENFRNLLSVGHHPFKHDVFLLEKEKKLDIMKTATQRKGKSADKIQSEVETVPEAGRHEELYWGQIWKQIASDLIKYEDSMISISRFPRQGDLSCQVRAGLYTTHTGQKFYQCDEYKKSFTDVFNFDLHQQLHSGEKSHTCDECGKSFCYISALHIHQRVHMGEKCYKCDVCGKEFSQSSHLQTHQRVHTVEKPFKCVECGKGFSRRSTLTVHCKLHSGEKPYNCEECGRAFIHASHLQEHQRIHTGEKPFKCDTCGKNFRRRSALNNHCMVHTGEKPYKCEDCGKCFTCSSNLRIHQRVHTGEKPYKCEECGKCFIQPSQFQAHRRIHTGEKPYVCKVCGKGFIYSSSFQAHQGVHTGEKPYKCNECGKSFRMKIHYQVHLVVHTGEKPYKCEVCGKAFRQSSYLKIHLKAHSVQKPFKCEECGQGFNQSSRLQIHQLIHTGEKPYKCEECGKGFSRRADLKIHCRIHTGEKPYNCEECGKVFSQASHLLTHQRVHSGEKPFKCEECGKSFSRSAHLQAHQKVHTGEKPYKCGECGKGFKWSLNLDMHQRVHTGEKPYTCGECGKHFSQASSLQLHQSVHTGEKPYKCDVCGKVFSRSSQLQYHRRVHTGEKPYKCEICGKRFSWRSNLVSHHKIHAAGTFYENDENSKNIRELSEGGSSTR

SEQ ID NO: 875682 - protein, 700 aa, Homo sapiens; identical to SEQ ID NO: 875681

SEQ ID NO: 875683 - protein, 267 aa, Homo sapiens
MTTFKEGLTFKDVAVVFTEEELGLLDPVQRNLYQDVMLENFRNLLSVGHHPFKHDVFLLEKEKKLDIMKTATQRKGKSADKIQSEVETVPEAGRHEELYWGQIWKQIASDLIKYEDSMISISRFPRQGDLSCQVRAGLYTTHTGQKFYQCDEYKKSFTDVFNFDLHQQLHSGEKSHTCDECGKSFCYISALHIHQRVHMGEKCYKCDVCGKEFSQSSHLQTHQRVHTVEKPFKCVECGKGFSRRSTLTVHCKLHSGEKPYRTLQGAP

SEQ ID NO: 875684 - protein, 133 aa, Homo sapiens
CPECGKGFICRRDLYTHHMVHTGEKPYKCGECGKGFKWSLNLDMHQRVHTGEKPYTCGECGKHFKHRSYLMWHQQTHTGEKPYECSECGKVFLESAALIHHYVIHTGEKPYKCKECGKGFSQASNLQVHQNVH

SEQ ID NO: 875685 - protein, 675 aa, Homo sapiens
MTTFKEGLTFKDVAVVFTEEELGLLDPVQRNLYQDVMLENFRNLLSVGHHPFKHDVFLLEKEKKLDIMKTATQRKGKSADKIQSEVETVPEAGRHEELYWGQIWKQIASDLIKYEDSMISISRFPRQGDLSCQVRAGLYTTHTGQKFYQCDEYKKSFTDVFNFDLHQQLHSGEKSHTCDECGKSFCYISALHIHQRVHMGEKCYKCDVCGKEFSQSSHLQTHQRVHTVEKPFKCVECGKGFSRRSTLTVHCKLHSGEKPYNCEECGRAFIHASHLQEHQRIHTGEKPFKCDTCGKNFRRRSALNNHCMVHTGEKPYKCEDCGKCFTCSSNLRIHQRVHTGEKPYKCEECGKCFIQPSQFQAHRRIHTGEKPYVCKVCGKGFIYSSSFQAHQGVHTGEKPYKCNECGKSFRMKIHYQVHLVVHTGEKPYKCEVCGKAFRQSSYLKIHLKAHSVQKPFKCEECGQGFNQSSRLQIHQLIHTGEKPYKCEECGKGFSRRADLKIHCRIHTGEKPYNCEECGKVFSQASHLLTHQRVHSGEKPFKCEECGKSFSRSAHLQAHQKVHTGEKPYKCGECGKGFKWSLNLDMHQRVHTGEKPYTCGECGKHFSQASSLQLHQSVHTGEKPYKCDVCGKVFSRSSQLQYHRRVHTGEKPYKCEICGKRFSWRSNQVTILLLSP

SEQ ID NO: 875686 - protein, 175 aa, Homo sapiens
HLLTHQRVHSGEKPFKCEECGKSFSRSAHLQAHQKVHTGEKPYKCGECGKGFKWSLNLDMHQRVHTGEKPYTCGECGKHFSQASSLQLHQSVHTGEKPYKCDVCGKVFSRSSQLQYHRRVHTGEKPYKCEICGKRFSWRSNLVSHHKIHAAGTFYENDENSKNIRELSEGGSSTR

SEQ ID NO: 875687 - protein, 81 aa, Homo sapiens [sequence omitted]

SEQ ID NO: 875688 - protein, 183 aa, Homo sapiens
MAYHGLTVPLIVMSVFWGFVGFLVPWFIPKGPNRGVIITMLVTCSVCCYLFWLIAILAQLNPFFGPFFMLFFFFFFVVPFEDMPFGCGTSGLLFLIFFSRPSLPSLPLPFLSSFFSFFTIIASPSFFSLVPPTAYPPPSLSPISTFFPITFPSSPLIPPPLSIPPPPTLPFYILLHALFFSLP

SEQ ID NO: 875689 - protein, 81 aa, Homo sapiens [sequence omitted]

SEQ ID NO: 875690 - protein, 81 aa, Homo sapiens [sequence omitted]

SEQ ID NO: 875691 - protein, 81 aa, Homo sapiens [sequence omitted]

SEQ ID NO: 875692 - protein, 81 aa, Homo sapiens [sequence omitted]

SEQ ID NO: 875693 - protein, 103 aa, Homo sapiens
VVLHETHVCLAWIPGPRVLTPTLRGGPGSTTSMWTGLRLRARVMHWAPMDQLRRARQTWSSRSTGNTDSGHPTPPPHLAPLEASSPKSSPSKACRPTVISALR

SEQ ID NO: 875694 - protein, 81 aa, Homo sapiens [sequence omitted]

SEQ ID NO: 875695 - protein, 81 aa, Homo sapiens [sequence omitted]

SEQ ID NO: 875696 - protein, 81 aa, Homo sapiens [sequence omitted]

SEQ ID NO: 875697 - protein, 107 aa, Homo sapiens
MQSLILYRHGILDQSVRMNMQRTDLGDDRAQQFVHQLQYLVSILLKFLKFKEAINKVINKRNNYIMPPTHQRELSGVTFFTASQVQAILVPQPLEELGLQVCVTTPG

SEQ ID NO: 875698 - protein, 197 aa, Homo sapiens
MTRFGVRLYKLLVITVATKESDGFHRFMQSAKYFNYTVKVLGQGEEWRGGDGINSIGGGQKVRLMKEVMEHYADQDDLVVMFTECFDVIFAGGPEEVLKKFQKANHKVVFAADGILWPDKRLADKYPVVHIGKRYLNSGGFIGYAPYVNRIVQQWNLQDNDDDQLFYTKVYIDPLKREAINITLDHKCKIFQTLMEL

SEQ ID NO: 875699 - protein, 758 aa, Homo sapiens
MGGCTVKPQLLLLALVLHPWNPCLGADSEKPSSIPTDKLLVITVATKESDGFHRFMQSAKYFNYTVKVLGQGEEWRGGDGINSIGGGQKVRLMKEVMEHYADQDDLVVMFTECFDVIFAGGPEEVLKKFQKANHKVVFAADGILWPDKRLADKYPVVHIGKRYLNSGGFIGYAPYVNRIVQQWNLQDNDDDQLFYTKVYIDPLKREAINITLDHKCKIFQTLNGAVDEVVLKFENGKARAKNTFYETLPVAINGNGPTKILLNYFGNYVPNSWTQDNGCTLCEFDTVDLSAVDVHPNVSIGVFIEQPTPFLPRFLDILLTLDYPKEALKLFIHNKEVYHEKDIKVFFDKAKHEIKTIKIVGPEENLSQAEARNMGMDFCRQDEKCDYYFSVDADVVLTNPRTLKILIEQNRKIIAPLVTRHGKLWSNFWGALSPDGYYARSEDYVDIVQGNRVGVWNVPYMANVYLIKGKTLRSEMNERNYFVRDKLDPDMALCRNAREMTLQREKDSPTPETFQMLSPPKGVFMYISNRHEFGRLLSTANYNTSHYNNDLWQIFENPVDWKEKYINRDYSKIFTENIVEQPCPDVFWFPIFSEKACDELVEEMEHYGKWSGGKHHDSRISGGYENVPTDDIHMKQVDLENVWLHFIREFIAPVTLKVFAGYYTKGFALLNFVVKYSPERQRSLRPHHDASTFTINIALNNVGEDFQGGGCKFLRYNCSIESPRKGWSFMHPGRLTHLHEGLPVKNGTRYIAVSFIDP

SEQ ID NO: 875700 - protein, 462 aa, Homo sapiens
IAAAVPRVSVMVISRAIPVEQHSPLDYPKEALKLFIHNKEVYHEKDIKVFFDKAKHEIKTIKIVGPEENLSQAEARNMGMDFCRQDEKCDYYFSVDADVVLTNPRTLKILIEQNRKIIAPLVTRHGKLWSNFWGALSPDGYYARSEDYVDIVQGNRVGVWNVPYMANVYLIKGKTLRSEMNERNYFVRDKLDPDMALCRNAREMTLQREKDSPTPETFQMLSPPKGVFMYISNRHEFGRLLSTANYNTSHYNNDLWQIFENPVDWKEKYINRDYSKIFTENIVEQPCPDVFWFPIFSEKACDELVEEMEHYGKWSGGKHHDSRISGGYENVPTDDIHMKQVDLENVWLHFIREFIAPVTLKVFAGYYTKGFALLNFVVKYSPERQRSLRPHHDASTFTINIALNNVGEDFQGGGCKFLRYNCSIESPRKGWSFMHPGRLTHLHEGLPVKNGTRYIAVSFIDP

SEQ ID NO: 875701 - protein, 758 aa, Homo sapiens; identical to SEQ ID NO: 875699

SEQ ID NO: 875702 - protein, 223 aa, Homo sapiens
DAWVDPRVRPRVRNDLWQILENPVDWKEKYINRDYSKIFTENIVEQPCPDVFWFPIFSEKACDELVEEMEHYGKWSGGKHHDSRISGGYENVPTDDIHMKQVDLENVWLHFIREFIAPVTLKVFAGYYTKGFALLNFVVKYSPERQRSLRPHHDASTFTINIALNNVGEDFQGGGCKFLRYNCSIESPRKGWSFMHPGRLTHLHEGLPVKNGTRYIAVSFIDP

SEQ ID NO: 875703 - protein, 187 aa, Homo sapiens
GDQQDLRDTSVTLKVCAGYYTKGFALLNFVVKYSPERQRSLRPHHDSRISGGYENVPTDDIHMKQVDLENVWLHFIREFIAPVTLKVFAGYYTKGFALLNFVVKYSPERQRSLRPHHDASTFTINIALNNVGEDFQGGGCKFLRYNCSIESPRKGWSFMHPGRLTHLHEGLPVKNGTRYIAVSFIDP

SEQ ID NO: 875704 - protein, 758 aa, Homo sapiens; identical to SEQ ID NO: 875699

SEQ ID NO: 875705 - protein, 423 aa, Homo sapiens
MGGCTVKPQLLLLALVLHPWNPCLGADSEKPSSIPTDKLLVITVATKESDGFHRFMQSAKYFNYTVKVLGQGEEWRGGDGINSIGGGQKVRLMKEVMEHYADQDDLVVMFTECFDVIFAGGPEEVLKKFQKANHKVVFAADGILWPDKRLADKYPVVHIGKRYLNSGGFIGYAPYVNRIVQQWNLQDNDDDQLFYTKVYIDPLKREAINITLDHKCKIFQTLNGAVDEVVLKFENGKARAKNTFYETLPVAINGNGPTKILLNYFGNYVPNSWTQDNGCTLCEFDTVDLSAVDVHPNVSIGVFIEQPTPFLPRFLDILLTLDYPKEALKLFIHNKEVYHEKDIKVFFDKAKHEIKTIKIVGPEENLSQAEARNMGMDFCRQDEKCDYYFSVDADVVLTVPTDLPPVVCTPPPELCSLRVLRPG

SEQ ID NO: 875706 - protein, 737 aa, Homo sapiens
MGGCTVKPQLLLLALVLHPWNPCLGADSEKPSSIPTDKLLVITVATKESDGFHRFMQSAKYFNYTVKVLGQGEEWRGGDGINSIGGGQKVRLMKEVMEHYADQDDLVVMFTECFDVIFAGGPEEVLKKFQKANHKVVFAADGILWPDKRLADKYPVVHIGKRYLNSGGFIGYAPYVNRIVQQWNLQDNDDDQLFYTKVYIDPLKREAINITLDHKCKIFQTLNGAVDEVVLKFENGKARAKNTFYETLPVAINGNGPTKILLNYFGNYVPNSWTQDNGCTLCEFDTVDLSAVDVHPNVSIGVFIEQPTPFLPRFLDILLTLDYPKEALKLFIHNKEVYHEKDIKVFFDKAKHEIKTIKIVGPEENLSQAEARNMGMDFCRQDEKCDYYFSVDADVVLTNPRTLKILIEQNRKIIAPLVTRHGKLWSNFWGALSPDGYYARSEDYVDIVQGNRVGVWNVPYMANVYLIKGKTLRSEMNERNYFVRDKLDPDMALCRNAREMGVFMYISNRHEFGRLLSTANYNTSHYNNDLWQIFENPVDWKEKYINRDYSKIFTENIVEQPCPDVFWFPIFSEKACDELVEEMEHYGKWSGGKHHDSRISGGYENVPTDDIHMKQVDLENVWLHFIREFIAPVTLKVFAGYYTKGFALLNFVVKYSPERQRSLRPHHDASTFTINIALNNVGEDFQGGGCKFLRYNCSIESPRKGWSFMHPGRLTHLHEGLPVKNGTRYIAVSFIDP

SEQ ID NO: 875707 - protein, 445 aa, Homo sapiens
SPVKHTPLDYPKEALKLFIHNKEVYHEKDIKVFFDKAKHEIKTIKIVGPEENLSQAEARNMGMDFCRQDEKCDYYFSVDADVVLTNPRTLKILIEQNRKIIAPLVTRHGKLWSNFWGALSPDGYYARSEDYVDIVQGNRVGVWNVPYMANVYLIKGKTLRSEMNERNYFVRDKLDPDMALCRNAREMTLQREKDSPTPETFQMLSPPKGVFMYISNRHEFGRLLSTANYNTSHYNNDLWQIFENPVDWKEKYINRDYSKIFTENIVEQPCPDVFWFPIFSEKACDELVEEMEHYGKWSGGKHHDSRISGGYENVPTDDIHMKQVDLENVWLHFIREFIAPVTLKVFAGYYTKGFALLNFVVKYSPERQRSLRPHHDASTFTINIALNNVGEDFQGGGCKFLRYNCSIESPRKGWSFMHPGRLTHLHEGLPVKNGTRYIAVSFIDP

SEQ ID NO: 875708 - protein, 758 aa, Homo sapiens; identical to SEQ ID NO: 875699

SEQ ID NO: 875709 - protein, 758 aa, Homo sapiens; identical to SEQ ID NO: 875699

SEQ ID NO: 875710 - protein, 758 aa, Homo sapiens; identical to SEQ ID NO: 875699

SEQ ID NO: 875711 - protein, 503 aa, Homo sapiens
MGGCTVKPQLLLLALVLHPWNPCLGADSEKPSSIPTDKLLVITVATKESDGFHRFMQSAKYFNYTVKVLGQGEEWRGGDGINSIGGGQKVRLMKEVMEHYADQDDLVVMFTECFDVIFAGGPEEVLKKFQKANHKVVFAADGILWPDKRLADKYPVVHIGKRYLNSGGFIGYAPYVNRIVQQWNLQDNDDDQLFYTKVYIDPLKREAINITLDHKCKIFQTLNGAVDEVVLKFENGKARAKNTFYETLPVAINGNGPTKILLNYFGNYVPNSWTQDNGCTLCEFDTVDLSAVDVHPNVSIGVFIEQPTPFLPRFLDILLTLDYPKEALKLFIHNKEVYHEKDIKVFFDKAKHEIKTIKIVGPEENLSQAEARNMGMDFCRQDEKCDYYFSVDADVVLTNPRTLKILIEQNRKIIAPLVTRHGKLWSNFWGALSPDGYYARSEDYVDIVQGNRVGVWNVPYMANVYLIKGKTLRSEMNERNYFVRDKLDPDMALRRDVTSKNVS

SEQ ID NO: 875712 - protein, 157 aa, Homo sapiens
TPGASCQNRCQRGGGALLNGTSISPGENGLQSLTSSLDDSTAREGKGIHRGGRRLPLPGQTRAWAAASVFILKPYRARLCSRLRMSYFRPQPKSATANYTANNGEGACSARLETPERQRKDSDFSLGQSPSAASPRSGCAPRSGSGHTPRGQGDRAA

SEQ ID NO: 875713 - protein, 254 aa, Homo sapiens
MGYFLKLYAYVNSHSLFVWVCDRSYKRSFRPMILNKIKELSRNQFSTMSHLRKDSQPSSPGDDAMDRSGLPDLQGRFELSGKNRQYPLDALEPQPSIGDIKDIKTPSLVFLCFIFDGLHQALLSVGVSKRSNTVVGNENEERGTPYASRFKDMPNFIALEKSSVLRHCCDLLIGIAAGSSDKICTSSLQVQRRFKAMMASIGRLSHGESADLLISCNAESAIGWISSRPWVGELMFTLLFGDFESPLHKLRKSS

SEQ ID NO: 875714 - protein, 187 aa, Homo sapiens
MGYFLKLYAYVNSHSLFVWVCDRSYKRSFRPMILNKIKELSRNQFSTMSHLRKDSQPSSPGDDAMDRSGLPDLQGRFELSGKNRQYPLDALEPQPSIGDIKDIKKAAKSMLDPAHKSHFHPVTPSLVFLCFIFDGLHQALLSVGVSKRSNTVVGNENEERGTPYASRFKDMPNFIALEKSSVLPPLL

SEQ ID NO: 875715 - protein, 101 aa, Homo sapiens
SNALPPNSYHLEASTRPVPHSREPSAPIQGPHFTPSLKPVCGCPHLPPARGGCSLTRWLHLSLPVTMVVLPPLNSGTLQRLLNTSELESLLQGMQVMKMRA

SEQ ID NO: 875716 - protein, 400 aa, Homo sapiens
DPRAKEKSPLKQFSFSLSFSFRGEPSCSCEGHLLRKTPQLSRGASAGGSDSFENPGLPLPVPPGVRVSGARVFREGQARWALGSCARRADRGIMEADKDDTQQILKEHSPDEFIKDEQNKGLIDEITKKNIQLKKEIQKLETELQEATKEFQIKEDIPETKMKFLSVETPENDSQLSNISCSFQVSSKVPYEIQKGQALITFEKEEVAQNVVSMSKHHVQIKDVNLEVTAKPVPLNSGVRFQVYVEVSKMKINVTEIPDTLREDQMRDKLELSFSKFRNGGGEVDRVDYDRQSGSAVITFVEIGVADKILKKKEYPLYINQTCHRVTVSPYTEIHLKKYQIFSGTSKRTVLLTGMEGIQMDEEIVEDLINIHFQRAKNGGGEVDVVKCSLGQPHIAYFEE

SEQ ID NO: 875717 - protein, 156 aa, Homo sapiens
WKKTISAGRGRAVRRRRMEAVVFVFSLLDCCALIFLSVYFIITLSDLECDYINARSCCSKLNKWVIPELIGHTIVTVLLLMSLHWFIFLLNLPVATWNIYRYIMVPSGNMGVFDPTEIHNRGQLKSHMKEAMIKLGFHLLCFFMYLYSMILALIND

SEQ ID NO: 875718 - protein, 139 aa, Homo sapiens
MEAVVFVFSLLDCCALIFLSVYFIITLSDLECDYINARSCCSKLNKWVIPELIGHTIVTVLLLMSLHWFIFLLNLPVATWNIYRYIMVPSGNMGVFDPTEIHNRGQLKSHMKEAMIKLGFHLLCFFMYLYSMILALIND

SEQ ID NO: 875719 - protein, 139 aa, Homo sapiens; identical to SEQ ID NO: 875718

SEQ ID NO: 875720 - protein, 139 aa, Homo sapiens; identical to SEQ ID NO: 875718

SEQ ID NO: 875721 - protein, 152 aa, Homo sapiens
MAKVRGWVSRRRRMEAVVFVFSLLDCCALIFLSVYFIITLSDLECDYINARSCCSKLNKWVIPELIGHTIVTVLLLMSLHWFIFLLNLPVATWNIYRYIMVPSGNMGVFDPTEIHNRGQLKSHMKEAMIKLGFHLLCFFMYLYSMILALIND

SEQ ID NO: 875722 - protein, 103 aa, Homo sapiens
MLLPSLCRFVWVIPELIGHTIVTVLLLMSLHWFIFLLNLPVATWNIYRYIMVPSGNMGVFDPTEIHNRGQLKSHMKEAMIKLGFHLLCFFMYLYSMILALIND

SEQ ID NO: 875723 - protein, 147 aa, Homo sapiens
KQTKRFVAAKAACGEVTVKVLPKEVWKESPFQIALNFKTFCLGKVGQQHLNQGYWVIPELIGHTIVTVLLLMSLHWFIFLLNLPVATWNIYRYIMVPSGNMGVFDPTEIHNRGQLKSHMKEAMIKLGFHLLCFFMYLYSMILALIND

SEQ ID NO: 875724 - protein, 139 aa, Homo sapiens; identical to SEQ ID NO: 875718

SEQ ID NO: 875725 - protein, 107 aa, Homo sapiens
MAGVSTCRDLSHPGVDSFAKGAKLLPSLCRFVWVIPELIGHTIVTVLLLMSLHWFIFLLNLPVATWNIYRNRGQLKSHMKEAMIKLGFHLLCFFMYLYSMILALIND

SEQ ID NO: 875726 - protein, 137 aa, Homo sapiens
MEAVVFVFSLLDCCALIFLSVYFIITLSDLECDYINARSCCSKLNKWVIPELIGHTIVTVLLLMSLHWFIFLLNLPVATWNIYRYIMVPSGNMGVFDPTEIHNRGQLKSHMKEAMIKLGFHLLCFFMYLYSGSNCPC

SEQ ID NO: 875727 - protein, 137 aa, Homo sapiens; identical to SEQ ID NO: 875726

SEQ ID NO: 875728 - protein, 139 aa, Homo sapiens; identical to SEQ ID NO: 875718

SEQ ID NO: 875729 - protein, 139 aa, Homo sapiens; identical to SEQ ID NO: 875718

SEQ ID NO: 875730 - protein, 139 aa, Homo sapiens; identical to SEQ ID NO: 875718

SEQ ID NO: 875731 - protein, 139 aa, Homo sapiens; identical to SEQ ID NO: 875718

SEQ ID NO: 875732 - protein, 139 aa, Homo sapiens; identical to SEQ ID NO: 875718

SEQ ID NO: 875733 - protein, 103 aa, Homo sapiens
GGLRTRCRDKWVIPELIGHTIVTVLLLMSLHWFIFLLNLPVATWNIYRYIMVPSGNMGVFDPTEIHNRGQLKSHMKEAMIKLGFHLLCFFMYLYSMILALIND

SEQ ID NO: 875734 - protein, 139 aa, Homo sapiens; identical to SEQ ID NO: 875718

SEQ ID NO: 875735 - protein, 121 aa, Homo sapiens
MEAVVFVFSLLDCCALIFLSVYFIITLSDLECDYINARSCCSKLNKWVIPELIGHTIVTVLLLMSLHWFIFLLNLPVATWNIYRNRGQLKSHMKEAMIKLGFHLLCFFMYLYSMILALIND

SEQ ID NO: 875736 - protein, 133 aa, Homo sapiens
MEAVVFVFSLLDCCALIFLSVYFIITLSDLECDYINARSCCSKLNKWVIPELIGHTIVTVLLLMSLHWFIFLLNLPVATWNIYRYIMVPSGNMGVFDPTEIHNRGQLKSHMKEAMIKLGFHLLCFFMYLYSMI

SEQ ID NO: 875737 - protein, 92 aa, Homo sapiens
MEAVVFVFSLLDCCALIFLSVYFIITLSDLECDYINARSCCSKLNKWVIPELIGHTIVTVLLLMSLHWFIFLLNLPVATWNIYRMILALIND

SEQ ID NO: 875738 - protein, 370 aa, Homo sapiens
MNYSHDNWSAILAHIGKPEELDTSARNAGALTRRREIRDAATLLRLGLAYGPGGMSLREVTAWAQLHDVATLSDVALLKRLRNAADWFGILAAQTLAVRAAVTGCTSGKRLRLVDGTAISAPGGGSAEWRLHMGYDPHTCQFTDFELTDSRDAERLDRFAQTADEIRIADRGFGSRPECIRSLAFGEADYIVRVHWRGLRWLTAEGMRFDMMGFLRGLDCGKNGETTVMIGNSGNKKAGAPFPARLIAVSLPPEKALISKTRLLSENRRKGRVVQAETLEAAGHVLLLTSLPEDEYSAEQVADCYRLRWQIELAFKRLKSLLHLDALRAKEPELAKAWIFANLLAAFLIDDIIQPSLDFPPRSAGSEKKN

SEQ ID NO: 875739 - protein, 104 aa, Homo sapiens
MALTGVHVPQAALWGLPWPGHASLEEGWVCTAQQGSPHCPTQQSPARGSNWESWGRACASPLMSTMLGTGSAHRRMSGDLAPGAGSRGIGPSTAFPSPSSGSAG

SEQ ID NO: 875740 - protein, 68 aa, Homo sapiens
ESFLIMPLEDALRTPVMNPKNSVSIIPGIGHLITPVLSLKGLHNNVLKESPIMSFRMELDLPKLLCTC

SEQ ID NO: 875741 - protein, 103 aa, Homo sapiens [sequence omitted]

SEQ ID NO: 875742 - protein, 87 aa, Homo sapiens
RWMGGGRDAPHFPDYGRPGRGAPLPHRPVWEARSASTQPPHLGGVPNISEETATIKNGAMMTMLVLCQRKGGNVGKRKRDQTVTVSV

SEQ ID NO: 875743 - protein, 115 aa, Homo sapiens [sequence omitted]

SEQ ID NO: 875744 - protein, 115 aa, Homo sapiens [sequence omitted]

SEQ ID NO: 875745 - protein, 1600 aa, Homo sapiens
FPFGVFALEGQIILAKWLEQAARNLELTDKANWPENGLQLAEIFFTAEKTDELGLASSWHWISLKDYQNTEEVCQLRTLVNNLRELITLHRKYNCKLALSDFEKENTTTIVFRMFDKVLAPELIPSILEKFIRVYMREHDLQEEELLLLYIEDLLNRCSSKSTSLFETAWEAKAMAVIACLSDTDLIFDAVLKIMYAAVVPWSAAVEQLVKQHLEMDHPKVKLLQESYKLMEMKKLLRGYGIREVNLLNKEIMRVVRYILKQDVPSSLEDALKVAQAFMLSDDEIYSLRIIDLIDREQGEDCLLLLKSLPPAEAEKTAERVIIWARLALQEEPDHSKEGKAWRMSVAKTSVDILKILCDIQKDNLQKKDECEEMLKLFKEVASLQENFEVFLSFEDYSNSSLVADLREQHIKAHEVAQAKHKPGSTPEPIAAEVRSPSMESKLHRQALALQMSKQELEAELTLRALKDGNIKTALKKCSDLFKYHCNADTGKLLFLTCQKLCQMLADNVPVTVPVGLNLPSMIHDLASQAATICSPDFLLDALELCKHTLMAVELSRQCQMDDCGILMKASFGTHKDPYEEWSYSDFFSEDGIVLESQMVLPVIYELISSLVPLAESKRYPLESTSLPYCSLNEGDGLVLPVINSISALLQNLQESSQWELALRFVVGSFGTCLQHSVSNFMNATLSEKLFGETTLVKSRHVVMELKEKAVIFIRENATTLLHKVFNCRLVDLDLALGYCTLLPQKDVFENLWKLIDKAWQNYDKILAISLVGSELASLYQEIEMGLKFRELSTDAQWGIRLGKLGISFQPVFRQHFLTKKDLIKALVENIDMDTSLILEYCSTFQLDCDAVLQLFIETLLHNTNAGQGQGDASMDSAKRRHPKLLAKALEMVPLLTSTKDLVISLSGILHKLDPYDYEMIEVVLKVIERADEKITNININQALSILKHLKSYRRISPPVDLEYQYMLEHVITLPSAAQTRLPFHLIFFGTAQNFWKILSTELSEESFPTLLLISKLMKFSLDTLYVSTAKHVFEKKLKPKLLKLTQAKSSTLINKEITKITQTIESCLLSIVNPEWAVAIAISLAQDIPEGSFKISALKFCLYLAERWLQNIPSQDEKREKAEALLKKLHIQYRRSGTEAVLIAHKLNTEEYLRVIGKPAHLIVSLYEHPSINQRIQNSSGTDYPDIHAAAKEIAEVNEINLEKVWDMLLEKWLCPSTKPGEKPSELFELQEDEALRRVQYLLLSRPIDYSSRMLFVFATSTTTTLGMHQLTFAHRTRALQCLFYLADKETIESLFKKPIEEVKSYLRCITFLASFETLNIPITYELFCSSPKEGMIKGLWKNHSHESMAVRLVTELCLEYKIYDLQLWNGLLQKLLGFNMIPYLRKVLKAISSIHSLWQVPYFSKAWQRVIQIPLLSASCPLSPDQLSDCSESLIAVLECPVSGDLDLIGVARQYIQLELPAFALACLMLMPHSEKRHQQIKNFLGSCDPQVILKQLEEHMNTGQLAGFSHQIRSLILNNIINKKEFGILAKTKYFQMLKMHAMNTNNITELVNYLANDLSLDEASVLITEYSKHCGKPVPPDTAPCEILKMFLSGLS

SEQ ID NO: 875746 - protein, 681 aa, Homo sapiens
MIEVVLKVIERADEKITNININQALSILKHLKSYRRISPPVDLEYQYMLEHVITLPSAAQTRLPFHLIFFGTAQNFWKILSTELSEESFPTLLLISKLMKFSLDTLYVSTAKHVFEKKLKPKLLKLTQAKSSTLINKEITKITQTIESCLLSIVNPEWAVAIAISLAQDIPEGSFKISALKFCLYLAERWLQNIPSQDEKREKAEALLKKLHIQYRRSGTEAVLIAHKLNTEEYLRVIGKPAHLIVSLYEHPSINQRIQNSSGTDYPDIHAAAKEIAEVNEINLEKVWDMLLEKWLCPSTKPGEKPSELFELQEDEALRRVQYLLLSRPIDYSSRMLFVFATSTTTTLGMHQLTFAHRTRALQCLFYLADKETIESLFKKPIEEVKSYLRCITFLASFETLNIPITYELFCSSPKEGMIKGLWKNHSHESMAVRLVTELCLEYKIYDLQLWNGLLQKLLGFNMIPYLRKVLKAISSIHSLWQVPYFSKAWQRVIQIPLLSASCPLSPDQLSDCSESLIAVLECPVSGDLDLIGVARQYIQLELPAFALACLMLMPHSEKRHQQIKNFLGSCDPQVILKQLEEHMNTGQLAGFSHQIRSLILNNIINKKEFGILAKTKYFQMLKMHAMNTNNITELVNYLANDLSLDEASVLITEYSKHCGKPVPPDTAPCEILKMFLSGLS

SEQ ID NO: 875747 - protein, 1574 aa, Homo sapiens
FPFGVFALEGQIILAKWLEQAARNLELTDKANWPENGLQLAEIFFTAEKTDELGLASSWHWISLKDYQNTEEVCQLRTLVNNLRELITLHRKYNCKLALSDFEKENTTTIVFRMFDKVLAPELIPSILEKFIRVYMREHDLQEEELLLLYIEDLLNRCSSKSTSLFETAWEAKAMAVIACLSDTDLIFDAVLKIMYAAVVPWSAAVEQLVKQHLEMDHPKVKLLQESYKLMEMKKLLRGYGIREVNLLNKEIMRVVRYILKQDVPSSLEDALKVAQAFMLSDDEIYSLRIIDLIDREQGEDCLLLLKSLPPAEAEKTAERVIIWARLALQEEPDHSKEGKAWRMSVAKTSVDILKILCDIQKDNLQKKDECEEMLKLFKEVASLQENFEVFLSFEDYSNSSLVADLREQHIKAHEVAQAKHKPGSTPEPIAAEVRSPSMESKLHRQALALQMSKQELEAELTLRALKDGNIKTALKKCSDLFKYHCNADTGKLLFLTCQKLCQMLADNVPVTVPVGLNLPSMIHDLASQAATICSPDFLLDALELCKHTLMAVELSRQCQMDDCGILMKASFGTHKDPYEEWSYSDFFSEDGIVLESQMVLPVIYELISSLVPLAESKRYPLESTSLPYCSLNEGDGLVLPVINSISALLQNLQESSQWELALRFVVGSFGTCLQHSVSNFMNATLSEKLFGETTLVKSRHVVMELKEKAVIFIRENATTLLHKVFNCRLVDLDLALGYCTLLPQKDVFENLWKLIDKAWQNYDKILAISLVGSELASLYQEIEMGLKFRELSTDAQWGIRLGKLGISFQPVFRQHFLTKKDLIKALVENIDMDTSLILEYCSTFQLDCDAVLQLFIETLLHNTNAGQGQGDASMDSAKRRHPKLLAKALEMVPLLTSTKDLVISLSGILHKLDPYDYEMIEVVLKVIERADEKITNININQALSILKHLKSYRRISPPVDLEYQYMLEHVITLPSAAQTRLPFHLIFFGTAQNFWKILSTELSEESFPTLLLISKLMKFSLDTLYVSTAKHVFEKKLKPKLLKLTQAKSSTLINKEITKITQTIESCLLSIVNPEWAVAIAISLAQDIPEGSFKISALKFCLYLAERWLQNIPSQDEKREKAEALLKKLHIQYRRSGTEAVLIAHKLNTEEYLRVIGKPAHLIVSLYEHPSINQRIQNSSGTDYPDIHAAAKEIAEVNEINLEKVWDMLLEKWLCPSTKPGEKPSELFELQEDEALRRVQYLLLSRPIDYSSRMLFVFATSTTTTLGMHQLTFAHRTRALQCLFYLADKETIESLFKKPIEEVNSPKEGMIKGLWKNHSHESMAVRLVTELCLEYKIYDLQLWNGLLQKLLGFNMIPYLRKVLKAISSIHSLWQVPYFSKAWQRVIQIPLLSASCPLSPDQLSDCSESLIAVLECPVSGDLDLIGVARQYIQLELPAFALACLMLMPHSEKRHQQIKNFLGSCDPQVILKQLEEHMNTGQLAGFSHQIRSLILNNIINKKEFGILAKTKYFQMLKMHAMNTNNITELVNYLANDLSLDEASVLITEYSKHCGKPVPPDTAPCEILKMFLSGLS

SEQ ID NO: 875748 - protein, 332 aa, Homo sapiens
MHQLTFAHRTRALQCLFYLADKETIESLFKKPIEEVKSYLRCITFLASFETLNIPITYELFCSSPKEGMIKGLWKNHSHESMAVRLVTELCLEYKIYDLQLWNGLLQKLLGFNMIPYLRKVLKAISSIHSLWQVPYFSKAWQRVIQIPLLSASCPLSPDQLSDCSESLIAVLECPVSGDLDLIGVARQYIQLELPAFALACLMLMPHSEKRHQQIKNFLGSCDPQVILKQLEEHMNTGQLAGFSHQIRSLILNNIINKKEFGILAKTKYFQMLKMHAMNTNNITELVNYLANDLSLDEASVLITEYSKHCGKPVPPDTAPCEILKMFLSGLS

SEQ ID NO: 875749 - protein, 332 aa, Homo sapiens; identical to SEQ ID NO: 875748

SEQ ID NO: 875750 - protein, 215 aa, Homo sapiens
ITGVSHRTRPRFPVLQVPYFSKAWQRVIQIPLLSASCPLSPDQLSDCSESLIAVLECPVSGDLDLIGVARQYIQLELPAFALACLMLMPHSEKRHQQIKNFLGSCDPQVILKQLEEHMNTGQLAGFSHQIRSLILNNIINKKEFGILAKTKYFQMLKMHAMNTNNITELVNYLANDLSLDEASVLITEYSKHCGKPVPPDTAPCEILKMFLSGLS

SEQ ID NO: 875751 - protein, 1587 aa, Homo sapiens
FPFGVFALEGQIILAKWLEQAARNLELTDKANWPENGLQLAEIFFTAEKTDELGLASSWHWISLKDYQNTEEVCQLRTLVNNLRELITLHRKYNCKLALSDFEKENTTTIVFRMFDKVLAPELIPSILEKFIRVYMREHDLQEEELLLLYIEDLLNRCSSKSTSLFETAWEAKAMAVIACLSDTDLIFDAVLKIMYAAVVPWSAAVEQLVKQHLEMDHPKVKLLQESYKLMEMKKLLRGYGIREVNLLNKEIMRVVRYILKQDVPSSLEDALKVAQAFMLSDDEIYSLRIIDLIDREQGEDCLLLLKSLPPAEAEKTAERVIIWARLALQEEPDHSKEGKAWRMSVAKTSVDILKILCDIQKDNLQKKDECEEMLKLFKEVASLQENFEVFLSFEDYSNSSLVADLREQHIKAHEVAQAKHKPGSTPEPIAAEVRSPSMESKLHRQALALQMSKQELEAELTLRALKDGNIKTALKKCSDLFKYHCNADTGKLLFLTCQKLCQMLADNVPVTVPVGLNLPSMIHDLASQAATICSPDFLLDALELCKHTLMAVELSRQCQMDDCGILMKASFGTHKDPYEEWSYSDFFSEDGIVLESQMVLPVIYELISSLVPLAESKRYPLESTSLPYCSLNEGDGLVLPVINSISALLQNLQESSQWELALRFVVGSFGTCLQHSVSNFMNATLSEKLFGETTLVKSRHVVMELKEKAVIFIRENATTLLHKVFNCRLVDLDLALGYCTLLPQKDVFENLWKLIDKAWQNYDKILAISLVGSELASLYQEIEMGLKFRELSTDAQWGIRLGKLGISFQPVFRQHFLTKKDLIKALVENIDMDTSLILEYCSTFQLDCDAVLQLFIETLLHNTNAGQGQGDASMDSAKRRHPKLLAKALEMVPLLTSTKDLVISLSGILHKLDPYDYEMIEVVLKVIERADEKITNININQALSILKHLKSYRRISPPVDLEYQYMLEHVITLPSAAQTRLPFHLIFFGTAQNFWKILSTELSEESFPTLLLISKLMKFSLDTLYVSTAKHVFEKKLKPKLLKLTQAKSSTLINKEITKITQTIESCLLSIVNPEWAVAIAISLAQDIPEGSFKISALKFCLYLAERWLQNIPSQDEKREKAEALLKKLHIQYRRSGTEAVLIAHKLNTEEYLRVIGKPAHLIVSLYEHPSINQRIQNSSGTDYPDIHAAAKEIAEVNEINLEKVWDMLLEKWLCPSTKPGEKPSELFELQEDEALRRVQYLLLSRPIDYSSRMLFVFATSTTTTLGMHQLTFAHRTRALQCLFYLADKETIESLFKKPIEEVKSYLRCITFLASFETLNIPITYELFCSSPKEGMIKGLWKNHSHESMAVRLVTELCLEYKIYDLQLWNGLLQKLLGFNMIPYLRKVLKAISSIHSLWQVPYFSKAWQRVIQIPLLSASCPLSPDQLSDCSESLIAVLECPVSGDLDLIGVARQYIQLELPAFALACLMLMPHSEKRHQQIKNFLGSCDPQVILKQLEEHMNTGQLAGFSHQIRSLILNNIINKKEFGILAKTKYFQMLKMHAMNTNNITELVNYLANDLRCFLVDYRKSLNLFFKKDKNFGVCY

SEQ ID NO: 875752 - protein, 1441 aa, Homo sapiens
FPFGVFALEGQIILAKWLEQAARNLELTDKANWPENGLQLAEIFFTAEKTDELGLASSWHWISLKDYQNTEEVCQLRTLVNNLRELITLHRKYNCKLALSDFEKENTTTIVFRMFDKVLAPELIPSILEKFIRVYMREHDLQEEELLLLYIEDLLNRCSSKSTSLFETAWEAKAMAVIACLSDTDLIFDAVLKIMYAAVVPWSAAVEQLVKQHLEMDHPKVKLLQESYKLMEMKKLLRGYGIREVNLLNKEIMRVVRYILKQDVPSSLEDALKVAQAFMLSDDEIYSLRIIDLIDREQGEDCLLLLKSLPPAEAEKTAERVIIWARLALQEEPDHSKEGKAWRMSVAKTSVDILKILCDIQKDNLQKKDECEEMLKLFKEVASLQENFEVFLSFEDYSNSSLVADLREQHIKAHEVAQAKHKPGSTPEPIAAEVRSPSMESKLHRQALALQMSKQELEAELTLRALKDGNIKTALKKCSDLFKYHCNADTGKLLFLTCQKLCQMLADNVPVTVPVGLNLPSMIHDLASQAATICSPDFLLDALELCKHTLMAVELSRQCQMDDCGILMKASFGTHKDPYEEWSYSDFFSEDGIVLESQMVLPVIYELISSLVPLAESKRYPLESTSLPYCSLNEGDGLVLPVINSISALLQNLQESSQWELALRFVVGSFGTCLQHSVSNFMNATLSEKLFGETTLVKSRHVVMELKEKAVIFIRENATTLLHKVFNCRLVDLDLALGYCTLLPQKDVFENLWKLIDKAWQNYDKILAISLVGSELASLYQEIEMGLKFRELSTDAQWGIRLGKLGISFQPVFRQHFLTKKDLIKALVENIDMDTSLILEYCSTFQLDCDAVLQLFIETLLHNTNAGQGQGDASMDSAKRRHPKLLAKALEMVPLLTSTKDLVISLSGILHKLDPYDYEMIEVVLKVIERADEKITNININQALSILKHLKSYRRISPPVDLEYQYMLEHVITLPSAAQTRLPFHLIFFGTAQNFWKILSTELSEESFPTLLLISKLMKFSLDTLYVSTAKHVFEKKLKPKLLKLTQAKSSTLINKEITKITQTIESCLLSIVNPEWAVAIAISLAQDIPEGSFKISALKFCLYLAERWLQNIPSQDEKREKAEALLKKLHIQYRRSGTEAVLIAHKLNTEEYLRVIGKPAHLIVSLYEHPSINQRIQNSSGTDYPDIHAAAKEIAEVNEINLEKVWDMLLEKWLCPSTKPGEKPSELFELQEDEALRRVQYLLLSRPIDYSSRMLFVFATSTTTTLGMHQLTFAHRTRALQCLFYLADKETIESLFKKPIEEVKSYLRCITFLASFETLNIPITYELFCSSPKEGMIKGLWKNHSHESMAVRLVTELCLEYKIYDLQLWNGLLQKLLGFNMIPYLRKVLKAISSIHSLWQVPYFSKAWQRVIQIPLLSASCPLSPDQQKKIKKFVQSNFL

SEQ ID NO: 875753 - protein, 1038 aa, Homo sapiens
FPFGVFALEGQIILAKWLEQAARNLELTDKANWPENGLQLAEIFFTAEKTDELGLASSWHWISLKDYQNTEEVCQLRTLVNNLRELITLHRKYNCKLALSDFEKENTTTIVFRMFDKVLAPELIPSILEKFIRVYMREHDLQEEELLLLYIEDLLNRCSSKSTSLFETAWEAKAMAVIACLSDTDLIFDAVLKIMYAAVVPWSAAVEQLVKQHLEMDHPKVKLLQESYKLMEMKKLLRGYGIREVNLLNKEIMRVVRYILKQDVPSSLEDALKVAQAFMLSDDEIYSLRIIDLIDREQGEDCLLLLKSLPPAEAEKTAERVIIWARLALQEEPDHSKEGKAWRMSVAKTSVDILKILCDIQKDNLQKKDECEEMLKLFKEVASLQENFEVFLSFEDYSNSSLVADLREQHIKAHEVAQAKHKPGSTPEPIAAEVRSPSMESKLHRQALALQMSKQELEAELTLRALKDGNIKTALKKCSDLFKYHCNADTGKLLFLTCQKLCQMLADNVPVTVPVGLNLPSMIHDLASQAATICSPDFLLDALELCKHTLMAVELSRQCQMDDCGILMKASFGTHKDPYEEWSYSDFFSEDGIVLESQMVLPVIYELISSLVPLAESKRYPLESTSLPYCSLNEGDGLVLPVINSISALLQNLQESSQWELALRFVVGSFGTCLQHSVSNFMNATLSEKLFGETTLVKSRHVVMELKEKAVIFIRENATTLLHKVFNCRLVDLDLALGYCTLLPQKDVFENLWKLIDKAWQNYDKILAISLVGSELASLYQEIEMGLKFRELSTDAQWGIRLGKLGISFQPVFRQHFLTKKDLIKALVENIDMDTSLILEYCSTFQLDCDAVLQLFIETLLHNTNAGQGQGDASMDSAKRRHPKLLAKALEMVPLLTSTKDLVISLSGILHKLDPYDYEMIEVVLKVIERADEKITNININQALSILKHLKSYRRISPPVDLEYQYMLEHVITLPSAAQTRLPFHLIFFGTAQNFWKILSTELSEESFPTLLLISKLMKFSLDTLYVSTAKHVFVTRK

SEQ ID NO: 875754 - protein, 2209 aa, Homo sapiens
MWNDIELLTNDDTGSGYLSVGSRKEHGTALYQVDLLVKISSEKASLNPKIQACSLSDGFIIVADQSVILLDSICRSLQLHLVFDTEVDVVGLCQEGKFLLVGERSGNLHLIHVTSKQTLLTNAFVQKANDENRRTYQNLVIEKDGSNEGTYYMLLLTYSGFFCITNLQLLKIQQAIENVDFSTAKKLQGQIKSSFISTENYHTLGCLSLVAGDLASEVPVIIGGTGNCAFSKWEPDSSKKGMTVKNLIDAEIIKGAKKFQLIDNLLFVLDTDNVLSLWDIYTLTPVWNWPSLHVEEFLLTTEADSPSSVTWQGITNLKLIALTASANKKMKNLMVYSLPTMEILYSLEVSSVSSLVQTGISTDTIYLLEGVCKNDPKLSEDSVSVLVLRCLTEALPENRLSRLLHKHRFAEAESFAIQFGLDVELVYKVKSNHILEKLALSSVDASEQTEWQQLVDDAKENLHKIQDDEFVVNYCLKAQWITYETTQEMLNYAKTRLLKKEDKTALIYSDGLKEVLRAHAKLTTFYGAFGPEKFSGSSWIEFLNNEDDLKDIFLQLKEGNLVCAQYLWLRHRANFESRFDVKMLESLLNSMSASVSLQKLCPWFKNDVIPFVRRTVPEGQIILAKWLEQAARNLELTDKANWPENGLQLAEIFFTAEKTDELGLASSWHWISLKDYQNTEEVCQLRTLVNNLRELITLHRKYNCKLALSDFEKENTTTIVFRMFDKVLAPELIPSILEKFIRVYMREHDLQEEELLLLYIEDLLNRCSSKSTSLFETAWEAKAMAVIACLSDTDLIFDAVLKIMYAAVVPWSAAVEQLVKQHLEMDHPKVKLLQESYKLMEMKKLLRGYGIREVNLLNKEIMRVVRYILKQDVPSSLEDALKVAQAFMLSDDEIYSLRIIDLIDREQGEDCLLLLKSLPPAEAEKTAERVIIWARLALQEEPDHSKEGKAWRMSVAKTSVDILKILCDIQKDNLQKKDECEEMLKLFKEVASLQENFEVFLSFEDYSNSSLVADLREQHIKAHEVAQAKHKPGSTPEPIAAEVRSPSMESKLHRQALALQMSKQELEAELTLRALKDGNIKTALKKCSDLFKYHCNADTGKLLFLTCQKLCQMLADNVPVTVPVGLNLPSMIHDLASQAATICSPDFLLDALELCKHTLMAVELSRQCQMDDCGILMKASFGTHKDPYEEWSYSDFFSEDGIVLESQMVLPVIYELISSLVPLAESKRYPLESTSLPYCSLNEGDGLVLPVINSISALLQNLQESSQWELALRFVVGSFGTCLQHSVSNFMNATLSEKLFGETTLVKSRHVVMELKEKAVIFIRENATTLLHKVFNCRLVDLDLALGYCTLLPQKDVFENLWKLIDKAWQNYDKILAISLVGSELASLYQEIEMGLKFRELSTDAQWGIRLGKLGISFQPVFRQHFLTKKDLIKALVENIDMDTSLILEYCSTFQLDCDAVLQLFIETLLHNTNAGQGQGDASMDSAKRRHPKLLAKALEMVPLLTSTKDLVISLSGILHKLDPYDYEMIEVVLKVIERADEKITNININQALSILKHLKSYRRISPPVDLEYQYMLEHVITLPSAAQTRLPFHLIFFGTAQNFWKILSTELSEESFPTLLLISKLMKFSLDTLYVSTAKHVFEKKLKPKLLKLTQAKSSTLINKEITKITQTIESCLLSIVNPEWAVAIAISLAQDIPEGSFKISALKFCLYLAERWLQNIPSQDEKREKAEALLKKLHIQYRRSGTEAVLIAHKLNTEEYLRVIGKPAHLIVSLYEHPSINQRIQNSSGTDYPDIHAAAKEIAEVNEINLEKVWDMLLEKWLCPSTKPGEKPSELFELQEDEALRRVQYLLLSRPIDYSSRMLFVFATSTTTTLGMHQLTFAHRTRALQCLFYLADKETIESLFKKPIEEVKSYLRCITFLASFETLNIPITYELFCSSPKEGMIKGLWKNHSHESMAVRLVTELCLEYKIYDLQLWNGLLQKLLGFNMIPYLRKVLKAISSIHSLWQVPYFSKAWQRVIQIPLLSASCPLSPDQLSDCSESLIAVLECPVSGDLDLIGVARQYIQLELPAFALACLMLMPHSEKRHQQIKNFLGSCDPQVILKQLEEHMNTGQLAGFSHQIRSLILNNIINKKEFGILAKTKYFQMLKMHAMNTNNITELVNYLANDLSLDEASVLITEYSKHCGKPVPPDTAPCEILKMFLSGLS

SEQ ID NO: 875755 - protein, 768 aa, Homo sapiens [sequence omitted]

SEQ ID NO: 875756 - protein, 689 aa, Homo sapiens
MLDPYDYEMIEVVLKVIERADEKITNININQALSILKHLKSYRRISPPVDLEYQYMLEHVITLPSAAQTRLPFHLIFFGTAQNFWKILSTELSEESFPTLLLISKLMKFSLDTLYVSTAKHVFEKKLKPKLLKLTQAKSSTLINKEITKITQTIESCLLSIVNPEWAVAIAISLAQDIPEGSFKISALKFCLYLAERWLQNIPSQDEKREKAEALLKKLHIQYRRSGTEAVLIAHKLNTEEYLRVIGKPAHLIVSLYEHPSINQRIQNSSGTDYPDIHAAAKEIAEVNEINLEKVWDMLLEKWLCPSTKPGEKPSELFELQEDEALRRVQYLLLSRPIDYSSRMLFVFATSTTTTLGMHQLTFAHRTRALQCLFYLADKETIESLFKKPIEEVKSYLRCITFLASFETLNIPITYELFCSSPKEGMIKGLWKNHSHESMAVRLVTELCLEYKIYDLQLWNGLLQKLLGFNMIPYLRKVLKAISSIHSLWQVPYFSKAWQRVIQIPLLSASCPLSPDQLSDCSESLIAVLECPVSGDLDLIGVARQYIQLELPAFALACLMLMPHSEKRHQQIKNFLGSCDPQVILKQLEEHMNTGQLAGFSHQIRSLILNNIINKKEFGILAKTKYFQMLKMHAMNTNNITELVNYLANDLSLDEASVLITEYSKHCGKPVPPDTAPCEILKMFLSGLS

SEQ ID NO: 875757 - protein, 397 aa, Homo sapiens
GIRHEQGRLCGYRLRKDLTTELSWELTIPPEVQRIVKVKGKRSSEHVHSQGRVMGDRSVLYKTLGMHQLTFAHRTRALQCLFYLADKETIESLFKKPIEEVKSYLRCITFLASFETLNIPITYELFCSSPKEGMIKGLWKNHSHESMAVRLVTELCLEYKIYDLQLWNGLLQKLLGFNMIPYLRKVLKAISSIHSLWQVPYFSKAWQRVIQIPLLSASCPLSPDQLSDCSESLIAVLECPVSGDLDLIGVARQYIQLELPAFALACLMLMPHSEKRHQQIKNFLGSCDPQVILKQLEEHMNTGQLAGFSHQIRSLILNNIINKKEFGILAKTKYFQMLKMHAMNTNNITELVNYLANDLSLDEASVLITEYSKHCGKPVPPDTAPCEILKMFLSGLS

SEQ ID NO: 875758 - protein, 353 aa, Homo sapiens
SSLSYSRATPHTRPRTGQTLGMHQLTFAHRTRALQCLFYLADKETIESLFKKPIEEVKSYLRCITFLASFETLNIPITYELFCSSPKEGMIKGLWKNHSHESMAVRLVTELCLEYKIYDLQLWNGLLQKLLGFNMIPYLRKVLKAISSIHSLWQVPYFSKAWQRVIQIPLLSASCPLSPDQLSDCSESLIAVLECPVSGDLDLIGVARQYIQLELPAFALACLMLMPHSEKRHQQIKNFLGSCDPQVILKQLEEHMNTGQLAGFSHQIRSLILNNIINKKEFGILAKTKYFQMLKMHAMNTNNITELVNYLANDLSLDEASVLITEYSKHCGKPVPPDTAPCEILKMFLSGLS

SEQ ID NO: 875759 - protein, 130 aa, Homo sapiens
MLMPHSEKRHQQIKNFLGSCDPQVILKQLEEHMNTGQLAGFSHQIRSLILNNIINKKEFGILAKTKYFQMLKMHAMNTNNITELVNYLANDLSLDEASVLITEYSKHCGKPVPPDTAPCEILKMFLSGLS

SEQ ID NO: 875760 - protein, 1280 aa, Homo sapiens
FPFGVFALEGQIILAKWLEQAARNLELTDKANWPENGLQLAEIFFTAEKTDELGLASSWHWISLKDYQNTEEVCQLRTLVNNLRELITLHRKYNCKLALSDFEKENTTTIVFRMFDKVLAPELIPSILEKFIRVYMREHDLQEEELLLLYIEDLLNRCSSKSTSLFETAWEAKAMAVIACLSDTDLIFDAVLKIMYAAVVPWSAAVEQLVKQHLEMDHPKVKLLQESYKLMEMKKLLRGYGIREVNLLNKEIMRVVRYILKQDVPSSLEDALKVAQAFMLSDDEIYSLRIIDLIDREQGEDCLLLLKSLPPAEAEKTAERVIIWARLALQEEPDHSKEGKAWRMSVAKTSVDILKILCDIQKDNLQKKDECEEMLKLFKEVASLQENFEVFLSFEDYSNSSLVADLREQHIKAHEVAQAKHKPGSTPEPIAAEVRSPSMESKLHRQALALQMSKQELEAELTLRALKDGNIKTALKKCSDLFKYHCNADTGKLLFLTCQKLCQMLADNVPVTVPVGLNLPSMIHDLASQAATICSPDFLLDALELCKHTLMAVELSRQCQMDDCGILMKASFGTHKDPYEEWSYSDFFSEDGIVLESQMVLPVIYELISSLVPLAESKRYPLESTSLPYCSLNEGDGLVLPVINSISALLQNLQESSQWELALRFVVGSFGTCLQHSVSNFMNATLSEKLFGETTLVKSRHVVMELKEKAVIFIRENATTLLHKVFNCRLVDLDLALGYCTLLPQKDVFENLWKLIDKAWQNYDKILAISLVGSELASLYQEIEMGLKFRELSTDAQWGIRLGKLGISFQPVFRQHFLTKKDLIKALVENIDMDTSLILEYCSTFQLDCDAVLQLFIETLLHNTNAGQGQGDASMDSAKRRHPKLLAKALEMVPLLTSTKDLVISLSGILHKLDPYDYEMIEVVLKVIERADEKITNININQALSILKHLKSYRRISPPVDLEYQYMLEHVITLPSAAQTRLPFHLIFFGTAQNFWKILSTELSEESFPTLLLISKLMKFSLDTLYVSTAKHVFEKKLKPKLLKLTQAKSSTLINKEITKITQTIESCLLSIVNPEWAVAIAISLAQDIPEGSFKISALKFCLYLAERWLQNIPSQDEKREKAEALLKKLHIQYRRSGTEAVLIAHKLNTEEYLRVIGKPAHLIVSLYEHPSINQRIQNSSGTDYPDIHAAAKEIAEVNEINLEKVWDMLLEKWLCPSTKPGEKPSELFELQEDEALRRVQYLLLSRPIDYSSRMLFVFATSTTTVSSRNLIQTLLCISA

SEQ ID NO: 875761 - protein, 74 aa, Homo sapiens
RQSLAPKGLATSTMKTAVPTDSAISPAGSHPKEISQKEKAILRKDDHCVITQNSPKLGNTQLSSNRGSELQNIN

SEQ ID NO: 875762 - protein, 179 aa, Homo sapiens
ARQQVGAFSRARARVEALYITFPESSVPLPAGSARLPSSRRVLLGLSEPHTPRSSCHSRRLRGGSPAPRLSLGAASPRPRPPSLPLPLPLPFPLFLPTRPAERAWIRSRRASEWVGKMEVPRLDHALNSPTSPCEEVIKNLSLEAIQLCDRDGKSGRDREERDRVRAEAPGPLWLRRRR

SEQ ID NO: 875763 - protein, 493 aa, Homo sapiens
ARQQVGAFSRARARVEALYITFPESSVPLPAGSARLPSSRRVLLGLSEPHTPRSSCHSRRLRGGSPAPRLSLGAASPRPRPPSLPLPLPLPFPLFLPTRPAERAWIRSRRASEWVGKMEVPRLDHALNSPTSPCEEVIKNLSLEAIQLCDRDGNKSQDSGIAEMEELPVPHNIKISNITCDSFKISWEMDSKSKDRITHYFIDLNKKENKNSNKFKHKDVPTKLVAKAVPLPMTVRGHWFLSPRTEYTVAVQTASKQVDGDYVVSEWSEIIEFCTADYSKVHLTQLLEKAEVIAGRMLKFSVFYRNQHKEYFDYVREHHGNAMQPSVKDNSGSHGSPISGKLEGIFFSCSTEFNTGKPPQDSPYGRYRFEIAAEKLFNPNTNLYFGDFYCMYTAYHYVILVIAPVGSPGDEFCKQRLPQLNSKDNKFLTCTEEDGVLVYHHAQDVILEVIYTDPVDLSLGTVAEITGHQLMSLSTANAKKDPSCKTCNISVGR

SEQ ID NO: 875764 - protein, 493 aa, Homo sapiens; identical to SEQ ID NO: 875763

SEQ ID NO: 875765 - protein, 406 aa, Homo sapiens
MEVPRLDHALNSPTSPCEEVIKNLSLEAIQLCDRDVFLKNLHPNRQEKDKSTIGSWQVITFEVINWNKSQDSGIAEMEELPVPHNIKISNITCDSFKISWEMDSKSKDRITHYFIDLNKKENKNSNKFKHKDVPTKLVAKAVPLPMTVRGHWFLSPRTEYTVAVQTASKQVDGDYVVSEWSEIIEFCTADYSKVHLTQLLEKAEVIAGRMLKFSVFYRNQHKEYFDYVREHHGNAMQPSVKDNSGSHGSPISGKLEGIFFSCSTEFNTGKPPQDSPYGRYRFEIAAEKLFNPNTNLYFGDFYCMYTAYHYVILVIAPVGSPGDEFCKQRLPQLNSKDNKFLTCTEEDGVLVYHHAQDVILEVIYTDPVDLSLGTVAEITGHQLMSLSTANAKKDPSCKTCNISVGR

SEQ ID NO: 875766 - protein, 316 aa, Homo sapiens
ARQQVGAFSRARARVEALYITFPESSVPLPAGSARLPSSRRVLLGLSEPHTPRSSCHSRRLRGGSPAPRLSLGAASPRPRPPSLPLPLPLPFPLFLPTRPAERAWIRSRRASEWVGKMEVPRLDHALNSPTSPCEEVIKNLSLEAIQLCDRDGNKSQDSGIAEMEELPVPHNIKISNITCDSFKISWEMDSKSKDRITHYFIDLNKKENKNSNKFKHKDVPTKLVAKAVPLPMTVRGHWFLSPRTEYTVAVQTASKQVDGDYVVSEWSEIIEFCTADYSKVHLTQLLEKAEVIAGRMLKFSVFYRNQHKEYFDYVR

SEQ ID NO: 875767 - protein, 306 aa, Homo sapiens
ARQQVGAFSRARARVEALYITFPESSVPLPAGSARLPSSRRVLLGLSEPHTPRSSCHSRRLRGGSPAPRLSLGAASPRPRPPSLPLPLPLPFPLFLPTRPAERAWIRSRRASEWVGKMEVPRLDHALNSPTSPCEEVIKNLSLEAIQLCDRDGNKSQDSGIAEMEELPVPHNIKISNITCDSFKISWEMDSKSKDRITHYFIDLNKKENKNSNKFKHKDVPTKLVAKAVPLPMTVRGHWFLSPRTEYTVAVQTASKQVDGDYVVSEWSEIIEFCTAGKRTRYKYRKALVVLGKLIIEKYFFFVIIK

SEQ ID NO: 875768 - protein, 493 aa, Homo sapiens; identical to SEQ ID NO: 875763

SEQ ID NO: 875769 - protein, 493 aa, Homo sapiens; identical to SEQ ID NO: 875763

SEQ ID NO: 875770 - protein, 350 aa, Homo sapiens [sequence omitted]

SEQ ID NO: 875771 - protein, 171 aa, Homo sapiens [sequence omitted]

SEQ ID NO: 875772 - protein, 113 aa, Homo sapiens
PHVAHRPWVGQACSKCLVFFPQFTSSYLHAKWAADTRQSLGKIYSFNTNIIYKGKGRSLKEHRKPKDLIERLLRTSSFLQLCQKVTKLLAGPARQGSQADNGALAELSARVRF

SEQ ID NO: 875773 - protein, 1319 aa, Homo sapiens
FAPAPPLLLRGVLKQPGEVEPPPGSPTSRTPPASAALRGHSMTARGLALGLLLLLLCPAQVFSQSCVWYGECGIAYGDKRYNCEYSGPPKPLPKDGYDLVQELCPGFFFGNVSLCCDVRQLQTLKDNLQLPLQFLSRCPSCFYNLLNLFCELTCSPRQSQFLNVTATEDYVDPVTNQTKTNVKELQYYVGQSFANAMYNACRDVEAPSSNDKALGLLCGKDADACNATNWIEYMFNKDNGQAPFTITPVFSDFPVHGMEPMNNATKGCDESVDEVTAPCSCQDCSIVCGPKPQPPPPPAPWTILGLDAMYVIMWITYMAFLLVFFGAFFAVWCYRKRYFVSEYTPIDSNIAFSVNASDKGEASCCDPVSAAFEGCLRRLFTRWGSFCVRNPGCVIFFSLVFITACSSGLVFVRVTTNPVDLWSAPSSQARLEKEYFDQHFGPFFRTEQLIIRAPLTDKHIYQPYPSGADVPFGPPLDIQILHQVLDLQIAIENITASYDNETVTLQDICLAPLSPYNTNCTILSVLNYFQNSHSVLDHKKGDDFFVYADYHTHFLYCVRAPASLNDTSLLHDPCLGTFGGPVFPWLVLGGYDDQNYNNATALVITFPVNNYYNDTEKLQRAQAWEKEFINFVKNYKNPNLTISFTAERSIEDELNRESDSDVFTVVISYAIMFLYISLALGHIKSCRRLLVDSKVSLGIAGILIVLSSVACSLGVFSYIGLPLTLIVIEVIPFLVLAVGVDNIFILVQAYQRDERLQGETLDQQLGRVLGEVAPSMFLSSFSETVAFFLGALSVMPAVHTFSLFAGLAVFIDFLLQITCFVSLLGLDIKRQEKNRLDIFCCVRGAEDGTSVQASESCLFRFFKNSYSPLLLKDWMRPIVIAIFVGVLSFSIAVLNKVDIGLDQSLSMPDDSYMVDYFKSISQYLHAGPPVYFVLEEGHDYTSSKGQNMVCGGMGCNNDSLVQQIFNAAQLDNYTRIGFAPSSWIDDYFDWVKPQSSCCRVDNITDQFCNASVVDPACVRCRPLTPEGKQRPQGGDFMRFLPMFLSDNPNPKCGKGGHAAYSSAVNILLGHGTRVGATYFMTYHTVLQTSADFIDALKKARLIASNVTETMGINGSAYRVFPYSVFYVFYEQYLTIIDDTIFNLGVSLGAIFLVTMVLLGCELWSAVIMCATIAMVLVNMFGVMWLWGISLNAVSLVNLVMSCGISVEFCSHITRAFTVSMKGSRVERAEEALAHMGSSVFSGITLTKFGGIVVLAFAKSQIFQIFYFRMYLAMVLLGATHGLIFLPVLLSYIGPSVNKAKSCATEERYKGTERERLLNF

SEQ ID NO: 875774 - protein, 1259 aa, Homo sapiens
FAPAPPLLLRGVLKQPGEVEPPPGSPTSRTPPASAALRGHSMTARGLALGLLLLLLCPAQVFSQSCVWYGECGIAYGDKRYNCEYSGPPKPLPKDGYDLVQELCPGFFFGNVSLCCDVRQLQTLKDNLQLPLQFLSRCPSCFYNLLNLFCELTCSPRQSQFLNVTATEDYVDPVTNQTKTNVKELQYYVGQSFANAMYNACRDVEAPSSNDKALGLLCGKDADACNATNWIEYMFNKDNGQAPFTITPVFSDFPVHGMEPMNNATKGCDESVDEVTAPCSCQDCSIVCGPKPQPPPPPAPWTILGLDAMYVIMWITYMAFLLVFFGAFFAVWCYRKRYFVSEYTPIDSNIAFSVNASDKGEASCCDPVSAAFEGCLRRLFTRWGSFCVRNPGCVIFFSLVFITACSSGLVFVRVTTNPVDLWSAPSSQARLEKEYFDQHFGPFFRTEQLIIRAPLTDKHIYQPYPSGADVPFGPPLDIQILHQVLDLQIAIENITASYDNETVTLQDICLAPLSPYNTNCTILSVLNYFQNSHSVLDHKKGDDFFVYADYHTHFLYCVRAPASLNDTSLLHDPCLGTFGGPVFPWLVLGGYDDQNYNNATALVITFPVNNYYNDTEKLQRAQAWEKEFINFVKNYKNPNLTISFTAERSIEDELNRESDSDVFTVVISYAIMFLYISLALGHIKSCRRLLVDSKVSLGIAGILIVLSSVACSLGVFSYIGLPLTLIVIEVIPFLVLAVGVDNIFILVQAYQRDERLQGETLDQQLGRVLGEVAPSMFLSSFSETVAFFLGALSVMPAVHTFSLFAGLAVFIDFLLQITCFVSLLGLDIKRQEKNRLDIFCCVRGAEDGTSVQASESCLFRFFKNSYSPLLLKDWMRPIVIAIFVGVLSFSIAVLNKVDIGLDQSLSMPDDSYMVDYFKSISQYLHAGPPVYFVLEEGHDYTSSKGQNMVCGGMGCNNDSLVQQIFNAAQLDNYTRIGFAPSSWIDDYFDWVKPQSSCCRVDNITDQFCNASVVDPACVRCRPLTPEGKQRPQGGDFMRFLPMFLSDNPNPKCGKGGHAAYSSAVNILLGHGTRVGATYFMTYHTVLQTSADFIDALKKARLIASNVTETMGINGSAYRVFPYSVFYVFYEQYLTIIDDTIFNLGVSLGAIFLVTMVLLGCELWSAVIMCATIAMVLVNMFGVMWLWGISLNAVSLVNLVMSCGISVEFCSHITRAFTVSMKGSRVERAEEALAHMGSSVSTLSRATPAESHHKVILLSD

SEQ ID NO: 875775 - protein, 1355 aa, Homo sapiens
FAPAPPLLLRGVLKQPGEVEPPPGSPTSRTPPASAALRGHSMTARGLALGLLLLLLCPAQVFSQSCVWYGECGIAYGDKRYNCEYSGPPKPLPKDGYDLVQELCPGFFFGNVSLCCDVRQLQTLKDNLQLPLQFLSRCPSCFYNLLNLFCELTCSPRQSQFLNVTATEDYVDPVTNQTKTNVKELQYYVGQSFANAMYNACRDVEAPSSNDKALGLLCGKDADACNATNWIEYMFNKDNGQAPFTITPVFSDFPVHGMEPMNNATKGCDESVDEVTAPCSCQDCSIVCGPKPQPPPPPAPWTILGLDAMYVIMWITYMAFLLVFFGAFFAVWCYRKRYFVSEYTPIDSNIAFSVNASDKGEASCCDPVSAAFEGCLRRLFTRWGSFCVRNPGCVIFFSLVFITACSSGLVFVRVTTNPVDLWSAPSSQARLEKEYFDQHFGPFFRTEQLIIRAPLTDKHIYQPYPSGADVPFGPPLDIQILHQVLDLQIAIENITASYDNETVTLQDICLAPLSPYNTNCTILSVLNYFQNSHSVLDHKKGDDFFVYADYHTHFLYCVRAPASLNDTSLLHDPCLGTFGGPVFPWLVLGGYDDQNYNNATALVITFPVNNYYNDTEKLQRAQAWEKEFINFVKNYKNPNLTISFTAERSIEDELNRESDSDVFTVVISYAIMFLYISLALGHIKSCRRLLVDSKVSLGIAGILIVLSSVACSLGVFSYIGLPLTLIVIEVIPFLVLAVGVDNIFILVQAYQRDERLQGETLDQQLGRVLGEVAPSMFLSSFSETVAFFLGALSVMPAVHTFSLFAGLAVFIDFLLQITCFVSLLGLDIKRQEKNRLDIFCCVRGAEDGTSVQASESCLFRFFKNSYSPLLLKDWMRPIVIAIFVGVLSFSIAVLNKVDIGLDQSLSMPDDSYMVDYFKSISQYLHAGPPVYFVLEEGHDYTSSKGQNMVCGGMGCNNDSLVQQIFNAAQLDNYTRIGFAPSSWIDDYFDWVKPQSSCCRVDNITDQFCNASVVDPACVRCRPLTPEGKQRPQGGDFMRFLPMFLSDNPNPKCGKGGHAAYSSAVNILLGHGTRVGATYFMTYHTVLQTSADFIDALKKARLIASNVTETMGINGSAYRVFPYSVFYVFYEQYLTIIDDTIFNLGVSLGAIFLVTMVLLGCELWSAVIMCATIAMVLVNMFGVMWLWGISLNAVSLVNLVMSCGISVEFCSHITRAFTVSMKGSRVERAEEALAHMGSSVFSGITLTKFGGIVVLAFAKSQIFQIFYFRMYLAMVLLGATHGLIFLPVLLSYIARTASKFLALSQGILTELCLRVGRFTTGRVLHRQGQVEHRMVPTIGCLAAALNVAPVNSGMHS

SEQ ID NO: 875776 - protein, 1319 aa, Homo sapiens; identical to SEQ ID NO: 875773

SEQ ID NO: 875777 - protein, 100 aa, Homo sapiens
RTRGSTHASGVHLPTWASSVFSGITLTKFGGIVVLAFAKSQIFQIFYFRMYLAMVLLGATHGLIFLPVLLSYIGPSVNKAKSCATEERYKGTERERLLNF

SEQ ID NO: 875778 - protein, 1327 aa, Homo sapiens
FAPAPPLLLRGVLKQPGEVEPPPGSPTSRTPPASAALRGHSMTARGLALGLLLLLLCPAQVFSQSCVWYGECGIAYGDKRYNCEYSGPPKPLPKDGYDLVQELCPGFFFGNVSLCCDVRQLQTLKDNLQLPLQFLSRCPSCFYNLLNLFCELTCSPRQSQFLNVTATEDYVDPVTNQTKTNVKELQYYVGQSFANAMYNACRDVEAPSSNDKALGLLCGKDADACNATNWIEYMFNKDNGQAPFTITPVFSDFPVHGMEPMNNATKGCDESVDEVTAPCSCQDCSIVCGPKPQPPPPPAPWTILGLDAMYVIMWITYMAFLLVFFGAFFAVWCYRKRYFVSEYTPIDSNIAFSVNASDKGEASCCDPVSAAFEGCLRRLFTRWGSFCVRNPGCVIFFSLVFITACSSGLVFVRVTTNPVDLWSAPSSQARLEKEYFDQHFGPFFRTEQLIIRAPLTDKHIYQPYPSGADVPFGPPLDIQILHQVLDLQIAIENITASYDNETVTLQDICLAPLSPYNTNCTILSVLNYFQNSHSVLDHKKGDDFFVYADYHTHFLYCVRAPASLNDTSLLHDPCLGTFGGPVFPWLVLGGYDDQNYNNATALVITFPVNNYYNDTEKLQRAQAWEKEFINFVKNYKNPNLTISFTAERSIEDELNRESDSDVFTVVISYAIMFLYISLALGHIKSCRRLLVDSKVSLGIAGILIVLSSVACSLGVFSYIGLPLTLIVIEVIPFLVLAVGVDNIFILVQAYQRDERLQGETLDQQLGRVLGEVAPSMFLSSFSETVAFFLGALSVMPAVHTFSLFAGLAVFIDFLLQITCFVSLLGLDIKRQEKNRLDIFCCVRGAEDGTSVQASESCLFRFFKNSYSPLLLKDWMRPIVIAIFVGVLSFSIAVLNKVDIGLDQSLSMPDDSYMVDYFKSISQYLHAGPPVYFVLEEGHDYTSSKGQNMVCGGMGCNNDSLVQQIFNAAQLDNYTRIGFAPSSWIDDYFDWVKPQSSCCRVDNITDQFCNASVVDPACVRCRPLTPEGKQRPQGGDFMRFLPMFLSDNPNPKCGKGGHAAYSSAVNILLGHGTRVGATYFMTYHTVLQTSADFIDALKKARLIASNVTETMGINGSAYRVFPYSVFYVFYEQYLTIIDDTIFNLGVSLGAIFLVTMVLLGCELWSAVIMCATIAMVLVNMFGVMWLWGISLNAVSLVNLVMSCGISVEFCSHITRAFTVSMKGSRVERAEEALAHMGSSVFSGITLTKFGGIVVLAFAKSQIFQIFYFRMYLAMVLLGATHGLIFLPVLLSYIAKLLERTIYLCISQHIHYATQMAPLQCLMTASDRC

SEQ ID NO: 875779 - protein, 1259 aa, Homo sapiens; identical to SEQ ID NO: 875774

SEQ ID NO: 875780 - protein, 594 aa, Homo sapiens
FAPAPPLLLRGVLKQPGEVEPPPGSPTSRTPPASAALRGHSMTARGLALGLLLLLLCPAQVFSQSCVWYGECGIAYGDKRYNCEYSGPPKPLPKDGYDLVQELCPGFFFGNVSLCCDVRQLQTLKDNLQLPLQFLSRCPSCFYNLLNLFCELTCSPRQSQFLNVTATEDYVDPVTNQTKTNVKELQYYVGQSFANAMYNACRDVEAPSSNDKALGLLCGKDADACNATNWIEYMFNKDNGQAPFTITPVFSDFPVHGMEPMNNATKGCDESVDEVTAPCSCQDCSIVCGPKPQPPPPPAPWTILGLDAMYVIMWITYMAFLLVFFGAFFAVWCYRKRYFVSEYTPIDSNIAFSVNASDKGEASCCDPVSAAFEGCLRRLFTRWGSFCVRNPGCVIFFSLVFITACSSGLVFVRVTTNPVDLWSAPSSQARLEKEYFDQHFGPFFRTEQLIIRAPLTDKHIYQPYPSGADVPFGPPLDIQILHQVLDLQIAIENITASYDNETVTLQDICLAPLSPYNTNCTILSVLNYFQNSHSVLDHKKGDDFFVYADYHTHFLYCVRAPASLNDTSLLHDPCLGTFGGPVFPWLVLGGYDGK

SEQ ID NO: 875781 - protein, 697 aa, Homo sapiens
  misc_feature (672)..(672): Xaa can be any naturally occurring amino acid
  misc_feature (675)..(676): Xaa can be any naturally occurring amino acid
FAPAPPLLLRGVLKQPGEVEPPPGSPTSRTPPASAALRGHSMTARGLALGLLLLLLCPAQVFSQSCVWYGECGIAYGDKRYNCEYSGPPKPLPKDGYDLVQELCPGFFFGNVSLCCDVRQLQTLKDNLQLPLQFLSRCPSCFYNLLNLFCELTCSPRQSQFLNVTATEDYVDPVTNQTKTNVKELQYYVGQSFANAMYNACRDVEAPSSNDKALGLLCGKDADACNATNWIEYMFNKDNGQAPFTITPVFSDFPVHGMEPMNNATKGCDESVDEVTAPCSCQDCSIVCGPKPQPPPPPAPWTILGLDAMYVIMWITYMAFLLVFFGAFFAVWCYRKRYFVSEYTPIDSNIAFSVNASDKGEASCCDPVSAAFEGCLRRLFTRWGSFCVRNPGCVIFFSLVFITACSSGLVFVRVTTNPVDLWSAPSSQARLEKEYFDQHFGPFFRTEQLIIRAPLTDKHIYQPYPSGADVPFGPPLDIQILHQVLDLQIAIENITASYDNETVTLQDICLAPLSPYNTNCTILSVLNYFQNSHSVLDHKKGDDFFVYADYHTHFLYCVRAPASLNDTSLLHDPCLGTFGGPVFPWLVLGGYDDQNYNNATALVITFPVNNYYNDTEKLQRAQAWEKEFINFVKNYKNPNLTISFTAERSIEDELNRESDSDVFTVVISQKKXINXXIYNYKIIIIFIFFINIFIIIY

SEQ ID NO: 875782 - protein, 1319 aa, Homo sapiens; identical to SEQ ID NO: 875773

SEQ ID NO: 875783 - protein, 1011 aa, Homo sapiens
MGLQECPKNNLTVMKSTNAISSLLFFRKRYFVSEYTPIDSNIAFSVNASDKGEASCCDPVSAAFEGCLRRLFTRWGSFCVRNPGCVIFFSLVFITACSSGLVFVRVTTNPVDLWSAPSSQARLEKEYFDQHFGPFFRTEQLIIRAPLTDKHIYQPYPSGADVPFGPPLDIQILHQVLDLQIAIENITASYDNETVTLQDICLAPLSPYNTNCTILSVLNYFQNSHSVLDHKKGDDFFVYADYHTHFLYCVRAPASLNDTSLLHDPCLGTFGGPVFPWLVLGGYDDQNYNNATALVITFPVNNYYNDTEKLQRAQAWEKEFINFVKNYKNPNLTISFTAERSIEDELNRESDSDVFTVVISYAIMFLYISLALGHIKSCRRLLVDSKVSLGIAGILIVLSSVACSLGVFSYIGLPLTLIVIEVIPFLVLAVGVDNIFILVQAYQRDERLQGETLDQQLGRVLGEVAPSMFLSSFSETVAFFLGALSVMPAVHTFSLFAGLAVFIDFLLQITCFVSLLGLDIKRQEKNRLDIFCCVRGAEDGTSVQASESCLFRFFKNSYSPLLLKDWMRPIVIAIFVGVLSFSIAVLNKVDIGLDQSLSMPDDSYMVDYFKSISQYLHAGPPVYFVLEEGHDYTSSKGQNMVCGGMGCNNDSLVQQIFNAAQLDNYTRIGFAPSSWIDDYFDWVKPQSSCCRVDNITDQFCNASVVDPACVRCRPLTPEGKQRPQGGDFMRFLPMFLSDNPNPKCGKGGHAAYSSAVNILLGHGTRVGATYFMTYHTVLQTSADFIDALKKARLIASNVTETMGINGSAYRVFPYSVFYVFYEQYLTIIDDTIFNLGVSLGAIFLVTMVLLGCELWSAVIMCATIAMVLVNMFGVMWLWGISLNAVSLVNLVMSCGISVEFCSHITRAFTVSMKGSRVERAEEALAHMGSSVFSGITLTKFGGIVVLAFAKSQIFQIFYFRMYLAMVLLGATHGLIFLPVLLSYIGPSVNKAKSCATEERYKGTERERLLNF

SEQ ID NO: 875784 - protein, 1433 aa, Homo sapiens
FAPAPPLLLRGVLKQPGEVEPPPGSPTSRTPPASAALRGHSMTARGLALGLLLLLLCPAQVFSQSCVWYGECGIAYGDKRYNCEYSGPPKPLPKDGYDLVQELCPGFFFGNVSLCCDVRQLQTLKDNLQLPLQFLSRCPSCFYNLLNLFCELTCSPRQSQFLNVTATEDYVDPVTNQTKTNVKELQYYVGQSFANAMYNACRDVEAPSSNDKALGLLCGKDADACNATNWIEYMFNKDNGQAPFTITPVFSDFPVHGMEPMNNATKGCDESVDEVTAPCSCQDCSIVCGPKPQPPPPPAPWTILGLDAMYVIMWITYMAFLLVFFGAFFAVWCYRKRYFVSEYTPIDSNIAFSVNASDKGEASCCDPVSAAFEGCLRRLFTRWGSFCVRNPGCVIFFSLVFITACSSGLVFVRVTTNPVDLWSAPSSQARLEKEYFDQHFGPFFRTEQLIIRAPLTDKHIYQPYPSGADVPFGPPLDIQILHQVLDLQIAIENITASYDNETVTLQDICLAPLSPYNTNCTILSVLNYFQNSHSVLDHKKGDDFFVYADYHTHFLYCVRAPASLNDTSLLHDPCLGTFGGPVFPWLVLGGYDDQNYNNATALVITFPVNNYYNDTEKLQRAQAWEKEFINFVKNYKNPNLTISFTAERSIEDELNRESDSDVFTVVISYAIMFLYISLALGHIKSCRRLLVDSKVSLGIAGILIVLSSVACSLGVFSYIGLPLTLIVIEVIPFLVLAVGVDNIFILVQAYQRDERLQGETLDQQLGRVLGEVAPSMFLSSFSETVAFFLGALSVMPAVHTFSLFAGLAVFIDFLLQITCFVSLLGLDIKRQEKNRLDIFCCVRGAEDGTSVQASESCLFRFFKNSYSPLLLKDWMRPIVIAIFVGVLSFSIAVLNKVDIGLDQSLSMPDDSYMVDYFKSISQYLHAGPPVYFVLEEGHDYTSSKGQNMVCGGMGCNNDSLVQQIFNAAQLDNYVSTTLSCTSEAAEEALSQAVSSGLKCLTENRLSWKSCFYAKCMLNLALPEKTFERTNLPPNTLKAFFIKCSCSFSFDCEQYKNVEKEVRFEEKVLKLKTSSLWSRSVTLSVLSSTRIGFAPSSWIDDYFDWVKPQSSCCRVDNITDQFCNASVVDPACVRCRPLTPEGKQRPQGGDFMRFLPMFLSDNPNPKCGKGGHAAYSSAVNILLGHGTRVGATYFMTYHTVLQTSADFIDALKKARLIASNVTETMGINGSAYRVFPYSVFYVFYEQYLTIIDDTIFNLGVSLGAIFLVTMVLLGCELWSAVIMCATIAMVLVNMFGVMWLWGISLNAVSLVNLVMSCGISVEFCSHITRAFTVSMKGSRVERAEEALAHMGSSVFSGITLTKFGGIVVLAFAKSQIFQIFYFRMYLAMVLLGATHGLIFLPVLLSYIGPSVNKAKSCATEERYKGTERERLLNF

SEQ ID NO: 875785 - protein, 1319 aa, Homo sapiens; identical to SEQ ID NO: 875773

SEQ ID NO: 875786 - protein, 1259 aa, Homo sapiens; identical to SEQ ID NO: 875774

SEQ ID NO: 875787 - protein, 1303 aa, Homo sapiens
FAPAPPLLLRGVLKQPGEVEPPPGSPTSRTPPASAALRGHSMTARGLALGLLLLLLCPAQVFSQSCVWYGECGIAYGDKRYNCEYSGPPKPLPKDGYDLVQELCPGFFFGNVSLCCDVRQLQTLKDNLQLPLQFLSRCPSCFYNLLNLFCELTCSPRQSQFLNVTATEDYVDPVTNQTKTNVKELQYYVGQSFANAMYNACRDVEAPSSNDKALGLLCGKDADACNATNWIEYMFNKDNGQAPFTITPVFSDFPVHGMEPMNNATKGCDESVDEVTAPCSCQDCSIVCGPKPQPPPPPAPWTILGLDAMYVIMWITYMAFLLVFFGAFFAVWCYRKRYFVSEYTPIDSNIAFSVNASDKGEASCCDPVSAAFEGCLRRLFTRWGSFCVRNPGCVIFFSLVFITACSSGLVFVRVTTNPVDLWSAPSSQARLEKEYFDQHFGPFFRTEQLIIRAPLTDKHIYQPYPSGADVPFGPPLDIQILHQVLDLQIAIENITASYDNETVTLQDICLAPLSPYNTNCTILSVLNYFQNSHSVLDHKKGDDFFVYADYHTHFLYCVRAPASLNDTSLLHDPCLGTFGGPVFPWLVLGGYDDQNYNNATALVITFPVNNYYNDTEKLQRAQAWEKEFINFVKNYKNPNLTISFTAERSIEDELNRESDSDVFTVVISYAIMFLYISLALGHIKSCRRLLVDSKVSLGIAGILIVLSSVACSLGVFSYIGLPLTLIVIEVIPFLVLAVGVDNIFILVQAYQRDERLQGETLDQQLGRVLGEVAPSMFLSSFSETVAFFLGALSVMPAVHTFSLFAGLAVFIDFLLQITCFVSLLGLDIKRQEKNRLDIFCCVRGAEDGTSVQASESCLFRFFKNSYSPLLLKDWMRPIVIAIFVGVLSFSIAVLNKVDIGLDQSLSMPDDSYMVDYFKSISQYLHAGPPVYFVLEEGHDYTSSKGQNMVCGGMGCNNDSLVQQIFNAAQLDNYTRIGFAPSSWIDDYFDWVKPQSSCCRVDNITDQFCNASVVDPACVRCRPLTPEGKQRPQGGDFMRFLPMFLSDNPNPKCGKGGHAAYSSAVNILLGHGTRVGATYFMTYHTVLQTSADFIDALKKARLIASNVTETMGINGSAYRVFPYSVFYVFYEQYLTIIDDTIFNLGVSLGAIFLVTMVLLGCELWSAVIMCATIAMVLVNMFGVMWLWGISLNAVSLVNLVMSCGISVEFCSHITRAFTVSMKGSRVERAEEALAHMGSSVFSGITLTKFGGIVVLAFAKSQIFQIFYFRMYLAMVLLGATHGLIFLPVLLSYIGKSSHLKRVAQ

SEQ ID NO: 875788 - protein, 852 aa, Homo sapiens
FAPAPPLLLRGVLKQPGEVEPPPGSPTSRTPPASAALRGHSMTARGLALGLLLLLLCPAQVFSQSCVWYGECGIAYGDKRYNCEYSGPPKPLPKDGYDLVQELCPGFFFGNVSLCCDVRQLQTLKDNLQLPLQFLSRCPSCFYNLLNLFCELTCSPRQSQFLNVTATEDYVDPVTNQTKTNVKELQYYVGQSFANAMYNACRDVEAPSSNDKALGLLCGKDADACNATNWIEYMFNKDNGQAPFTITPVFSDFPVHGMEPMNNATKGCDESVDEVTAPCSCQDCSIVCGPKPQPPPPPAPWTILGLDAMYVIMWITYMAFLLVFFGAFFAVWCYRKRYFVSEYTPIDSNIAFSVNASDKGEASCCDPVSAAFEGCLRRLFTRWGSFCVRNPGCVIFFSLVFITACSSGLVFVRVTTNPVDLWSAPSSQARLEKEYFDQHFGPFFRTEQLIIRAPLTDKHIYQPYPSGADVPFGPPLDIQILHQVLDLQIAIENITASYDNETVTLQDICLAPLSPYNTNCTILSVLNYFQNSHSVLDHKKGDDFFVYADYHTHFLYCVRAPASLNDTSLLHDPCLGTFGGPVFPWLVLGGYDDQNYNNATALVITFPVNNYYNDTEKLQRAQAWEKEFINFVKNYKNPNLTISFTAERSIEDELNRESDSDVFTVVISYAIMFLYISLALGHIKSCRRLLVDSKVSLGIAGILIVLSSVACSLGVFSYIGLPLTLIVIEVIPFLVLAVGVDNIFILVQAYQRDERLQGETLDQQLGRVLGEVAPSMFLSSFSETVAFFLGALSVMPAVHTFSLFAGLAVFIDFLLQITCFVSLLGLDIKRQEVSWCQDYSLFNLSLESRGSS

SEQ ID NO: 875789 - protein, 57 aa, Homo sapiens
MEFVFPFKRPFVRSCLVNYSKHLSPFSFGFPLLAMYNACRDVEAPSSNDKALGLLCG

SEQ ID NO: 875790 - protein, 107 aa, Homo sapiens
MFTRKPQPNALPAHLCHIRHLDKLGPCMHINVMDCRFVLSTSTEHSLKIQLSKKSLFTCVSKKLFIFECMTHKLDTLQELKKQIYSRDSLVNLFILKIPLVTQFSDI

SEQ ID NO: 875791 - protein, 103 aa, Homo sapiens
RPGPCSQPHSPKYMFSGCGRKPEYPDELDIIQADMGRMCTLHTDSDLSQESGFLINDIMKRHWTGWAVWLTPVILALWEAEAGGSRGQKFKTSLAKMAKPRLY

SEQ ID NO: 875792 - protein, 141 aa, Homo sapiens
  misc_feature (9)..(9): Xaa can be any naturally occurring amino acid
  misc_feature (27)..(27): Xaa can be any naturally occurring amino acid
IKVYNAHSXGATKPTSKHGPKDRPGVXKMVLGYTRAWLVMRTRRGGRFCELWDNHAEHRAATRRCGVMRESTQDKLIEKGQGTASLLGSHACSQGKGHTWMGLFIKRISGWNPIKLLAVTASQKEERGSEGGRSFSLCAPL

SEQ ID NO: 875793 - protein, 172 aa, Homo sapiens [sequence omitted]

SEQ ID NO: 875794 - protein, 289 aa, Homo sapiens
VRQRRVASRRRIRRSAKSAPARSLGLALQLPLPRRPLGLRARRDHVHQHRLQWALWSFSLSSRLEYNGVISAHCSLCLLGSNKAPLSKSLLLVPSALSLLLALLLPHCQKLFVYDLHAVKNDFQIWRLICGRIICLDLKDTFCSSLLIYNFRIFERRYGSRKFASFLLGSWVLSALFDFLLIEAMQYFFGITAASNLPSGFLAPVFALFVPFYCSIPRVQVAHKVLVSRTSITKPRTMHSYYYLGQLAALHHHPTMRIPVSRSWATLERPTYNTGEHYNCYPVNLIVRH

SEQ ID NO: 875795 - protein, 415 aa, Homo sapiens
VRQRRVASRRRIRRSAKSAPARSLGLALQLPLPRRPLGLRARRDHVHQHRLQWALWSFSLSSRLEYNGVISAHCSLCLLGSNKAPLSKSLLLVPSALSLLLALLLPHCQKLFVYDLHAVKNDFQIWRLICGRIICLDLKDTFCSSLLIYNFRIFERRYGSRKFASFLLGSWVLSALFDFLLIEAMQYFFGITAASNLPSGFLAPVFALFVPFYCSIPRVQVAQILGPLSITNKTLIYILGLQLFTSGSYIWIVAISGLMSGLCYDSKMFQVHQVLCIPSWMAKFFSWTLEPIFSSSEPTSEARIGMGATLDIQRQQRMELLDRQLMFSQFAQGRRQRQQQGGMINWNRLFPPLRQRQNVNYQGGRQSEPAAPPLEVSEEQVARLMEMGFSRGDALEALRASNNDLNVATNFLLQH

SEQ ID NO: 875796 - protein, 312 aa, Homo sapiens
RSSAASGLAAPDSSLRQECACAVAGARTSASPPPAPSGAPSPAGPCSPAPAPVGSTRRLCRRAFCWSPVPSPSCSPSSCLTARSSLCMTFTQSRTTSSLAPVFALFVPFYCSIPRVQVAQILGPLSITNKTLIYILGLQLFTSGSYIWIVAISGLMSGLCYDSKMFQVHQVLCIPSWMAKFFSWTLEPIFSSSEPTSEARIGMGATLDIQRQQRMELLDRQLMFSQFAQGRRQRQQQGGMINWNRLFPPLRQRQNVNYQGGRQSEPAAPPLEVSEEQVARLMEMGFSRGDALEALRASNNDLNVATNFLLQH

SEQ ID NO: 875797 - protein, 388 aa, Homo sapiens
FVSGEWPRGAGFVAPPRVRLRGRWGSHFSFPSPGALWGSEPGGTMFTSTGSSGLYKAPLSKSLLLVPSALSLLLALLLPHCQKLFVYDLHAVKNDFQIWRLICGRIICLDLKDTFCSSLLIYNFRIFERRYGSRKFASFLLGSWVLSALFDFLLIEAMQYFFGITAASNLPSGFLAPVFALFVPFYCSIPRVQVAQILGPLSITNKTLIYILGLQLFTSGSYIWIVAISGLMSGLCYDSKMFQVHQVLCIPSWMAKFFSWTLEPIFSSSEPTSEARIGMGATLDIQRQQRMELLDRQLMFSQFAQGRRQRQQQGGMINWNRLFPPLRQRQNVNYQGGRQSEPAAPPLEVSEEQVARLMEMGFSRGDALEALRASNNDLNVATNFLLQH

SEQ ID NO: 875798 - protein, 284 aa, Homo sapiens
FVSGEWPRGAGFVAPPRVRLRGRWGSHFSFPSPGALWGSEPGGTMFTSTGSSGLYKAPLSKSLLLVPSALSLLLALLLPHCQKLFVYDLHAVKNDFQIWRLICGRIICLDLKDTFCSSLLIYNFRIFERRYGSRKFASFLLGSWVLSALFDFLLIEAMQYFFGITAASNLPSGFLAPVFALFVPFYCSIPRVQVAQILGPLSITNKTLIYILGLQLFTSGSYIWIVAISGLIRCSASPAGWQNSFLGHLNPSSLLQNPPAKPELGWEPRWTSRDSREWSCWTGS

SEQ ID NO: 875799 - protein, 388 aa, Homo sapiens; identical to SEQ ID NO: 875797

SEQ ID NO: 875800 - protein, 388 aa, Homo sapiens; identical to SEQ ID NO: 875797

SEQ ID NO: 875801 - protein, 388 aa, Homo sapiens; identical to SEQ ID NO: 875797

SEQ ID NO: 875802 - protein, 388 aa, Homo sapiens; identical to SEQ ID NO: 875797

SEQ ID NO: 875803 - protein, 356 aa, Homo sapiens
FVSGEWPRGAGFVAPPRVRLRGRWGSHFSFPSPGALWGSEPGGTMFTSTGSSGLYKAPLSKSLLLVPSALSLLLALLLPHCQKLFVYDLHAVKNDFQIWRLICGRIICLDLKDTFCSSLLIYNFRIFERRYGSRKFASFLLGSWVLSALFDFLLIEAMQYFFGITAASNLPSGFLAPVFALFVPFYCSIPRVQVAQILGPLSITNKTLIYILGLQLFTSGSYIWIVAISGLMSGLCYDSKMFQVHQVLCIPSWMAKFFSWTLEPIFSSSEPTSEARIGMGATLDIQRQQRMELLDRQLMFSQFAQGRRQRQQQGGMINWNRLFPPLRQRQNVNYQGGRQSEPAAPPLEVSEEQTNE

SEQ ID NO: 875804 - protein, 388 aa, Homo sapiens; identical to SEQ ID NO: 875797

SEQ ID NO: 875805 - protein, 157 aa, Homo sapiens
MSGLCYDSKMFQVHQVLCIPSWMAKFFSWTLEPIFSSSEPTSEARIGMGATLDIQRQQRMELLDRQLMFSQFAQGRRQRQQQGGMINWNRLFPPLRQRQNVNYQGGRQSEPAAPPLEVSEEQVARLMEMGFSRGDALEALRASNNDLNVATNFLLQH

SEQ ID NO: 875806 - protein, 157 aa, Homo sapiens; identical to SEQ ID NO: 875805

SEQ ID NO: 875807 - protein, 254 aa, Homo sapiens
FVSGEWPRGAGFVAPPRVRLRGRWGSHFSFPSPGALWGSEPGGTMFTSTGSSGLYKAPLSKSLLLVPSALSLLLALLLPHCQKLFVYDLHAVKNDFQMSGLCYDSKMFQVHQVLCIPSWMAKFFSWTLEPIFSSSEPTSEARIGMGATLDIQRQQRMELLDRQLMFSQFAQGRRQRQQQGGMINWNRLFPPLRQRQNVNYQGGRQSEPAAPPLEVSEEQVARLMEMGFSRGDALEALRASNNDLNVATNFLLQH

SEQ ID NO: 875808 - protein, 388 aa, Homo sapiens; identical to SEQ ID NO: 875797

SEQ ID NO: 875809 - protein, 388 aa, Homo sapiens; identical to SEQ ID NO: 875797

SEQ ID NO: 875810 - protein, 388 aa, Homo sapiens; identical to SEQ ID NO: 875797

SEQ ID NO: 875811 - protein, 357 aa, Homo sapiens
FVSGEWPRGAGFVAPPRVRLRGRWGSHFSFPSPGALWGSEPGGTMFTSTGSSGLYKAPLSKSLLLVPSALSLLLALLLPHCQKLFVYDLHAVKNDFQIWRLICGRIICLDLKDTFCSSLLIYNFRIFERRYGSRKFASFLLGSWVLSALFDFLLIEAMQYFFGITAASNLPSGFLAPVFALFVPFYCSIPRVQVAQILGPLSITNKTLIYILGLQLFTSGSYIWIVAISGLMSGLCYDSKMFQVHQVLCIPSWMAKFFSWTLEPIFSSSEPTSEARIGMGATLDIQRQQRMELLDRQLMFSQFAQGRRQRQQQGGMINWNRLFPPLRQRQNVNYQGGRQSEPAAPPLEVSEEQVINQ

SEQ ID NO: 875812 - protein, 257 aa, Homo sapiens
MTSVGTNRARGNWEQPQNQNQTQHKQRPQATAEQIRLAQMISDHNDADFEEKVKQLIDITGKNQDECVIALHDCNGDVNRAINVLLEGNPDTHSWEMVGKKKGVSGQKDGGQTESNEEGKENRDRDRDYSGDVVGHQDGGEVPAVDESFEVRKMDWMAPRVEGLLEEEQKEAEGAVAEAEVALVGEEEGFLLKEWETFNPADYAEPANTDDNYGNSSGNTWNNTGHFEPDDGTSAWRTATLVPNSARGVSRDRAIAL

SEQ ID NO: 875813 - protein, 472 aa, Homo sapiens
MSITNTPTSNDACLSIVHSLMCHRQGGESETFAKRAIESLVKKLKEKKDELDSLITAITTNGAHPSKCVTIQRTLDGRLQVAGRKGFPHVIYARLWRWPDLHKNELKHVKYCQYAFDLKCDSVCVNPYHYERVVSPGIDLSGLTLQSNAPSSMMVKDEYVHDFEGQPSLSTEGHSIQTIQHPPSNRASTETYSTPALLAPSESNATSTANFPNIPVASTSQPASILGGSHSEGLLQIASGPQPGQQQNGFTGQPATYHHNSTTTWTGSRTAPYTPNLPHHQNGHLQHHPPMPPHPGHYWPVHNELAFQPPISNHPAPEYWCSIAYFEMDVQVGETFKVPSSCPIVTVDGYVDPSGGDRFCLGQLSNVHRTEAIERARLHIGKGVQLECKGEGDVWVRCLSDHAVFVQSYYLDREAGRAPGDAVHKIYPSAYIKVFDLRQCHRQMQQQAATAQSCSSCPRQQPWQETSLAQDQ

SEQ ID NO: 875814 - protein, 203 aa, Homo sapiens
MAENAAPGLISELKLAVPWGHIAAKAWGSLQGPPVLCLHGWLDNASSFDRLIPLLPQDFYYVAMDFGGHGLSSHYSPGVPYYLQTFVSEIRRVVAALKWNRFSILGHSFGGVVGGMFFCTFPEMVDKLILLDTPLFLLESDEMENLLTYKRRAIEHVLQVEASQEPSHVFSLKQLLQRQRTALTSSAGSCVRIPSGSCRPMSC

SEQ ID NO: 875815 - protein, 106 aa, Homo sapiens
MALSGQLGLPWVEWGGEHKGGRRRYLGQKVPPPVTVIVLIPGSWCKRWRLLVEFMFPRPHTRSHRTLESSHHQGLELSAGCRLRGGGGRHTIDRRFSSGLLVSTLP

SEQ ID NO: 875816 - protein, 250 aa, Homo sapiens
MSENAAPDFYYVAMDFGGHGLSSHYSPGVPYYLQTFVSEIRRVVAGGVVGGMFFCTFPEMVDKLILLDTPLFLLESDEMENLLTYKRRAIEHVLQVEASQEPSHVFSLKQLLQRLLKSNSHLSEECGELLLQRGTTKVATGLVLNRDQRLAWAENSIDFISRELCAHSIRKLQAHVLLIKAVHGYFDSRQNYSEKESLSFMIDTMKSTLKEQFQFVEVPGNHCVHMSEPQHVASIISSFLQCTHMLPAQL

SEQ ID NO: 875817 - protein, 172 aa, Homo sapiens
MDRSNPVKPALDYFSNRLVNYQISVKCSNQFKLEVCLLNAENKVVDNQAGTQGQLKVLGANLWWPYLMHEHPAYLYSWEEVIAHTKALDPSQPVTFVTNSTYAADKGALYVDVIRVNSYYSWYRNYGHLELIQLQLAAQFENWCKTSQSHYSERVWSGNACRVSPVFPRELR

SEQ ID NO: 875818 - protein, 157 aa, Homo sapiens
KSKEVPLPNPRNSQSKDTVQDITTSWDALSQTKAALRHIENKLEVAPTSTAVCDSVMDTKKSSTSATRKISRKDGRYLDDSWVNAPISKSTKSRKEKSRSPLRATTLESNVKKNNRVEFREPLVSYREIHGAPSNFSSSHLESKHVYCVDVNEEKTE

SEQ ID NO: 875819 - protein, 176 aa, Homo sapiens
RSPAPRAPTRCALPRAEARPAGPRAGGRASARAEAARWLIRARRASPGPGAGRGPAQPSSPRAGPRRPGSADQEKIMNVKGKVILSMLVVSTVIIVFWEFINSTEGSFLWIYHSKNPEVDDSSAQKGWWFLSWFNNGIHNYQQGEEDIDKEKGREETKGRKMTQQSFGYGTGLIQT

SEQ ID NO: 875820 - protein, 574 aa, Homo sapiens
MCPRAARAPATLLLALGAVLWPAAGAWELTILHTNDVHSRLEQTSEDSSKCVNASRCMGGVARLFTKVQQIRRAEPNVLLLDAGDQYQGTIWFTVYKGAEVAHFMNALRYDAMALGNHEFDNGVEGLIEPLLKEAKFPILSANIKAKGPLASQISGLYLPYKVLPVGDEVVGIVGYTSKETPFLSNPGTNLVFEDEITALQPEVDKLKTLNVNKIIALGHSGFEMDKLIAQKVRGVDVVVGGHSNTFLYTGNPPSKEVPAGKYPFIVTSDDGRKVPVVQAYAFGKYLGYLKIEFDERGNVISSHGNPILLNSSIPEDPSIKADINKWRIKLDNYSTQELGKTIVYLDGSSQSCRFRECNMGNLICDAMINNNLRHTDEMFWNHVSMCILNGGGIRSPIDERNNGTITWENLAAVLPFGGTFDLVQLKGSTLKKAFEHSVHRYGQSTGEFLQVGGIHVVYDLSRKPGDRVVKLDVLCTKCRVPSYDPLKMDEVYKVILPNFLANGGDGFQMIKDELLRHDSGDQDINVVSTYISKMKVIYPAVEGRIKFSTGSHCHGSFSLIFLSLWAVIFVLYQ

SEQ ID NO: 875821 - protein, 264 aa, Homo sapiens
MCPRAARAPATLLLALGAVLWPAAGAWELTILHTNDVHSRLEQTSEDSSKCVNASRCMGGVARLFTKVQQIRRAEPNVLLLDAGDQYQGTIWFTVYKGAEVAHFMNALRYDAMALGNHEFDNGVEGLIEPLLKEAKFPILSANIKAKGPLASQISGLYLPYKVLPVGDEVVGIVGYTSKETPFLSNPGTNLVFEDEITALQPEVDKLKTLNVNKIIALGHSGFEMDKLIAQKVRGVDVVVGGHSNTFLYTGNCFKRIAWARMSR

SEQ ID NO: 875822 - protein, 574 aa, Homo sapiens; identical to SEQ ID NO: 875820

SEQ ID NO: 875823 - protein, 126 aa, Homo sapiens [sequence omitted]

SEQ ID NO: 875824 - protein, 126 aa, Homo sapiens [sequence omitted]

SEQ ID NO: 875825 - protein, 483 aa, Homo sapiens
MCPRAARAPATLLLALGAVLWPAAGAWELTILHTNDVHSRLEQTSEDSSKCVNASRCMGGVARLFTKVQQIRRAEPNVLLLDAGDQYQGTIWFTVYKGAEVAHFMNALRYDAMALGNHEFDNGVEGLIEPLLKEAKFPILSANIKAKGPLASQISGLYLPYKVLPVGDEVVGIVGYTSKETPFLSNPGTNLVFEDEITALQPEVDKLKTLNVNKIIALGHSGFEMDKLIAQKVRGVDVVVGGHSNTFLYTGNPPSKEVPAGKYPFIVTSDDGRKVPVVQAYAFGKYLGYLKIEFDERGNVISSHGNPILLNSSIPEDPSIKADINKWRIKLDNYSTQELGKTIVYLDGSSQSCRFRECNMGNLICDAMINNNLRHTDEMFWNHVSMCILNGGGIRSPIDERNNGTITWENLAAVLPFGGTFDLVQLKGSTLKKAFEHSVHRYGQSTGEFLQVGDLKECCPICINQDDSWKEQPTAQTYLNTWF

SEQ ID NO: 875826 - protein, 524 aa, Homo sapiens
MCPRAARAPATLLLALGAVLWPAAGAWELTILHTNDVHSRLEQTSEDSSKCVNASRCMGGVARLFTKVQQIRRAEPNVLLLDAGDQYQGTIWFTVYKGAEVAHFMNALRYDAMALGNHEFDNGVEGLIEPLLKEAKFPILSANIKAKGPLASQISGLYLPYKVLPVGDEVVGIVGYTSKETPFLSNPGTNLVFEDEITALQPEVDKLKTLNVNKIIALGHSGFEMDKLIAQKVRGVDVVVGGHSNTFLYTGNPPSKEVPAGKYPFIVTSDDGRKVPVVQAYAFGKYLGYLKIEFDERGNVISSHGNPILLNSSIPEDPSIKADINKWRIKLDNYSTQELGKTIVYLDGSSQSCRFRECNMGNLICDAMINNNLRHTDEMFWNHVSMCILNGGGIRSPIDERNNGIHVVYDLSRKPGDRVVKLDVLCTKCRVPSYDPLKMDEVYKVILPNFLANGGDGFQMIKDELLRHDSGDQDINVVSTYISKMKVIYPAVEGRIKFSTGSHCHGSFSLIFLSLWAVIFVLYQ

SEQ ID NO: 875827 - protein, 610 aa, Homo sapiens
MCPRAARAPATLLLALGAVLWPAAGAWELTILHTNDVHSRLEQTSEDSSKCVNASRCMGGVARLFTKVQQIRRAEPNVLLLDAGDQYQGTIWFTVYKGAEVAHFMNALRYDAMALGNHEFDNGVEGLIEPLLKEAKFPILSANIKAKGPLASQISGLYLPYKVLPVGDEVVGIVGYTSKETPFLSNPGTNLVFEDEITALQPEVDKLKTLNVNKIIALGHSGFEMDKLIAQKVRGVDVVVGGHSNTFLYTGNPPSKEVPAGKYPFIVTSDDGRKVPVVQAYAFGKYLGYLKIEFDERGNVISSHGNPILLNSSIPEDPSIKADINKWRIKLDNYSTQELGKTIVYLDGSSQSCRFRECNMGNLICDAMINNNLRHTDEMFWNHVSMCILNGGGIRSPIDERNNGTITWENLAAVLPFGGTFDLVQLKGSTLKKAFEHSVHRYGQSTGEFLQVGGIHVVYDLSRKPGDRVVKLDVLCTKCRVPSYDPLKMDEVYKVILPNFLANGGDGFQMIKDELLRHDSGDQDINVVSTYISKMKVIYPAVEGSANFCKYGTKGEAGSVAFSGFERKRIINSVKFPLDLTYKIKIQCNLKCFLIYSILTGLSSMKMISK

SEQ ID NO: 875828 - protein, 610 aa, Homo sapiens; identical to SEQ ID NO: 875827

SEQ ID NO: 875829 - protein, 96 aa, Homo sapiens
STQPGSDEGISRGSLSISPRCLAQSSPSSGPWAGSPLISPLLVEAGETANGYQDLRRCGWEIGYECMEITKQGDGSPCVVSVIHLRVRSSSSPPGE

SEQ ID NO: 875830 - protein, 156 aa, Homo sapiens
ANNWLSLRSCYPIFPDPRSLQIRSTSHLGQQLFPLPGDKAGVQRAEEGASSATRWRARASQRPGGHSSSPSPHSSPTRARAQKEPRPQPSRAGQPGAHLEGPGSGRVAAASSPCGSCCGLRVAPAPGSSSSRSPTLHPFSTPLCKSKASRSSLGAA

SEQ ID NO: 875831 - protein, 133 aa, Homo sapiens
EQGSREGSESQAEEMNEAGPPLEANTETRPEKEGPQPQEKPVGALEEEGVKPQTAAEGQGPLGDATPLLAETPAPEQPAECQPLLQGEGPSANPSAHPVPTYAPARQPEPSAPTEGEEASGPKQKTCQCCAVM

SEQ ID NO: 875832 - protein, 122 aa, Homo sapiens
VDYALTYDESTWMTRKIKIKRCCYRQSSSPRGLHEIQATETTRVGLTYHSTDKVTRSKCNSKYTVSTRQTHDMHTVSTLPGSLQSHFPHRERRKRPWPGSHSQSLWTWSQRLWRTKRHLFPG

SEQ ID NO: 875833 - protein, 103 aa, Homo sapiens
MDCSHLREKKTSTVFKPLFGFSVTCRHQDYQKTHQILPFFKKKTQSKFVFFSFSDLRVLISISVILVVTIKCLTNEKKMASIGLKGGALRSVPFKKKKLASLA

SEQ ID NO: 875834 - protein, 122 aa, Homo sapiens
MLLATIMDEEVTLRMRVKQKDRRSMGPGAWGLPISLDSLIWNGRKKLPLCLNLCLAFLSHVDIRITKRHFKKKTQSKFVFFSFSDLRVLISISVILVVTIKCLTNVFVHLFLKNIRTLLLQV

SEQ ID NO: 875835 - protein, 112 aa, Homo sapiens
HCPAPAVKCEVLRHRLFLFVTFIALEGIKDKLPQMTSLWYMDYFELQALEKQQVQAGPSDLPFSNQEQAMTFPTRYTLPLYQEENILITKHWEWMPRCICTNTLNKITLCFH

SEQ ID NO: 875836 - protein, 233 aa, Homo sapiens [sequence omitted]

SEQ ID NO: 875837 - protein, 233 aa, Homo sapiens [sequence omitted]

SEQ ID NO: 875838 - protein, 217 aa, Homo sapiens
MGGPVREPALSVALWLSWGAALGAVACAMALLTQQTELQSLRREVSRLQGTGGPSQNGEGYPWQSLPEQSSDALEAWESGERSRKRRAVLTQKQKNDSDVTEVMWQPALRRGRGLQAQGYGVRIQDAGVYLLYSQVLFQDVTFTMGQVVSREGQGRQETLFRCIRSMPSHPDRAYNSCYSAGVFHLHQGDILSVIIPRARAKLNLSPHGTFLGFVKL

SEQ ID NO: 875839 - protein, 233 aa, Homo sapiens [sequence omitted]

SEQ ID NO: 875840 - protein, 114 aa, Homo sapiens
MWQPALRRGRGLQAQGYGVRIQDAGVYLLYSQVLFQDVTFTMGQVVSREGQGRQETLFRCIRSMPSHPDRAYNSCYSAGVFHLHQGDILSVIIPRARAKLNLSPHGTFLGFVKL

SEQ ID NO: 875841 - protein, 233 aa, Homo sapiens [sequence omitted]

SEQ ID NO: 875842 - protein, 70 aa, Homo sapiens
  misc_feature (4)..(4): Xaa can be any naturally occurring amino acid
VHPXVICDGCNGPVVGTRYKCSVCPDYDLCRQPPQEALSYVLLSIYRTPVSITISRDVAIMRPSTGGARR

SEQ ID NO: 875843 - protein, 233 aa, Homo sapiens [sequence omitted]

SEQ ID NO: 875844 - protein, 233 aa, Homo sapiens [sequence omitted]

SEQ ID NO: 875845 - protein, 233 aa, Homo sapiens [sequence omitted]

SEQ ID NO: 875846 - protein, 264 aa, Homo sapiens
GLVRSGVYGMGPQLMPASSPFLLAPKGPPGNMGGPVREPALSVALWLSWGAALGAVACAMALLTQQTELQSLRREVSRLQGTGGPSQNGEGYPWQSLPEQSSDALEAWESGERSRKRRAVLTQKQKKQHSVLHLVPINATSKDDSDVTEVMWQPALRRGRGLQAQGYGVRIQDAGVYLLYSQVLFQDVTFTMGQVVSREGQGRQETLFRCIRSMPSHPDRAYNSCYSAGVFHLHQGDILSVIIPRARAKLNLSPHGTFLGFVKL

SEQ ID NO: 875847 - protein, 276 aa, Homo sapiens
LGHSAGAGTGPGWEVGRAGASLEEGLRVSRHTGTRNPVCWGGIPQWPGGLRPLLCLFVQSLIPQRASRQHGGPSQRAGTLSCPLVELGGSSGGRGLCHGSADPTNRAAEPQERGEPAAGDRRPLPEWGRVSLAESPGAEQHSVLHLVPINATSKDDSDVTEVMWQPALRRGRGLQAQGYGVRIQDAGVYLLYSQVLFQDVTFTMGQVVSREGQGRQETLFRCIRSMPSHPDRAYNSCYSAGVFHLHQGDILSVIIPRARAKLNLSPHGTFLGFVKL

SEQ ID NO: 875848 - protein, 230 aa, Homo sapiens
MGGPVREPALSVALWLSWGAALGAVACAMALLTQQTELQSLRREVSRLQGTGGPSQNGEGYPWQSLPEQSSDALEAWESGERSRKRRAVLTQKQKKQHSVLHLVPINATSKDDSDVTEVMWQPALRRGRGLQAQGYGVRIQDAGVYLLYSQVLFQDVTFTMGQVVSREGQGRQETLFRCIRSMPSHPDRAYNSCYSAGVFHLHQGDILSVIIPRARAKLNLSPHGTFLGL

SEQ ID NO: 875849 - protein, 233 aa, Homo sapiens [sequence omitted]

SEQ ID NO: 875850 - protein, 210 aa, Homo sapiens
MGGPVREPALSVALWLSWGAALGAVACAMALLTQQTELQSLRREVSRLQGTGGPSQNGEGYPWQSLPEQSSDALEAWESGERSRKRRAVLTQKQKKQHSVLHLVPINATSKDDSDVTEVMWQPALRRGRGLQAQGYGVRIQDAGVYLLYSQVLFQDVTFTMGQVVSREGQGRQETLFRCIRSMPSHPDRAYNSCYSAGVFHLHLGAHWKH

SEQ ID NO: 875851 - protein, 70 aa, Homo sapiens
QTLPFSPAISASLSVAVEAGRPFCHCLAGLGRGSAGQRARQGGPEFLKVVVAAVRVHRLMISNVTQKRMC

SEQ ID NO: 875852 - protein, 70 aa, Homo sapiens; identical to SEQ ID NO: 875851

SEQ ID NO: 875853 - protein, 658 aa, Homo sapiens
RASNPEGRPGSAATMFLGTGEPALDTSHLISLSRASLTPQKLWLGTAKPGSLTQALNSPLTWEHAWTGVPGGTPDCLTDTFRVKRPHLRRSASNGHVPGTPVYREKEDMYDEIIELKKSLHVQKSDVDLMRTKLRRLEEENSRKDRQIEQLLDPSRGTDFVRTLAEKRPDASWVINGLKQRILKLEQQCKEKDGTISKLQTDMKTTNLEEMRIAMETYYEEVHRLQTLLASSETTGKKPLGEKKTGAKRQKKMGSALLSLSRSVQELTEENQSLKEDLDRVLSTSPTISKTQGYVEWSKPRLLRRIVELEKKLSVMESSKSHAAEPVRSHPPACLASSSALHRQPRGDRNKDHERLRGAVRDLKEERTALQEQLLQRDLEVKQLLQAKADLEKELECAREGEEERREREEVLREEIQTLTSKLQELQEMKKEEKEDCPEVPHKAQELPAPTPSSRHCEQDWPPDSSEEGLPRPRSPCSDGRRDAAARVLQAQWKVYKHKKKKAVLDEAAVVLQAAFRGHLTRTKLLASKAHGSEPPSVPGLPDQSSPVPRVPSPIAQATGSPVQEEAIVIIQSALRAHLARARHSATGKRTTTAASTRRRSASATHGDASSPPFLAALPDPSPSGPQALAPLPGDDVNSDDSDDIVIAPSLPTKNFPV

SEQ ID NO: 875854 - protein, 343 aa, Homo sapiens
MESSKSHAAEPVRSHPPACLASSSALHRQPRGDRNKDHERLRGAVRDLKEERTALQEQLLQRDLEVKQLLQAKADLEKELECAREGEEERREREEVLREEIQTLTSKLQELQEMKKEEKEDCPEVPHKAQELPAPTPSSRHCEQDWPPDSSEEGLPRPRSPCSDGRRDAAARVLQAQWKVYKHKKKKAVLDEAAVVLQAAFRGHLTRTKLLASKAHGSEPPSVPGLPDQSSPVPRVPSPIAQATGSPVQEEAIVIIQSALRAHLARARHSATGKRTTTAASTRRRSASATHGDASSPPFLAALPDPSPSGPQALAPLPGDDVNSDDSDDIVIAPSLPTKNFPV

SEQ ID NO: 875855 - protein, 658 aa, Homo sapiens; identical to SEQ ID NO: 875853

SEQ ID NO: 875856 - protein, 658 aa, Homo sapiens; identical to SEQ ID NO: 875853

SEQ ID NO: 875857 - protein, 350 aa, Homo sapiens
MESSKSHAAEPVRSHPPACLASSSALHRQPRGDRNKDHERLRGAVRDLKEERTALQEQLLQRDLEVKQLLQAKADLEKELECAREGEEERREREEVLREEIQTLTSKLQELQEMKKEEKEDCPEVPHKAQELPAPTPSSRHCEQDWPPDSSEEGLPRPRSPCSDGRRDAAARVLQAQWKVYKHKKKKAVLDEAAVVLQAAFRGHLTRTKLLASKAHGSEPPSVPGLPDQSSPVPRVPSPIAQATGSPVQEEAIVIIQSALRAHLARARHSATGKRTTTAASTRRRSASATHGDASSPPFLAALPGNFIHLDSGTRAAGLLRSQPKSGHLQEARAVSGRKGGVSHLELPLN

SEQ ID NO: 875858 - protein, 658 aa, Homo sapiens; identical to SEQ ID NO: 875853

SEQ ID NO: 875859 - protein, 100 aa, Homo sapiens [sequence omitted]

SEQ ID NO: 875860 - protein, 100 aa, Homo sapiens [sequence omitted]

SEQ ID NO: 875861 - protein, 100 aa, Homo sapiens [sequence omitted]

SEQ ID NO: 875862 - protein, 116 aa, Homo sapiens
LSPHWDLLTGLGCSGDMEEASEGGGNDRVRNLQSEVEGVKNIMTQNVERILARGENLEHLRNKTEDLEATSEHFKTTSQKVARKFWWKNVKMIVLICVIVFIIILFIVLFATGAFS

SEQ ID NO: 875863 - protein, 141 aa, Homo sapiens
MCAKRVSFPVFLYRECCSVLLPLFPRPCCHVVCPRRYLGPAGIELERCQQQANEVTEIMRNNFGKVLERGVKLAELQQRSDQLLDMSSTFNKTTQNLAQKKCWENIRYRICVGLVVVGVLLIILIVLLVVFLPQSSDSSSA

SEQ ID NO: 875864 - protein, 100 aa, Homo sapiens [sequence omitted]

SEQ ID NO: 875865 - protein, 100 aa, Homo sapiens [sequence omitted]

SEQ ID NO: 875866 - protein, 116 aa, Homo sapiens
LLTNETLLCTFNLLSAREEASEGGGNDRVRNLQSEVEGVKNIMTQNVERILARGENLEHLRNKTEDLEATSEHFKTTSQKVARKFWWKNVKMIVLICVIVFIIILFIVLFATGAFS

SEQ ID NO: 875867 - protein, 100 aa, Homo sapiens [sequence omitted]

SEQ ID NO: 875868 - protein, 100 aa, Homo sapiens [sequence omitted]

SEQ ID NO: 875869 - protein, 100 aa, Homo sapiens [sequence omitted]

SEQ ID NO: 875870 - protein, 320 aa, Homo sapiens
MVGYDPKPDGRNNTKFQVAVAGSVSGLVTRALISPFDVIKIRFQLQHERLSRSDPSAKYHGILQASRQILQEEGPTAFWKGHVPAQILSIGYGAVQFLSFEMLTELVHRGSVYDAREFSVHFVCGGLAACMATLTVHPVDVLRTRFAAQGEPKVYNTLRHAVGTMYRSEGPQVFYKGLAPTLIAIFPYAGLQFSCYSSLKHLYKWAIPAEGKKNENLQNLLCGSGAGVISKTLTYPLDLFKKRLQVGGFEHARAAFGQVRRYKGLMDCAKQVLQKEGALGFFKGLSPSLLKAALSTGFMFFSYEFFCNVFHCMNRTASQR

SEQ ID NO: 875871 - protein, 320 aa, Homo sapiens; identical to SEQ ID NO: 875870

SEQ ID NO: 875872 - protein, 320 aa, Homo sapiens; identical to SEQ ID NO: 875870

SEQ ID NO: 875873 - protein, 320 aa, Homo sapiens; identical to SEQ ID NO: 875870

SEQ ID NO: 875874 - protein, 270 aa, Homo sapiens
MVGYDPKPDGRNNTKFQVAVAGSVSGLVTRALISPFDVIKIRFQLQHERLSRSDPSAKYHGILQASRQILQEEGPTAFWKGHVPAQILSIGYGAVQFLSFEMLTELVHRGSVYDAREFSVHFVCGGLAACMATLTVHPVDVLRTRFAAQGEPKVYNTLRHAVGTMYRSEGPQVFYKGLAPTLIAIFPYAGLQFSCYSSLKHLYKWAIPAEGKKNDIRWTSSRSGYRLEGLSMPELPLARYGDTRASWTVPSRCYKRKAPWASSRACPPAC

SEQ ID NO: 875875 - protein, 215 aa, Homo sapiens
MVGYDPKPDGRNNTKFQVAVAGSVSGLVTRALISPFDVIKIRFQLQHERLSRSDPSAKYHGILQASRQILQEEGPTAFWKGHVPAQILSIGYGAVQFLSFEMLTELVHRGSVYDAREFSVHFVCGGLAACMATLTVHPVDVLRTRFAAQGEPKVRRYKGLMDCAKQVLQKEGALGFFKGLSPSLLKAALSTGFMFFSYEFFCNVFHCMNRTASQR

SEQ ID NO: 875876 - protein, 219 aa, Homo sapiens
MLTELVHRGSVYDAREFSVHFVCGGLAACMATLTVHPVDVLRTRFAAQGEPKVYNTLRHAVGTMYRSEGPQVFYKGLAPTLIAIFPYAGLQFSCYSSLKHLYKWAIPAEGKKNENLQNLLCGSGAGVISKTLTYPLDLFKKRLQVGGFEHARAAFGQVRRYKGLMDCAKQVLQKEGALGFFKGLSPSLLKAALSTGFMFFSYEFFCNVFHCMNRTASQR

SEQ ID NO: 875877 - protein, 38 aa, Homo sapiens
MFSIAAALGSSASSAGGDSRLSQSLSGLCRFYPSRTSL

SEQ ID NO: 875878 - protein, 320 aa, Homo sapiens; identical to SEQ ID NO: 875870

SEQ ID NO: 875879 - protein, 320 aa, Homo sapiens; identical to SEQ ID NO: 875870

SEQ ID NO: 875880 - protein, 320 aa, Homo sapiens; identical to SEQ ID NO: 875870

SEQ ID NO: 875881 - protein, 319 aa, Homo sapiens
NFGTMGQRITPKFQGGSELGLCLYLVLGRLIITFVTVCVMCNELCSSQCGFRQRQVVPCYGKPMLRQILQEEGPTAFWKGHVPAQILSIGYGAVQFLSFEMLTELVHRGSVYDAREFSVHFVCGGLAACMATLTVHPVDVLRTRFAAQGEPKVYNTLRHAVGTMYRSEGPQVFYKGLAPTLIAIFPYAGLQFSCYSSLKHLYKWAIPAEGKKNENLQNLLCGSGAGVISKTLTYPLDLFKKRLQVGGFEHARAAFGQVRRYKGLMDCAKQVLQKEGALGFFKGLSPSLLKAALSTGFMFFSYEFFCNVFHCMNRTASQR

SEQ ID NO: 875882 - protein, 270 aa, Homo sapiens; identical to SEQ ID NO: 875874

SEQ ID NO: 875883 - protein, 325 aa, Homo sapiens
MVGYDPKPDGRNNTKFQVAVAGSVSGLVTRALISPFDVIKIRFQLQHERLSRSDPSAKYHGILQASRQILQEEGPTAFWKGHVPAQILSIGYGAVQFLSFEMLTELVHRGSVYDAREFSVHFVCGGLAACMATLTVHPVDVLRTRFAAQGEPKVYNTLRHAVGTMYRSEGPQVFYKGLAPTLIAIFPYAGLQFSCYSSLKHLYKWAIPAEGKKNENLQNLLCGSGAGVISKTLTYPLDLFKKRLQVGGFEHARAAFGQTEIQGSMDCASSAARRAWLSGLSQCGVALPGQSLGGSPGAPWLGPRVGGPFRGAQEEIPRGGAWAGP

SEQ ID NO: 875884 - protein, 97 aa, Homo sapiens
KGLLPSSNPMFSIAAALGSSASSAGGDSRLSQSLSGPRAQTFVSADTPPPRLSSPRTGLVMAVGLHGKQIPAPVQEVDGPCCGQAWVKVQPLPSLPH

SEQ ID NO: 875885 - protein, 163 aa, Homo sapiens
  misc_feature (4)..(4): Xaa can be any naturally occurring amino acid
FHIXRKNHHTTRPNIFYLLKDTGCSLPGLPTESLFYRAVLQDIIKDCYGITKCDRHVGKIYSKCSSFLDYVRRSLKKLGLDESKLPEKIIMNYYEKYKPRMNELEAFNMLKVVLAPCIETLILLDRLCYLKEQEDIAWSALVKLFDPVKSPRCYAVIALKKQQ

SEQ ID NO: 875886 - protein, 163 aa, Homo sapiens; identical to SEQ ID NO: 875885
  misc_feature (4)..(4): Xaa can be any naturally occurring amino acid

SEQ ID NO: 875887 - protein, 100 aa, Homo sapiens
EDGDKLEKLVGKEREKVSVATLPEKIIMNYYEKYKPRMNELEAFNMLKVVLAPCIETLILLDRLCYLKEQEDIAWSALVKLFDPVKSPRCYAVIALKKQQ

SEQ ID NO: 875888 - protein, 543 aa, Homo sapiens
MGTSLSPNDPWPLNPLSIQQTTLLLLLSVLATVHVGQRLLRQRRRQLRSAPPGPFAWPLIGNAAAVGQAAHLSFARLARRYGDVFQIRLGSCPIVVLNGERAIHQALVQQGSAFADRPAFASFRVVSGGRSMAFGHYSEHWKVQRRAAHSMMRNFFTRQPRSRQVLEGHVLSEARELVALLVRGSADGAFLDPRPLTVVAVANVMSAVCFGCRYSHDDPEFRELLSHNEEFGRTVGAGSLVDVMPWLQYFPNPVRTVFREFEQLNRNFSNFILDKFLRHCESLRPGAAPRDMMDAFILSAEKKAAGDSHGGGARLDLENVPATITDIFGASQDTLSTALQWLLLLFTRYPDVQTRVQAELDQVVGRDRLPCMGDQPNLPYVLAFLYEAMRFSSFVPVTIPHATTANTSVLGYHIPKDTVVFVNQWSVNHDPVKWPNPENFDPARFLDKDGLINKDLTSRVMIFSVGKRRCIGEELSKMQLFLFISILAHQCDFRANPNEPAKMNFSYGLTIKPKSFKVNVTLRESMELLDSAVQNLQAKETCQ

SEQ ID NO: 875889 - protein, 543 aa, Homo sapiens; identical to SEQ ID NO: 875888

SEQ ID NO: 875890 - protein, 543 aa, Homo sapiens; identical to SEQ ID NO: 875888

SEQ ID NO: 875891 - protein, 412 aa, Homo sapiens
MAFGHYSEHWKVQRRAAHSMMRNFFTRQPRSRQVLEGHVLSEARELVALLVRGSADGAFLDPRPLTVVAVANVMSAVCFGCRYSHDDPEFRELLSHNEEFGRTVGAGSLVDVMPWLQYFPNPVRTVFREFEQLNRNFSNFILDKFLRHCESLRPGAAPRDMMDAFILSAEKKAAGDSHGGGARLDLENVPATITDIFGASQDTLSTALQWLLLLFTRYPDVQTRVQAELDQVVGRDRLPCMGDQPNLPYVLAFLYEAMRFSSFVPVTIPHATTANTSVLGYHIPKDTVVFVNQWSVNHDPVKWPNPENFDPARFLDKDGLINKDLTSRVMIFSVGKRRCIGEELSKMQLFLFISILAHQCDFRANPNEPAKMNFSYGLTIKPKSFKVNVTLRESMELLDSAVQNLQAKETCQ

SEQ ID NO: 875892 - protein, 163 aa, Homo sapiens
MGDQPNLPYVLAFLYEAMRFSSFVPVTIPHATTANTSVLGYHIPKDTVVFVNQWSVNHDPVKWPNPENFDPARFLDKDGLINKDLTSRVMIFSVGKRRCIGEELSKMQLFLFISILAHQCDFRANPNEPAKMNFSYGLTIKPKSFKVNVTLRESMELLDSAVQ

SEQ ID NO: 875893 - protein, 543 aa, Homo sapiens; identical to SEQ ID NO: 875888

SEQ ID NO: 875894 - protein, 543 aa, Homo sapiens; identical to SEQ ID NO: 875888

SEQ ID NO: 875895 - protein, 543 aa, Homo sapiens; identical to SEQ ID NO: 875888

SEQ ID NO: 875896 - protein, 139 aa, Homo sapiens
MEQPWPPPGPWSLPRAEGEAEEESDFDVFPSSPRCPQLPGGGAQMYSHGIELACQKQKEFVKSSVACKWNLAEAQQKLGSLALHNSESLDQEHAKAQTAVSELRQREEEWRQKEEALVQREKMCLWSTDAISKDVFNKV

SEQ ID NO: 875897 - protein, 337 aa, Homo sapiens
MEQPWPPPGPWSLPRAEGEAEEESDFDVFPSSPRCPQLPGGGAQMYSHGIELACQKQKEFVKSSVACKWNLAEAQQKLGSLALHNSESLDQEHAKAQTAVSELRQREEEWRQKEEALVQREKMCLWSTDAISKDVFNKSFINQDKRKDTEDEDKSESFMQKYEQKIRHFGMLSRWDDSQRFLSDHPYLVCEETAKYLILWCFHLEAEKKGALMEQIAHQAVVMQFIMEMAKNCNVDPRGCFRLFFQKAKAEEEGYFEAFKNELEAFKSRVRLYSQSQSFQPMTVQNHVPHSGVGSIGLLESLPQNPDYLQYSISTALCSLNSVVHKEDDEPKMMDTV

SEQ ID NO: 875898 - protein, 97 aa, Homo sapiens
IQLVTESWRHKPVATPGPWSLPRAEGEAEEESDFDVFPSSPRCPQLPGGGAQVRRGLRSAEGWSGAVAKPLECRVSQTLFYAFFYAHLTARGRGPGT

SEQ ID NO: 875899 - protein, 214 aa, Homo sapiens
LEAERYQSLLEELKMNKIQLQLFQLYHNEKKIHLLNTKLEHVNRDLSVKRESLSHHENIVKARKKEHGMLTRQLQQTEKELKSVETLLNQKRPQYIKAKENTSHHLKKLDVAKKSIKDSEKQCSKQEDDIKALETELADLDAAWRSFEKQIEEEILHKKRDIELEASQLDRYKELKEQVRKKVATMTQQLEKLQWEQKTDEERLAFEKRRHGEV

SEQ ID NO: 875900 - protein, 254 aa, Homo sapiens
EVSPASSRRSLRASRAITTPWGPETVFRSFAFGWGVEAAVLRRPGRAQEQPRGALSGRRPGGKRCSGDRATPQRRSAPGPRGEVGGVRPAPPRTTPPRARTFPECTPRPPAGAMAGLWLGLVWQKLLLWGAASAVSLAGASLVLSLLQRVASYARKWQQMRPIPTVARAYPLVGHALLMKPDGRAQDAVFPNPCPRSFPTSPLLSSQSPAVSSCLGLGSLRNRSSLGAQSGFKLANTLTPRAALLSLPLWKIRD

SEQ ID NO: 875901 - protein, 107 aa, Homo sapiens [sequence omitted]

SEQ ID NO: 875902 - protein, 291 aa, Homo sapiens
EVSPASSRRSLRASRAITTPWGPETVFRSFAFGWGVEAAVLRRPGRAQEQPRGALSGRRPGGKRCSGDRATPQRRSAPGPRGEVGGVRPAPPRTTPPRARTFPECTPRPPAGAMAGLWLGLVWQKLLLWGAASAVSLAGASLVLSLLQRVASYARKWQQMRPIPTVARAYPLVGHALLMKPDGRGKGRRSSWSATGSAAPFPPSDQPGTRCLWRWPQERGACHPVENALPVLVVAPWHPPTLLVPHPKVSIFFVCSTGCGISKPLPSVFSHLTAAQLSKPCRFLLPWLGKP

SEQ ID NO: 875903 - protein, 452 aa, Homo sapiens
EVSPASSRRSLRASRAITTPWGPETVFRSFAFGWGVEAAVLRRPGRAQEQPRGALSGRRPGGKRCSGDRATPQRRSAPGPRGEVGGVRPAPPRTTPPRARTFPECTPRPPAGAMAGLWLGLVWQKLLLWGAASAVSLAGASLVLSLLQRVASYARKWQQMRPIPTVARAYPLVGHALLMKPDGREFFQQIIEYTEEYRHMPLLKLWVGPVPMVALYNAENVEVILTSSKQIDKSSMYKFLEPWLGLGLLTSTGNKWRSRRKMLTPTFHFTILEDFLDIMNEQANILVKKLEKHINQEAFNCFFYITLCALDIICETAMGKNIGAQSNDDSEYVRAVYRMSEMIFRRIKMPWLWLDLWYLMFKEGWEHKKSLQILHTFTNSVIAERANEMNANEDCRGDGRGSAPSKNKRRAFLDLLLSVTDDEGNRLSHEDIREEVDTFMFEVLYIVRFRYH

SEQ ID NO: 875904 - protein, 65 aa, Homo sapiens
MGYLKAVERAIYNMRLGLHRWIQGPPPLRHLLTHLPQVRLTSTFLLTSTQGAQEKPREQGGGNAR

SEQ ID NO: 875905 - protein, 119 aa, Homo sapiens
MPCVLAMSSQGYNVLVPDHPGLPLEVKDRIASWHYRCGKIKISARGAERRVPQLQEDHVTAVVVFGVTCSTHSVPLMLDGDRRRACRPNPWLWTGEAAPGFFPSQCFTQDFLHLCFPLV

SEQ ID NO: 875906 - protein, 137 aa, Homo sapiens
MPCVLAMSSQGYNVLVPDHPGLPLEVKDRIASWHYRCGKIKISARKNVRFGDSGRTRRSGGHFGAERRVPQLQEDHVTAVVVFGVTCSTHSVPLMLDGDRRRACRPNPWLWTGEAAPGFFPSQCFTQDFLHLCFPLV

SEQ ID NO: 875907 - protein, 186 aa, Homo sapiens
SLGEAEPTGARAAASGRARVVVHHGSAAPAGMEERGDSEPTPGCSGLGPGGVRGFGDGGGAPSWAPEDAWMGTHPKYLEMMELDIGDATQVYVAFLVYLDLMESKSWHEVNCVGLPELQLICLVGTEIEGEGLQTVVPTPITASLSHNSCTQKKAHMRTQQEGGCLQAKKRGLIRDGMFLHFGLDF

SEQ ID NO: 875908 - protein, 160 aa, Homo sapiens
SLGEAEPTGARAAASGRARVVVHHGSAAPAGMEERGDSEPTPGCSGLGPGGVRGFGDGGGAPSWAPEDAWMGTHPKYLEMMELDIGDATQVYVAFLVYLDLMESKSWHEVNCVGLPELQLICLVGTEIEGEGLQTVVPTPITASLSHNRIFLLEDDIHVS

SEQ ID NO: 875909 - protein, 165 aa, Homo sapiens
SLGEAEPTGARAAASGRARVVVHHGSAAPAGMEERGDSEPTPGCSGLGPGGVRGFGDGGGAPSWAPEDAWMGTHPKYLEMMELDIGDATQVYVAFLVYLDLMESKSWHEVNCVGLPELQLICLVGTEIEGEGLQTVVPTPITASLSHNRIREILKASRKLQEYFS

SEQ ID NO: 875910 - protein, 214 aa, Homo sapiens
SLGEAEPTGARAAASGRARVVVHHGSAAPAGMEERGDSEPTPGCSGLGPGGVRGFGDGGGAPSWAPEDAWMGTHPKYLEMMELDIGDATQVYVAFLVYLDLMESKSWHEVNCVGLPELQLICLVGTEIEGEGLQTVVPTPITASLSHNRIREILKASRKLQGDPDLPMSFTLAIVESDSTIVYYKLTDGFMLPDPQVSFEVTDSKKYKKRKIMT

SEQ ID NO: 875911 - protein, 190 aa, Homo sapiens
SLGEAEPTGARAAASGRARVVVHHGSAAPAGMEERGDSEPTPGCSGLGPGGVRGFGDGGGAPSWAPEDAWMGTHPKYLEMMELDIGDATQVYVAFLVYLDLMESKSWHEVNCVGLPELQLICLVGTEIEGEGLQTVVPTPITASLSHNRRNNPYIFIKDINKKQLSPSCESDPNPFNVFIDSVVHRRKPI

SEQ ID NO: 875912 - protein, 202 aa, Homo sapiens
SLGEAEPTGARAAASGRARVVVHHGSAAPAGMEERGDSEPTPGCSGLGPGGVRGFGDGGGAPSWAPEDAWMGTHPKYLEMMELDIGDATQVYVAFLVYLDLMESKSWHEVNCVGLPELQLICLVGTEIEGEGLQTVVPTPITASLSHNRIREILKASRKLQGDPDLPMSFTLAIVESDSTIVYYKLTDGFMLPDPQNISLRR

SEQ ID NO: 875913 - protein, 202 aa, Homo sapiens; identical to SEQ ID NO: 875912

SEQ ID NO: 875914 - protein, 71 aa, Homo sapiens
  misc_feature (17)..(18): Xaa can be any naturally occurring amino acid
GSGYERNGPHTKLRVKXXIREILKASRKLQGDPDLPMSFTLAIVESDSTIVYYKLTDGFMLPDPQNISLRR

SEQ ID NO: 875915 - protein, 149 aa, Homo sapiens
SLGEAEPTGARAAASGRARVVVHHGSAAPAGMEERGDSEPTPGCSGLGPGGVRGFGDGGGAPSWAPEDAWMGTHPKYLEMMELDIGDATQVYVAFLVYLDLMESKSWHEVNCVGLPELQLICLVGTEIEGEGLQTVVPTPITASLSHNR

SEQ ID NO: 875916 - protein, 347 aa, Homo sapiens
METPFYGDEALSGLGGGASGSGGTFASPGRLFPGAPPTAAAGSMMKKDALTLSLSEQVAAALKPAAAPPPTPLRADGAPSAAPPDGLLASPDLGLLKLASPELERLIIQSNGLVTTTPTSSQFLYPKVAASEEQEFAEGFVKALEDLHKQNQLGAGAAAAAAAAAAGGPSGTATGSAPPGELAPAAAAPEAPVYANLSSYAGGAGGAGGAATVAFAAEPVPFPPPPPPGALGPPRLAALKDEPQTVPDVPSFGESPPLSPIDMDTQERIKAERKRLRNRIAASKCRKRKLERISRLEEKVKTLKSQNTELASTASLLREQVAQLKQKVLSHVNSGCQLLPQHQVPAY

SEQ ID NO: 875917 - protein, 331 aa, Homo sapiens
RGYKRAHKWRGAGAAASGGPGAAAAAGAGAGPSGRGGAGPPGGRGHSPPGRRGGGGGGWKHPSTAAPPDGLLASPDLGLLKLASPELERLIIQSNGLVTTTPTSSQFLYPKVAASEEQEFAEGFVKALEDLHKQNQLGAGAAAAAAAAAAGGPSGTATGSAPPGELAPAAAAPEAPVYANLSSYAGGAGGAGGAATVAFAAEPVPFPPPPPPGALGPPRLAALKDEPQTVPDVPSFGESPPLSPIDMDTQERIKAERKRLRNRIAASKCRKRKLERISRLEEKVKTLKSQNTELASTASLLREQVAQLKQKVLSHVNSGCQLLPQHQVPAY

SEQ ID NO: 875918 - protein, 153 aa, Homo sapiens
MCGDFTKHLICFILTSTPILRGAYCYQTHFTRQELREGAAPGDSPPEGAQDSTSWTPCSRGGERMTPPPSRCLFPPRGRPVLHKPARLGCPFVHRAARGLRGGAPQTLPFLYFYFFFFSLEERRTECSILPYLCFYSGTNVGCVCVCFLVLVF

SEQ ID NO: 875919 - protein, 347 aa, Homo sapiens; identical to SEQ ID NO: 875916

SEQ ID NO: 875920 - protein, 347 aa, Homo sapiens; identical to SEQ ID NO: 875916

SEQ ID NO: 875921 - protein, 200 aa, Homo sapiens
METPFYGDEALSGLGGGASGSGGTFASPGRLFPGAPPTAAAGSMMKKDALTLSLSEQVAAALKPAAAPPPTPLRADGAPSAAPPDGLLASPDLGLLKLASPELERLIIQSNGLVTTTPTSSQFLYPKVAASEEQEFAEGFVKALEDLHKQNQLGAGRGRKSWLVIILKSQLMLLQLKKLCSHITVFNVLCGKLLSLYNFA

SEQ ID NO: 875922 - protein, 83 aa, Homo sapiens
MGGWPGVLSAYCLVVVDVVVASAGQWLRLHSAGGLMVGRPSPAGRPEQEPRANKEAANELAGAVDLGWMANVRRNPRDMVTST

SEQ ID NO: 875923 - protein, 961 aa, Homo sapiens [sequence omitted]

SEQ ID NO: 875924 - protein, 2402 aa, Homo sapiens
MSSFLHIGDICSLYAEGSTNGFISTLGLVDDRCVVQPETGDLNNPPKKFRDCLFKLCPMNRYSAQKQFWKAAKPGANSTTDAVLLNKLHHAADLEKKQNETENRKLLGTVIQYGNVIQLLHLKSNKYLTVNKRLPALLEKNAMRVTLDEAGNEGSWFYIQPFYKLRSIGDSVVIGDKVVLNPVNAGQPLHASSHQLVDNPGCNEVNSVNCNTSWKIVLFMKWSDNKDDILKGGDVVRLFHAEQEKFLTCDEHRKKQHVFLRTTGRQSATSATSSKALWEVEVVQHDPCRGGAGYWNSLFRFKHLATGHYLAAEVDPDQDASRSRLRNAQEKMVYSLVSVPEGNDISSIFELDPTTLRGGDSLVPRNSYVRLRHLCTNTWVHSTNIPIDKEEEKPVMLKIGTSPVKEDKEAFAIVPVSPAEVRDLDFANDASKVLGSIAGKLEKGTITQNERRSVTKLLEDLVYFVTGGTNSGQDVLEVVFSKPNRERQKLMREQNILKQIFKLLQAPFTDCGDGPMLRLEELGDQRHAPFRHICRLCYRVLRHSQQDYRKNQEYIAKQFGFMQKQIGYDVLAEDTITALLHNNRKLLEKHITAAEIDTFVSLVRKNREPRFLDYLSDLCVSMNKSIPVTQELICKAVLNPTNADILIETKLVLSRFEFEGVSSTGENALEAGEDEEEVWLFWRDSNKEIRSKSVRELAQDAKEGQKEDRDVLSYYRYQLNLFARMCLDRQYLAINEISGQLDVDLILRCMSDENLPYDLRASFCRLMLHMHVDRDPQEQVTPVKYARLWSEIPSEIAIDDYDSSGASKDEIKERFAQTMEFVEEYLRDVVCQRFPFSDKEKNKLTFEVVNLARNLIYFGFYNFSDLLRLTKILLAILDCVHVTTIFPISKMAKGEENKGNNDVEKLKSSNVMRSIHGVGELMTQVVLRGGGFLPMTPMAAAPEGNVKQAEPEKEDIMVMDTKLKIIEILQFILNVRLDYRISCLLCIFKREFDESNSQTSETSSGNSSQEGPSNVPGALDFEHIEEQAEGIFGGSEENTPLDLDDHGGRTFLRVLLHLTMHDYPPLVSGALQLLFRHFSQRQEVLQAFKQVQLLVTSQDVDNYKQIKQDLDQLRSIVEKSELWVYKGQGPDETMDGASGENEHKKTEEGNNKPQKHESTSSYNYRVVKEILIRLSKLCVQESASVRKSRKQQQRLLRNMGAHAVVLELLQIPYEKAEDTKMQEIMRLAHEFLQNFCAGNQQNQALLHKHINLFLNPGILEAVTMQHIFMNNFQLCSEINERVVQHFVHCIETHGRNVQYIKFLQTIVKAEGKFIKKCQDMVMAELVNSGEDVLVFYNDRASFQTLIQMMRSERDRMDENSPLMYHIHLVELLAVCTEGKNVYTEIKCNSLLPLDDIVRVVTHEDCIPEVKIAYINFLNHCYVDTEVEMKEIYTSNHMWKLFENFLVDICRACNNTSDRKHADSILEKYVTEIVMSIVTTFFSSPFSDQSTTLQTRQPVFVQLLQGVFRVYHCNWLMPSQKASVESCIRVLSDVAKSRAIAIPVDLDSQVNNLFLKSHSIVQKTAMNWRLSARNAARRDSVLAASRDYRNIIERLQDIVSALEDRLRPLVQAELSVLVDVLHRPELLFPENTDARRKCESGGFICKLIKHTKQLLEENEEKLCIKVLQTLREMMTKDRGYGEKGEALRQVLVNRYYGNVRPSGRRESLTSFGNGPLSAGGPGKPGGGGGGSGSSSMSRGEMSLAEVQCHLDKEGASNLVIDLIMNASSDRVFHESILLAIALLEGGNTTIQHSFFCRLTEDKKSEKFFKVFYDRMKVAQQEIKATVTVNTSDLGNKKKDDEVDRDAPSRKKAKEPTTQITEEVRDQLLEASAATRKAFTTFRREADPDDHYQPGEGTQATADKAKDDLEMSAVITIMQPILRFLQLLCENHNRDLQNFLRCQNNKTNYNLVCETLQFLDCICGSTTGGLGLLGLYINEKNVALINQTLESLTEYCQGPCHENQNCIATHESNGIDIITALILNDINPLGKKRMDLVLELKNNASKLLLAIMESRHDSENAERILYNMRPKELVEVIKKAYMQGEVEFEDGENGEDGAASPRNVGHNIYILAHQLARHNKELQSMLKPGGQVDGDEALEFYAKHTAQIEIVRLDRTMEQIVFPVPSICEFLTKESKLRIYYTTERDEQGSKINDFFLRSEDLFNEMNWQKKLRAQPVLYWCARNMSFWSSISFNLAVLMNLLVAFFYPFKGVRGGTLEPHWSGLLWTAMLISLAIVIALPKPHGIRALIASTILRLIFSVGLQPTLFLLGAFNVCNKIIFLMSFVGNCGTFTRGYRAMVLDVEFLYHLLYLVICAMGLFVHEFFYSLLLFDLVYREETLYSKGLDICIVIRIVGMMTFHLCQKY

SEQ ID NO: 875925 - protein, 2043 aa, Homo sapiens
MSSFLHIGDICSLYAEGSTNGFISTLGLVDDRCVVQPETGDLNNPPKKFRDCLFKLCPMNRYSAQKQFWKAAKPGANSTTDAVLLNKLHHAADLEKKQNETENRKLLGTVIQYGNVIQLLHLKSNKYLTVNKRLPALLEKNAMRVTLDEAGNEGSWFYIQPFYKLRSIGDSVVIGDKVVLNPVNAGQPLHASSHQLVDNPGCNEVNSVNCNTSWKIVLFMKWSDNKDDILKGGDVVRLFHAEQEKFLTCDEHRKKQHVFLRTTGRQSATSATSSKALWEVEVVQHDPCRGGAGYWNSLFRFKHLATGHYLAAEVDPDQDASRSRLRNAQEKMVYSLVSVPEGNDISSIFELDPTTLRGGDSLVPRNSYVRLRHLCTNTWVHSTNIPIDKEEEKPVMLKIGTSPVKEDKEAFAIVPVSPAEVRDLDFANDASKVLGSIAGKLEKGTITQNERRSVTKLLEDLVYFVTGGTNSGQDVLEVVFSKPNRERQKLMREQNILKQIFKLLQAPFTDCGDGPMLRLEELGDQRHAPFRHICRLCYRVLRHSQQDYRKNQEYIAKQFGFMQKQIGYDVLAEDTITALLHNNRKLLEKHITAAEIDTFVSLVRKNREPRFLDYLSDLCVSMNKSIPVTQELICKAVLNPTNADILIETKLVLSRFEFEGVSSTGENALEAGEDEEEVWLFWRDSNKEIRSKSVRELAQDAKEGQKEDRDVLSYYRYQLNLFARMCLDRQYLAINEISGQLDVDLILRCMSDENLPYDLRASFCRLMLHMHVDRDPQEQVTPVKYARLWSEIPSEIAIDDYDSSGASKDEIKERFAQTMEFVEEYLRDVVCQRFPFSDKEKNKLTFEVVNLARNLIYFGFYNFSDLLRLTKILLAILDCVHVTTIFPISKMAKGEENKGNNDVEKLKSSNVMRSIHGVGELMTQVVLRGGGFLPMTPMAAAPEGNVKQAEPEKEDIMVMDTKLKIIEILQFILNVRLDYRISCLLCIFKREFDESNSQTSETSSGNSSQEGPSNVPGALDFEHIEEQAEGIFGGSEENTPLDLDDHGGRTFLRVLLHLTMHDYPPLVSGALQLLFRHFSQRQEVLQAFKQVQLLVTSQDVDNYKQIKQDLDQLRSIVEKSELWVYKGQGPDETMDGASGENEHKKTEEGNNKPQKHESTSSYNYRVVKEILIRLSKLCVQESASVRKSRKQQQRLLRNMGAHAVVLELLQIPYEKAEDTKMQEIMRLAHEFLQNFCAGNQQNQALLHKHINLFLNPGILEAVTMQHIFMNNFQLCSEINERVVQHFVHCIETHGRNVQYIKFLQTIVKAEGKFIKKCQDMVMAELVNSGEDVLVFYNDRASFQTLIQMMRSERDRMDENSPLMYHIHLVELLAVCTEGKNVYTEIKCNSLLPLDDIVRVVTHEDCIPEVKIAYINFLNHCYVDTEVEMKEIYTSNHMWKLFENFLVDICRACNNTSDRKHADSILEKYVTEIVMSIVTTFFSSPFSDQSTTLQTRQPVFVQLLQGVFRVYHCNWLMPSQKASVESCIRVLSDVAKSRAIAIPVDLDSQVNNLFLKSHSIVQKTAMNWRLSARNAARRDSVLAASRDYRNIIERLQDIVSALEDRLRPLVQAELSVLVDVLHRPELLFPENTDARRKCESGGFICKLIKHTKQLLEENEEKLCIKVLQTLREMMTKDRGYGEKGEALRQVLVNRYYGNVRPSGRRESLTSFGNGPLSAGGPGKPGGGGGGSGSSSMSRGEMSLAEVQCHLDKEGASNLVIDLIMNASSDRVFHESILLAIALLEGGNTTIQHSFFCRLTEDKKSEKFFKVFYDRMKVAQQEIKATVTVNTSDLGNKKKDDEVDRDAPSRKKAKEPTTQITEEVRDQLLEASAATRKAFTTFRREADPDDHYQPGEGTQATADKAKDDLEMSAVITIMQPILRFLQLLCENHNRDLQNFLRCQNNKTNYNLVCETLQFLDCICGSTTGGLGLLGLYINEKNVALINQTLESLTEYCQGPCHENQNCIATHESNGIDIITALILNDINPLGKKRMDLVLELKASRN

SEQ ID NO: 875926 - protein, 2043 aa, Homo sapiens; identical to SEQ ID NO: 875925

SEQ ID NO: 875927 - protein, 804 aa, Homo sapiens
MSSFLHIGDICSLYAEGSTNGFISTLGLVDDRCVVQPETGDLNNPPKKFRDCLFKLCPMNRYSAQKQFWKAAKPGANSTTDAVLLNKLHHAADLEKKQNETENRKLLGTVIQYGNVIQLLHLKSNKYLTVNKRLPALLEKNAMRVTLDEAGNEGSWFYIQPFYKLRSIGDSVVIGDKVVLNPVNAGQPLHASSHQLVDNPGCNEVNSVNCNTSWKIVLFMKWSDNKDDILKGGDVVRLFHAEQEKFLTCDEHRKKQHVFLRTTGRQSATSATSSKALWEVEVVQHDPCRGGAGYWNSLFRFKHLATGHYLAAEVDPDQDASRSRLRNAQEKMVYSLVSVPEGNDISSIFELDPTTLRGGDSLVPRNSYVRLRHLCTNTWVHSTNIPIDKEEEKPVMLKIGTSPVKEDKEAFAIVPVSPAEVRDLDFANDASKVLGSIAGKLEKGTITQNERRSVTKLLEDLVYFVTGGTNSGQDVLEVVFSKPNRERQKLMREQNILKQIFKLLQAPFTDCGDGPMLRLEELGDQRHAPFRHICRLCYRVLRHSQQDYRKNQEYIAKQFGFMQKQIGYDVLAEDTITALLHNNRKLLEKHITAAEIDTFVSLVRKNREPRFLDYLSDLCVSMNKSIPVTQELICKAVLNPTNADILIETKLVLSRFEFEGVSSTGENALEAGEDEEEVWLFWRDSNKEIRSKSVRELAQDAKEGQKEDRDVLSYYSCHDSLYVYPSARFPVCTCLTSATHLHGPQCLLGSSCKTCQSCHLKGREGEERKEVNQLILLKEKEREDKARLLLFFNKINKTADKMPF

SEQ ID NO: 875928 - protein, 2691 aa, Homo sapiens
MSSFLHIGDICSLYAEGSTNGFISTLGLVDDRCVVQPETGDLNNPPKKFRDCLFKLCPMNRYSAQKQFWKAAKPGANSTTDAVLLNKLHHAADLEKKQNETENRKLLGTVIQYGNVIQLLHLKSNKYLTVNKRLPALLEKNAMRVTLDEAGNEGSWFYIQPFYKLRSIGDSVVIGDKVVLNPVNAGQPLHASSHQLVDNPGCNEVNSVNCNTSWKIVLFMKWSDNKDDILKGGDVVRLFHAEQEKFLTCDEHRKKQHVFLRTTGRQSATSATSSKALWEVEVVQHDPCRGGAGYWNSLFRFKHLATGHYLAAEVDPDQDASRSRLRNAQEKMVYSLVSVPEGNDISSIFELDPTTLRGGDSLVPRNSYVRLRHLCTNTWVHSTNIPIDKEEEKPVMLKIGTSPVKEDKEAFAIVPVSPAEVRDLDFANDASKVLGSIAGKLEKGTITQNERRSVTKLLEDLVYFVTGGTNSGQDVLEVVFSKPNRERQKLMREQNILKQIFKLLQAPFTDCGDGPMLRLEELGDQRHAPFRHICRLCYRVLRHSQQDYRKNQEYIAKQFGFMQKQIGYDVLAEDTITALLHNNRKLLEKHITAAEIDTFVSLVRKNREPRFLDYLSDLCVSMNKSIPVTQELICKAVLNPTNADILIETKLVLSRFEFEGVSSTGENALEAGEDEEEVWLFWRDSNKEIRSKSVRELAQDAKEGQKEDRDVLSYYRYQLNLFARMCLDRQYLAINEISGQLDVDLILRCMSDENLPYDLRASFCRLMLHMHVDRDPQEQVTPVKYARLWSEIPSEIAIDDYDSSGASKDEIKERFAQTMEFVEEYLRDVVCQRFPFSDKEKNKLTFEVVNLARNLIYFGFYNFSDLLRLTKILLAILDCVHVTTIFPISKMAKGEENKGSNVMRSIHGVGELMTQVVLRGGGFLPMTPMAAAPEGNVKQAEPEKEDIMVMDTKLKIIEILQFILNVRLDYRISCLLCIFKREFDESNSQTSETSSGNSSQEGPSNVPGALDFEHIEEQAEGIFGGSEENTPLDLDDHGGRTFLRVLLHLTMHDYPPLVSGALQLLFRHFSQRQEVLQAFKQVQLLVTSQDVDNYKQIKQDLDQLRSIVEKSELWVYKGQGPDETMDGASGENEHKKTEEGNNKPQKHESTSSYNYRVVKEILIRLSKLCVQESASVRKSRKQQQRLLRNMGAHAVVLELLQIPYEKAEDTKMQEIMRLAHEFLQNFCAGNQQNQALLHKHINLFLNPGILEAVTMQHIFMNNFQLCSEINERVVQHFVHCIETHGRNVQYIKFLQTIVKAEGKFIKKCQDMVMAELVNSGEDVLVFYNDRASFQTLIQMMRSERDRMDENSPLMYHIHLVELLAVCTEGKNVYTEIKCNSLLPLDDIVRVVTHEDCIPEVKIAYINFLNHCYVDTEVEMKEIYTSNHMWKLFENFLVDICRACNNTSDRKHADSILEKYVTEIVMSIVTTFFSSPFSDQSTTLQTRQPVFVQLLQGVFRVYHCNWLMPSQKASVESCIRVLSDVAKSRAIAIPVDLDSQVNNLFLKSHSIVQKTAMNWRLSARNAARRDSVLAASRDYRNIIERLQDIVSALEDRLRPLVQAELSVLVDVLHRPELLFPENTDARRKCESGGFICKLIKHTKQLLEENEEKLCIKVLQTLREMMTKDRGYGEKGEALRQVLVNRYYGNVRPSGRRESLTSFGNGPLSAGGPGKPGGGGGGSGSSSMSRGEMSLAEVQCHLDKEGASNLVIDLIMNASSDRVFHESILLAIALLEGGNTTIQHSFFCRLTEDKKSEKFFKVFYDRMKVAQQEIKATVTVNTSDLGNKKKDDEVDRDAPSRKKAKEPTTQITEEVRDQLLEASAATRKAFTTFRREADPDDHYQPGEGTQATADKAKDDLEMSAVITIMQPILRFLQLLCENHNRDLQNFLRCQNNKTNYNLVCETLQFLDCICGSTTGGLGLLGLYINEKNVALINQTLESLTEYCQGPCHENQNCIATHESNGIDIITALILNDINPLGKKRMDLVLELKNNASKLLLAIMESRHDSENAERILYNMRPKELVEVIKKAYMQGEVEFEDGENGEDGAASPRNVGHNIYILAHQLARHNKELQSMLKPGGQVDGDEALEFYAKHTAQIEIVRLDRTMEQIVFPVPSICEFLTKESKLRIYYTTERDEQGSKINDFFLRSEDLFNEMNWQKKLRAQPVLYWCARNMSFWSSISFNLAVLMNLLVAFFYPFKGVRGGTLEPHWSGLLWTAMLISLAIVIALPKPHGIRALIASTILRLIFSVGLQPTLFLLGAFNVCNKIIFLMSFVGNCGTFTRGYRAMVLDVEFLYHLLYLVICAMGLFVHEFFYSLLLFDLVYREETLLNVIKSVTRNGRSIILTAVLALILVYLFSIVGYLFFKDDFILEVDRLPNETAVPETGESLASEFLFSDVCRVESGENCSSPAPREELVPAEETEQDKEHTCETLLMCIVTVLSHGLRSGGGVGDVLRKPSKEEPLFAARVIYDLLFFFMVIIIVLNLIFGVIIDTFADLRSEKQKKEEILKTTCFICGLERDKFDNKTVTFEEHIKEEHNMWHYLCFIVLVKVKDSTEYTGPESYVAEMIKERNLDWFPRMRAMSLVSSDSEGEQNELRNLQEKLESTMKLVTNLSGQLSELKDQMTEQRKQKQRIGLLGHPPHMNVNPQQPA

SEQ ID NO: 875929 - protein, 2706 aa, Homo sapiens
MSSFLHIGDICSLYAEGSTNGFISTLGLVDDRCVVQPETGDLNNPPKKFRDCLFKLCPMNRYSAQKQFWKAAKPGANSTTDAVLLNKLHHAADLEKKQNETENRKLLGTVIQYGNVIQLLHLKSNKYLTVNKRLPALLEKNAMRVTLDEAGNEGSWFYIQPFYKLRSIGDSVVIGDKVVLNPVNAGQPLHASSHQLVDNPGCNEVNSVNCNTSWKIVLFMKWSDNKDDILKGGDVVRLFHAEQEKFLTCDEHRKKQHVFLRTTGRQSATSATSSKALWEVEVVQHDPCRGGAGYWNSLFRFKHLATGHYLAAEVDPDFEEECLEFQPSVDPDQDASRSRLRNAQEKMVYSLVSVPEGNDISSIFELDPTTLRGGDSLVPRNSYVRLRHLCTNTWVHSTNIPIDKEEEKPVMLKIGTSPVKEDKEAFAIVPVSPAEVRDLDFANDASKVLGSIAGKLEKGTITQNERRSVTKLLEDLVYFVTGGTNSGQDVLEVVFSKPNRERQKLMREQNILKQIFKLLQAPFTDCGDGPMLRLEELGDQRHAPFRHICRLCYRVLRHSQQDYRKNQEYIAKQFGFMQKQIGYDVLAEDTITALLHNNRKLLEKHITAAEIDTFVSLVRKNREPRFLDYLSDLCVSMNKSIPVTQELICKAVLNPTNADILIETKLVLSRFEFEGVSSTGENALEAGEDEEEVWLFWRDSNKEIRSKSVRELAQDAKEGQKEDRDVLSYYRYQLNLFARMCLDRQYLAINEISGQLDVDLILRCMSDENLPYDLRASFCRLMLHMHVDRDPQEQVTPVKYARLWSEIPSEIAIDDYDSSGASKDEIKERFAQTMEFVEEYLRDVVCQRFPFSDKEKNKLTFEVVNLARNLIYFGFYNFSDLLRLTKILLAILDCVHVTTIFPISKMAKGEENKGSNVMRSIHGVGELMTQVVLRGGGFLPMTPMAAAPEGNVKQAEPEKEDIMVMDTKLKIIEILQFILNVRLDYRISCLLCIFKREFDESNSQTSETSSGNSSQEGPSNVPGALDFEHIEEQAEGIFGGSEENTPLDLDDHGGRTFLRVLLHLTMHDYPPLVSGALQLLFRHFSQRQEVLQAFKQVQLLVTSQDVDNYKQIKQDLDQLRSIVEKSELWVYKGQGPDETMDGASGENEHKKTEEGNNKPQKHESTSSYNYRVVKEILIRLSKLCVQESASVRKSRKQQQRLLRNMGAHAVVLELLQIPYEKAEDTKMQEIMRLAHEFLQNFCAGNQQNQALLHKHINLFLNPGILEAVTMQHIFMNNFQLCSEINERVVQHFVHCIETHGRNVQYIKFLQTIVKAEGKFIKKCQDMVMAELVNSGEDVLVFYNDRASFQTLIQMMRSERDRMDENSPLMYHIHLVELLAVCTEGKNVYTEIKCNSLLPLDDIVRVVTHEDCIPEVKIAYINFLNHCYVDTEVEMKEIYTSNHMWKLFENFLVDICRACNNTSDRKHADSILEKYVTEIVMSIVTTFFSSPFSDQSTTLQTRQPVFVQLLQGVFRVYHCNWLMPSQKASVESCIRVLSDVAKSRAIAIPVDLDSQVNNLFLKSHSIVQKTAMNWRLSARNAARRDSVLAASRDYRNIIERLQDIVSALEDRLRPLVQAELSVLVDVLHRPELLFPENTDARRKCESGGFICKLIKHTKQLLEENEEKLCIKVLQTLREMMTKDRGYGEKGEALRQVLVNRYYGNVRPSGRRESLTSFGNGPLSAGGPGKPGGGGGGSGSSSMSRGEMSLAEVQCHLDKEGASNLVIDLIMNASSDRVFHESILLAIALLEGGNTTIQHSFFCRLTEDKKSEKFFKVFYDRMKVAQQEIKATVTVNTSDLGNKKKDDEVDRDAPSRKKAKEPTTQITEEVRDQLLEASAATRKAFTTFRREADPDDHYQPGEGTQATADKAKDDLEMSAVITIMQPILRFLQLLCENHNRDLQNFLRCQNNKTNYNLVCETLQFLDCICGSTTGGLGLLGLYINEKNVALINQTLESLTEYCQGPCHENQNCIATHESNGIDIITALILNDINPLGKKRMDLVLELKNNASKLLLAIMESRHDSENAERILYNMRPKELVEVIKKAYMQGEVEFEDGENGEDGAASPRNVGHNIYILAHQLARHNKELQSMLKPGGQVDGDEALEFYAKHTAQIEIVRLDRTMEQIVFPVPSICEFLTKESKLRIYYTTERDEQGSKINDFFLRSEDLFNEMNWQKKLRAQPVLYWCARNMSFWSSISFNLAVLMNLLVAFFYPFKGVRGGTLEPHWSGLLWTAMLISLAIVIALPKPHGIRALIASTILRLIFSVGLQPTLFLLGAFNVCNKIIFLMSFVGNCGTFTRGYRAMVLDVEFLYHLLYLVICAMGLFVHEFFYSLLLFDLVYREETLLNVIKSVTRNGRSIILTAVLALILVYLFSIVGYLFFKDDFILEVDRLPNETAVPETGESLASEFLFSDVCRVESGENCSSPAPREELVPAEETEQDKEHTCETLLMCIVTVLSHGLRSGGGVGDVLRKPSKEEPLFAARVIYDLLFFFMVIIIVLNLIFGVIIDTFADLRSEKQKKEEILKTTCFICGLERDKFDNKTVTFEEHIKEEHNMWHYLCFIVLVKVKDSTEYTGPESYVAEMIKERNLDWFPRMRAMSLVSSDSEGEQNELRNLQEKLESTMKLVTNLSGQLSELKDQMTEQRKQKQRIGLLGHPPHMNVNPQQPA

SEQ ID NO: 875930 - protein, 2739 aa, Homo sapiens
MSSFLHIGDICSLYAEGSTNGFISTLGLVDDRCVVQPETGDLNNPPKKFRDCLFKLCPMNRYSAQKQFWKAAKPGANSTTDAVLLNKLHHAADLEKKQNETENRKLLGTVIQYGNVIQLLHLKSNKYLTVNKRLPALLEKNAMRVTLDEAGNEGSWFYIQPFYKLRSIGDSVVIGDKVVLNPVNAGQPLHASSHQLVDNPGCNEVNSVNCNTSWKIVLFMKWSDNKDDILKGGDVVRLFHAEQEKFLTCDEHRKKQHVFLRTTGRQSATSATSSKALWEVEVVQHDPCRGGAGYWNSLFRFKHLATGHYLAAEVDPDQDASRSRLRNAQEKMVYSLVSVPEGNDISSIFELDPTTLRGGDSLVPRNSYVRLRHLCTNTWVHSTNIPIDKEEEKPVMLKIGTSPVKEDKEAFAIVPVSPAEVRDLDFANDASKVLGSIAGKLEKGTITQNERRSVTKLLEDLVYFVTGGTNSGQDVLEVVFSKPNRERQKLMREQNILKQIFKLLQAPFTDCGDGPMLRLEELGDQRHAPFRHICRLCYRVLRHSQQDYRKNQEYIAKQFGFMQKQIGYDVLAEDTITALLHNNRKLLEKHITAAEIDTFVSLVRKNREPRFLDYLSDLCVSMNKSIPVTQELICKAVLNPTNADILIETKLVLSRFEFEGVSSTGENALEAGEDEEEVWLFWRDSNKEIRSKSVRELAQDAKEGQKEDRDVLSYYRYQLNLFARMCLDRQYLAINEISGQLDVDLILRCMSDENLPYDLRASFCRLMLHMHVDRDPQEQVTPVKYARLWSEIPSEIAIDDYDSSGASKDEIKERFAQTMEFVEEYLRDVVCQRFPFSDKEKNKLTFEVVNLARNLIYFGFYNFSDLLRLTKILLAILDCVHVTTIFPISKMAKGEENKGNNDVEKLKSSNVMRSIHGVGELMTQVVLRGGGFLPMTPMAAAPEGNVKQAEPEKEDIMVMDTKLKIIEILQFILNVRLDYRISCLLCIFKREFDESNSQTSETSSGNSSQEGPSNVPGALDFEHIEEQAEGIFGGSEENTPLDLDDHGGRTFLRVLLHLTMHDYPPLVSGALQLLFRHFSQRQEVLQAFKQVQLLVTSQDVDNYKQIKQDLDQLRSIVEKSELWVYKGQGPDETMDGASGENEHKKTEEGNNKPQKHESTSSYNYRVVKEILIRLSKLCVQESASVRKSRKQQQRLLRNMGAHAVVLELLQIPYEKAEDTKMQEIMRLAHEFLQNFCAGNQQNQALLHKHINLFLNPGILEAVTMQHIFMNNFQLCSEINERVVQHFVHCIETHGRNVQYIKFLQTIVKAEGKFIKKCQDMVMAELVNSGEDVLVFYNDRASFQTLIQMMRSERDRMDENSPLMYHIHLVELLAVCTEGKNVYTEIKCNSLLPLDDIVRVVTHEDCIPEVKIAYINFLNHCYVDTEVEMKEIYTSNHMWKLFENFLVDICRACNNTSDRKHADSILEKYVTEIVMSIVTTFFSSPFSDQSTTLQTRQPVFVQLLQGVFRVYHCNWLMPSQKASVESCIRVLSDVAKSRAIAIPVDLDSQVNNLFLKSHSIVQKTAMNWRLSARNAARRDSVLAASRDYRNIIERLQDIVSALEDRLRPLVQAELSVLVDVLHRPELLFPENTDARRKCESGGFICKLIKHTKQLLEENEEKLCIKVLQTLREMMTKDRGYGEKLISIDELDNAELPPAPDSENATEELEPSPPLRQLEDHKRGEALRQVLVNRYYGNVRPSGRRESLTSFGNGPLSAGGPGKPGGGGGGSGSSSMSRGEMSLAEVQCHLDKEGASNLVIDLIMNASSDRVFHESILLAIALLEGGNTTIQHSFFCRLTEDKKSEKFFKVFYDRMKVAQQEIKATVTVNTSDLGNKKKDDEVDRDAPSRKKAKEPTTQITEEVRDQLLEASAATRKAFTTFRREADPDDHYQPGEGTQATADKAKDDLEMSAVITIMQPILRFLQLLCENHNRDLQNFLRCQNNKTNYNLVCETLQFLDCICGSTTGGLGLLGLYINEKNVALINQTLESLTEYCQGPCHENQNCIATHESNGIDIITALILNDINPLGKKRMDLVLELKNNASKLLLAIMESRHDSENAERILYNMRPKELVEVIKKAYMQGEVEFEDGENGEDGAASPRNVGHNIYILAHQLARHNKELQSMLKPGGQVDGDEALEFYAKHTAQIEIVRLDRTMEQIVFPVPSICEFLTKESKLRIYYTTERDEQGSKINDFFLRSEDLFNEMNWQKKLRAQPVLYWCARNMSFWSSISFNLAVLMNLLVAFFYPFKGVRGGTLEPHWSGLLWTAMLISLAIVIALPKPHGIRALIASTILRLIFSVGLQPTLFLLGAFNVCNKIIFLMSFVGNCGTFTRGYRAMVLDVEFLYHLLYLVICAMGLFVHEFFYSLLLFDLVYREETLLNVIKSVTRNGRSIILTAVLALILVYLFSIVGYLFFKDDFILEVDRLPNETAVPETGESLASEFLFSDVCRVESGENCSSPAPREELVPAEETEQDKEHTCETLLMCIVTVLSHGLRSGGGVGDVLRKPSKEEPLFAARVIYDLLFFFMVIIIVLNLIFGVIIDTFADLRSEKQKKEEILKTTCFICGLERDKFDNKTVTFEEHIKEEHNMWHYLCFIVLVKVKDSTEYTGPESYVAEMIKERNLDWFPRMRAMSLVSSDSEGEQNELRNLQEKLESTMKLVTNLSGQLSELKDQMTEQRKQKQRIGLLGHPPHMNVNPQQPA

SEQ ID NO: 875931 - protein, 175 aa, Homo sapiens
MVIIIVLNLIFGVIIDTFADLRSEKQKKEEILKTTCFICGLERDKFDNKTVTFEEHIKEEHNMWHYLCFIVLVKVKDSTEYTGPESYVAEMIKERNLDWFPRMRAMSLVSSDSEGEQNELRNLQEKLESTMKLVTNLSGQLSELKDQMTEQRKQKQRIGLLGHPPHMNVNPQQPA

SEQ ID NO: 875932 - protein, 1630 aa, Homo sapiens
MSSFLHIGDICSLYAEGSTNGFISTLGLVDDRCVVQPETGDLNNPPKKFRDCLFKLCPMNRYSAQKQFWKAAKPGANSTTDAVLLNKLHHAADLEKKQNETENRKLLGTVIQYGNVIQLLHLKSNKYLTVNKRLPALLEKNAMRVTLDEAGNEGSWFYIQPFYKLRSIGDSVVIGDKVVLNPVNAGQPLHASSHQLVDNPGCNEVNSVNCNTSWKIVLFMKWSDNKDDILKGGDVVRLFHAEQEKFLTCDEHRKKQHVFLRTTGRQSATSATSSKALWEVEVVQHDPCRGGAGYWNSLFRFKHLATGHYLAAEVDPDQDASRSRLRNAQEKMVYSLVSVPEGNDISSIFELDPTTLRGGDSLVPRNSYVRLRHLCTNTWVHSTNIPIDKEEEKPVMLKIGTSPVKEDKEAFAIVPVSPAEVRDLDFANDASKVLGSIAGKLEKGTITQNERRSVTKLLEDLVYFVTGGTNSGQDVLEVVFSKPNRERQKLMREQNILKQIFKLLQAPFTDCGDGPMLRLEELGDQRHAPFRHICRLCYRVLRHSQQDYRKNQEYIAKQFGFMQKQIGYDVLAEDTITALLHNNRKLLEKHITAAEIDTFVSLVRKNREPRFLDYLSDLCVSMNKSIPVTQELICKAVLNPTNADILIETKLVLSRFEFEGVSSTGENALEAGEDEEEVWLFWRDSNKEIRSKSVRELAQDAKEGQKEDRDVLSYYRYQLNLFARMCLDRQYLAINEISGQLDVDLILRCMSDENLPYDLRASFCRLMLHMHVDRDPQEQVTPVKYARLWSEIPSEIAIDDYDSSGASKDEIKERFAQTMEFVEEYLRDVVCQRFPFSDKEKNKLTFEVVNLARNLIYFGFYNFSDLLRLTKILLAILDCVHVTTIFPISKMAKGEENKGNNDVEKLKSSNVMRSIHGVGELMTQVVLRGGGFLPMTPMAAAPEGNVKQAEPEKEDIMVMDTKLKIIEILQFILNVRLDYRISCLLCIFKREFDESNSQTSETSSGNSSQEGPSNVPGALDFEHIEEQAEGIFGGSEENTPLDLDDHGGRTFLRVLLHLTMHDYPPLVSGALQLLFRHFSQRQEVLQAFKQVQLLVTSQDVDNYKQIKQDLDQLRSIVEKSELWVYKGQGPDETMDGASGENEHKKTEEGNNKPQKHESTSSYNYRVVKEILIRLSKLCVQESASVRKSRKQQQRLLRNMGAHAVVLELLQIPYEKAEDTKMQEIMRLAHEFLQNFCAGNQQNQALLHKHINLFLNPGILEAVTMQHIFMNNFQLCSEINERVVQHFVHCIETHGRNVQYIKFLQTIVKAEGKFIKKCQDMVMAELVNSGEDVLVFYNDRASFQTLIQMMRSERDRMDENSPLMYHIHLVELLAVCTEGKNVYTEIKCNSLLPLDDIVRVVTHEDCIPEVKIAYINFLNHCYVDTEVEMKEIYTSNHMWKLFENFLVDICRACNNTSDRKHADSILEKYVTEIVMSIVTTFFSSPFSDQSTTLQTRQPVFVQLLQGVFRVYHCNWLMPSQKASVESCIRVLSDVAKSRAIAIPVDLDSQVNNLFLKSHSIVQKTAMNWRLSARNAARRDSVLAASRDYRNIIERLQDIVSALEMGAGETQSPSTERRKPSYRAPCPPQVRV

SEQ ID NO: 875933 - protein, 682 aa, Homo sapiens
MSSFLHIGDICSLYAEGSTNGFISTLGLVDDRCVVQPETGDLNNPPKKFRDCLFKLCPMNRYSAQKQFWKAAKPGANSTTDAVLLNKLHHAADLEKKQNETENRKLLGTVIQYGNVIQLLHLKSNKYLTVNKRLPALLEKNAMRVTLDEAGNEGSWFYIQPFYKLRSIGDSVVIGDKVVLNPVNAGQPLHASSHQLVDNPGCNEVNSVNCNTSWKIVLFMKWSDNKDDILKGGDVVRLFHAEQEKFLTCDEHRKKQHVFLRTTGRQSATSATSSKALWEVEVVQHDPCRGGAGYWNSLFRFKHLATGHYLAAEVDPDQDASRSRLRNAQEKMVYSLVSVPEGNDISSIFELDPTTLRGGDSLVPRNSYVRLRHLCTNTWVHSTNIPIDKEEEKPVMLKIGTSPVKEDKEAFAIVPVSPAEVRDLDFANDASKVLGSIAGKLEKGTITQNERRSVTKLLEDLVYFVTGGTNSGQDVLEVVFSKPNRERQKLMREQNILKQIFKLLQAPFTDCGDGPMLRLEELGDQRHAPFRHICRLCYRVLRHSQQDYRKNQEYIAKQFGFMQKQIGYDVLAEDTITALLHNNRKLLEKHITAAEIDTFVSLVRKNREPRFLDYLSDLCVSMNKSIPVTQELICKAVLNPTNADILIETKLVLSRFEFEGVSSTGENAEAQESLKPRRQRLQ

SEQ ID NO: 875934 - protein, 47 aa, Homo sapiens
MSFVGNCGTFTRGYRAMVLDVEFLYHLLYLVICAMGLFVHEFFYSLL

SEQ ID NO: 875935 - protein, 352 aa, Homo sapiens
MSDIRHSLLRRDALSAAKEVLYHLDIYFSSQLQSAPLPIVDKGPVELLEEFVFQVPKERSAQPKEQTKDSVRQIIFSSLFSPQGNKADDSRMSLLGKLVSMAVAVCRIPVLECAASWLQRTPVVYCVRLAKALVDDYCCLVPGSIQTLKQIFSASPRFCCQFITSVTALYDLSSDDLIPPMDLLEMIVTWIFEDPSVLQVLMTLQLHLTEKNLYGRLGLILFDHMVPLVEEINRLADELNPLNASQEIELSLDRLAQALQVAMASGALLCTRDDLRTLCSRLPHNNLLQLVISGPVQQSPHAALPPGFYPHIHTPPLGYGAVPAHPAAHPALPTHPGHTFISGVTFPFRPIR

SEQ ID NO: 875936 - protein, 449 aa, Homo sapiens
MSDIRHSLLRRDALSAAKEVLYHLDIYFSSQLQSAPLPIVDKGPVELLEEFVFQVPKERSAQPKRLNSLQELQLLEIMCNYFQEQTKDSVRQIIFSSLFSPQGNKADDSRMSLLGKLVSMAVAVCRIPVLECAASWLQRTPVVYCVRLAKALVDDYCCLVPGSIQTLKQIFSASPRFCCQFITSVTALYDLSSDDLIPPMDLLEMIVTWIFEDPRLILITFLNTPIAANLPIGFLELTPLVGLIRWCVKAPLAYKRKKKPPLSNGHVSNKVTKDPGVGMDRDSHLLYSKLHLSVLQVLMTLQLHLTEKNLYGRLGLILFDHMVPLVEEINRLADELNPLNASQEIELSLDRLAQALQVAMASGALLCTRDDLRTLCSRLPHNNLLQLVISGPVQQSPHAALPPGFYPHIHTPPLGYGAVPAHPAAHPALPTHPGHTFISGVTFPFRPIR

SEQ ID NO: 875937 - protein, 414 aa, Homo sapiens
MSDIRHSLLRRDALSAAKEVLYHLDIYFSSQLQSAPLPIVDKGPVELLEEFVFQVPKERSAQPKRLNSLQELQLLEIMCNYFQEQTKDSVRQIIFSSLFSPQGNKADDSRMSLLGKLVSMAVAVCRIPVLECAASWLQRTPVVYCVRLAKALVDDYCCLVPGSIQTLKQIFSASPRFCCQFITSVTALYDLSSDDLIPPMDLLEMIVTWIFEDPRLILITFLNTPIAANLPIGFLELTPLVGLIRWCVKAPLAYKRKKKPPLSNGHVSNKVTKDPGVGMDRDSHLLYSKLHLSVLQVLMTLQLHLTEKNLYGRLGLILFDHMVPLVEEINRLADELNPLNASQEIELSLDRLAQALQVAMASGALLCTRDDLRTLCSRLPHNKTVVRMRPSGVCEFLILLLATWRPPQTQSSGL

SEQ ID NO: 875938 - protein, 430 aa, Homo sapiens
MSDIRHSLLRRDALSAAKEVLYHLDIYFSSQLQSAPLPIVDKGPVELLEEFVFQVPKERSAQPKEQTKDSVRQIIFSSLFSPQGNKADDSRMSLLGKLVSMAVAVCRIPVLECAASWLQRTPVVYCVRLAKALVDDYCCLVPGSIQTLKQIFSASPRFCCQFITSVTALYDLSSDDLIPPMDLLEMIVTWIFEDPRLILITFLNTPIAANLPIGFLELTPLVGLIRWCVKAPLAYKRKKKPPLSNGHVSNKVTKDPGVGMDRDSHLLYSKLHLSVLQVLMTLQLHLTEKNLYGRLGLILFDHMVPLVEEINRLADELNPLNASQEIELSLDRLAQALQVAMASGALLCTRDDLRTLCSRLPHNNLLQLVISGPVQQSPHAALPPGFYPHIHTPPLGYGAVPAHPAAHPALPTHPGHTFISGVTFPFRPIR

SEQ ID NO: 875939 - protein, 479 aa, Homo sapiens
MSDIRHSLLRRDALSAAKEVLYHLDIYFSSQLQSAPLPIVDKGPVELLEEFVFQVPKERSAQPKRLNSLQELQLLEIMCNYFQEQTKDSVRQIIFSSLFSPQGNKADDSRMSLLGKLVSMAVAVCRIPVLECAASWLQRTPVVYCVRLAKALVDDYCCLVPGSIQTLKQIFSASPRFCCQFITSVTALYDLSSDDLIPPMDLLEMIVTWIFEDPRLILITFLNTPIAANLPIGFLELTPLVGLIRWCVKAPLAYKRKKKPPLSNGHVSNKVTKDPGVGMDRDSHLLYSKLHLSVLQVLMTLQLHLTEKNLYGRLGLILFDHMVPLVEEINRLADELNPLNASQEIELSLDRLAQALQVAMASGALLCTRDDLRTLCSRLPHNKTLNFGVVCKASFLGLLLGIQPPPAGDLGSRAAVASRRAPPGVLPQIESHTEEGEEEHVTGGKRHGTPEAESNDTQAATHGGQNEGPHSSASNGERA

SEQ ID NO: 875940 - protein, 383 aa, Homo sapiens [sequence omitted]

SEQ ID NO: 875941 - protein, 405 aa, Homo sapiens
MSDIRHSLLRRDALSAAKEVLYHLDIYFSSQLQSAPLPIVDKGPVELLEEFVFQVPKERSAQPKRLNSLQELQLLEIMCNYFQEQTKDSVRQIIFSSLFSPQGNKADDSRMSLLGKLVSMAVAVCRIPVLECAASWLQRTPVVYCVRLAKALVDDYCCLVPGSIQTLKQIFSASPRFCCQFITSVTALYDLSSDDLIPPMDLLEMIVTWIFEDPRLILITFLNTPIAANLPIGFLELTPLVGLIRWCVKAPLAYKRKKKPPLSNGHVSNKVTKDPGVGMDRDSHLLYSKLHLSVLQVLMTLQLHLTEKNLYGRLGLILFDHMVPLVEEINRLADELNPLNASQEIELSLDRLAQALQVAMASGALLCTRGGVSLLCPGWSAVVRSRLIATSASRVLVILPPQPPK

SEQ ID NO: 875942 - protein, 339 aa, Homo sapiens [sequence omitted]

SEQ ID NO: 875943 - protein, 411 aa, Homo sapiens
MSDIRHSLLRRDALSAAKEVLYHLDIYFSSQLQSAPLPIVDKGPVELLEEFVFQVPKERSAQPKRLNSLQELQLLEIMCNYFQEQTKDSVRQIIFSSLFSPQGNKADDSRMSLLGKLVSMAVAVCRIPVLECAASWLQRTPVVYCVRLAKALVDDYCCLVPGSIQTLKQIFSASPRFCCQFITSVTALYDLSSDDLIPPMDLLEMIVTWIFEDPRLILITFLNTPIAANLPIGFLELTPLVGLIRWCVKAPLAYKRKKKPPLSNGHVSNKVTKDPGVGMDRDSHLLYSKLHLSVLQVLMTLQLHLTEKNLYGRLGLILFDHMVPLVEEINRLADELNPLNASQEIELSLDRLAQALQVAMASGALLCTRDDLRTLCSRLPHNKTLNFGVVCKASFLGLLLGIQVGRGHSRL

SEQ ID NO: 875944 - protein, 165 aa, Homo sapiens
TRRVGCSCSVLQVLMTLQLHLTEKNLYGRLGLILFDHMVPLVEEINRLADELNPLNASQEIELSLDRLAQALQVAMASGALLCTRDDLRTLCSRLPHNNLLQLVISGPVQQSPHAALPPGFYPHIHTPPLGYGAVPAHPAAHPALPTHPGHTFISGVTFPFRPIR

SEQ ID NO: 875945 - protein, 123 aa, Homo sapiens
MPFLYDISSCWTSFCFLFFSPLDGVLLCFPGWNAVARSQLTATSASQVQAILLVSASGVAGIIGTCHHAQPIFVFLVEMGFHHVGQACLKLLNSGDPPASASQSAGITGMSHHARPFFFFFSF

SEQ ID NO: 875946 - protein, 741 aa, Homo sapiens
MALFTPWKLSSQKLGFFLVTFGFIWGMMLLHFTIQQRTQPESSSMLREQILDLSKRYIKALAEENRNVVDGPYAGVMTAYDLKKTLAVLLDNILQRIGKLESKVDNLVVNGTGTNSTNSTTAVPSLVALEKINVADIINGAQEKCVLPPMDGYPHCEGKIKWMKDMWRSDPCYADYGVDGSTCSFFIYLSEVENWCPHLPWRAKNPYEEADHNSLAEIRTDFNILYSMMKKHEEFRWMRLRIRRMADAWIQAIKSLAEKQNLEKRKRKKVLVHLGLLTKESGFKIAETAFSGGPLGELVQWSDLITSLYLLGHDIRISASLAELKEIMKKVVGNRSGCPTVGDRIVELIYIDIVGLAQFKKTLGPSWVHYQCMLRVLDSFGTEPEFNHANYAQSKGHKTPWGKWNLNPQQFYTMFPHTPDNSFLGFVVEQHLNSSDIHHINEIKRQNQSLVYGKVDSFWKNKKIYLDIIHTYMEVHATVYGSSTKNIPSYVKNHGILSGRDLQFLLRETKLFVGLGFPYEGPAPLEAIANGCAFLNPKFNPPKSSKNTDFFIGKPTLRELTSQHPYAEVFIGRPHVWTVDLNNQEEVEDAVKAILNQKIEPYMPYEFTCEGMLQRINAFIEKQDFCHGQVMWPPLSALQVKLAEPGQSCKQVCQESQLICEPSFFQHLNKDKDMLKYKVTCQSSELAKDILVPSFDPKNKHCVFQGDLLLFSCAGAHPRHQRVCPCRDFIKGQVALCKDCL

SEQ ID NO: 875947 - protein, 741 aa, Homo sapiens; identical to SEQ ID NO: 875946

SEQ ID NO: 875948 - protein, 484 aa, Homo sapiens
MALFTPWKLSSQKLGFFLVTFGFIWGMMLLHFTIQQRTQPESSSMLREQILDLSKRYIKALAEENRNVVDGPYAGVMTAYDLKKTLAVLLDNILQRIGKLESKVDNLVVNGTGTNSTNSTTAVPSLVALEKINVADIINGAQEKCVLPPMDGYPHCEGKIKWMKDMWRSDPCYADYGVDGSTCSFFIYLSEVENWCPHLPWRAKNPYEEADHNSLAEIRTDFNILYSMMKKHEEFRWMRLRIRRMADAWIQAIKSLAEKQNLEKRKRKKVLVHLGLLTKESGFKIAETAFSGGPLGELVQWSDLITSLYLLGHDIRISASLAELKEIMKKVVGNRSGCPTVGDRIVELIYIDIVGLAQFKKTLGPSWVHYQCMLRVLDSFGTEPEFNHANYAQSKGHKTPWGKWNLNPQQFYTMFPHTPDNSFLGFVVEQHLNSSDIHHINEIKRQNQSLVYGKVDSFWKIELLEEMIMADILVLPVFQAWPSQ

SEQ ID NO: 875949 - protein, 530 aa, Homo sapiens
RSRKQQKQEAAEAGSSMMKKHEEFRWMRLRIRRMADAWIQAIKSLAEKQNLEKRKRKKVLVHLGLLTKESGFKIAETAFSGGPLGELVQWSDLITSLYLLGHDIRISASLAELKEIMKKVVGNRSGCPTVGDRIVELIYIDIVGLAQFKKTLGPSWVHYQCMLRVLDSFGTEPEFNHANYAQSKGHKTPWGKWNLNPQQFYTMFPHTPDNSFLGFVVEQHLNSSDIHHINEIKRQNQSLVYGKVDSFWKNKKIYLDIIHTYMEVHATVYGSSTKNIPSYVKNHGILSGRDLQFLLRETKLFVGLGFPYEGPAPLEAIANGCAFLNPKFNPPKSSKNTDFFIGKPTLRELTSQHPYAEVFIGRPHVWTVDLNNQEEVEDAVKAILNQKIEPYMPYEFTCEGMLQRINAFIEKQDFCHGQVMWPPLSALQVKLAEPGQSCKQVCQESQLICEPSFFQHLNKDKDMLKYKVTCQSSELAKDILVPSFDPKNKHCVFQGDLLLFSCAGAHPRHQRVCPCRDFIKGQVALCKDCL

SEQ ID NO: 875950 - protein, 705 aa, Homo sapiens
QLIKACNSTSEVKDLLEQKSKLTIEVAELQRQLQLEVKNQQNIKEERERMRANLEELRSQHNEKVEENSTLQQRLEESEGELRKNLEELFQVKMEREQHQTEIRDLQDQLSEMHDELDSAKRSEDREKGALIEELLQAKQDLQDLLIAKEEQEDLLRKRERELTALKGALKEEVSSHDQEMDKLKEQYDAELQALRESVEEATKNVEVLASRSNTSEQDQAGTEMRVKLLQEENEKLQGRSEELERRVAQLQRQIEDLKGDEAKAKETLKKYEGEIRQLEEALVHARKEEKEAVSARRALENELEAAQGNLSQTTQEQKQLSEKLKEESEQKEQLRRLKNEMENERWHLGKTIEKLQKEMADIVEASRTSTLELQNQLDEYKEKNRRELAEMQRQLKEKTLEAEKSRLTAMKMQDEMRLMEEELRDYQRAQDEALTKRQLLEQTLKDLEYELEAKSHLKDDRSRLVKQMEDKVSQLEMELEEERNNSDLLSERISRSREQMEQLRNELLQERAARQDLECDKISLERQNKDLKSRIIHLEGSYRSSKEGLVVQMEARIAELEDRLESEERDRANLQLSNRRLERKVKELVMQVDDEHLSLTDQKDQLSLRLKAMKRQVEEAEEEIDRLESSKKKLQRELEEQMDMNEHLQGQLNSMKKDLRLKKLPSKVLDDMDDDDDLSTDGGSLYEAPVSYTFSKDSTVASQI

SEQ ID NO: 875951 - protein, 656 aa, Homo sapiens
MRANLEELRSQHNEKVEENSTLQQRLEESEGELRKNLEELFQVKMEREQHQTEIRDLQDQLSEMHDELDSAKRSEDREKGALIEELLQAKQDLQDLLIAKEEQEDLLRKRERELTALKGALKEEVSSHDQEMDKLKEQYDAELQALRESVEEATKNVEVLASRSNTSEQDQAGTEMRVKLLQEENEKLQGRSEELERRVAQLQRQIEDLKGDEAKAKETLKKYEGEIRQLEEALVHARKEEKEAVSARRALENELEAAQGNLSQTTQEQKQLSEKLKEESEQKEQLRRLKNEMENERWHLGKTIEKLQKEMADIVEASRTSTLELQNQLDEYKEKNRRELAEMQRQLKEKTLEAEKSRLTAMKMQDEMRLMEEELRDYQRAQDEALTKRQLLEQTLKDLEYELEAKSHLKDDRSRLVKQMEDKVSQLEMELEEERNNSDLLSERISRSREQMEQLRNELLQERAARQDLECDKISLERQNKDLKSRIIHLEGSYRSSKEGLVVQMEARIAELEDRLESEERDRANLQLSNRRLERKVKELVMQVDDEHLSLTDQKDQLSLRLKAMKRQVEEAEEEIDRLESSKKKLQRELEEQMDMNEHLQGQLNSMKKDLRLKKLPSKVLDDMDDDDDLSTDGGSLYEAPVSYTFSKDSTVASQI

SEQ ID NO: 875952 - protein, 656 aa, Homo sapiens; identical to SEQ ID NO: 875951

SEQ ID NO: 875953 - protein, 656 aa, Homo sapiens; identical to SEQ ID NO: 875951

SEQ ID NO: 875954 - protein, 607 aa, Homo sapiens
MRAVRRGLREGGAMAAARDPPEVSLREATQRKLRRFSELRGKLVARGEFWDIVAITAADEKQELAYNQQLSEKLKRKELPLGVQYHVFVDPAGAKIGNGGSTLCALQCLEKLYGDKWNSFTILLIHSGGYSQRLPNASALGKIFTALPLGNPIYQMLELKLAMYIDFPLNMNPGILVTCADDIELYSIGEFEFIRFDKPGFTALAHPSSLTIGTTHGVFVLDPFDDLKHRDLEYRSCHRFLHKPSIEKMYQFNAVCRPGNFCQQDFAGGDIADLKLDSDYVYTDSLFYMDHKSAKMLLAFYEKIGTLSCEIDAYGDFLQALGPGATVEYTRNTSNVIKEESELVEMRQRIFHLLKGTSLNVVVLNNSKFYHIGTTEEYLFYFTSDNSLKSELGLQSITFSIFPDIPECSGKTSCIIQSILDSRCSVAPGSVVEYSRLGPDVSVGENCIISGSYILTKAALPAHSFVCSLSLKMNRCLKYATMAFGVQDNLKKSVKTLSDIKLLQFFGVCFLSCLDVWNLKVTEELFSGNKTCLSLWTARIFPVCSSLSDSVITSLKMLNAVKNKSAFSLNSYKLLSIEEMLIYKDVEDMITYREQIFLEISLKSSLM

SEQ ID NO: 875955 - protein, 164 aa, Homo sapiens
MRAVRRGLREGGAMAAARDPPEVSLREATQRKLRRFSELRGKLVARGEFWDIVAITAADEKQELAYNQQLSEKLKRKELPLGVQYHVFVDPAGAKIGNGGSTLCALQCLEKLYGDKWNSFTILLIHSDEWKKKVSESYVITIERLEDDLQIKEKELTELRNIFG

SEQ ID NO: 875956 - protein, 607 aa, Homo sapiens; identical to SEQ ID NO: 875954

SEQ ID NO: 875957 - protein, 607 aa, Homo sapiens; identical to SEQ ID NO: 875954

SEQ ID NO: 875958 - protein, 38 aa, Homo sapiens
GRPTKQDKELAVVLEPRVGFQQGEAFLPGVIQEVQGKV

SEQ ID NO: 875959 - protein, 728 aa, Homo sapiens
MSESGEMSEFGYIMELIAKGKVTIKNIERELICPACKELFTHPLILPCQHSICHKCVKELLLTLDDSFNDVGSDNSNQSSPRLRLPSPSMDKIDRINRPGWKRNSLTPRTTVFPCPGCEHDVDLGERGINGLFRNFTLETIVERYRQAARAATAIMCDLCKPPPQESTKSCMDCSASYCNECFKIHHPWGTIKAQHEYVGPTTNFRPKILMCPEHETERINMYCELCRRPVCHLCKLGGNHANHRVTTMSSAYKTLKEKLSKDIDYLIGKESQVKSQISELNLLMKETECNGERAKEEAITHFEKLFEVLEERKSSVLKAIDSSKKLRLDKFQTQMEEYQGLLENNGLVGYAQEVLKETDQSCFVQTAKQLHLRIQKATESLKSFRPAAQTSFEDYVVNTSKQTELLGELSFFSSGIDVPEINEEQSKVYNNALINWHHPEKDKADSYVLEYRKINRDDEMSWNEIEVCGTSKIIQDLENSSTYAFRVRAYKGSICSPCSRELILHTPPAPVFSFLFDEKCGYNNEHLLLNLKRDRVESRAGFNLLLAAERIQVGYYTSLDYIIGDTGITKGKHFWAFRVEPYSYLVKVGVASSDKLQEWLRSPRDAVSPRYEQDSGHDSGSEDACFDSSQPFTLVTIGMQKFFIPKSPTSSNEPENRVLPMPTSIGIFLDCDKGKVNFYDMDQMKCLYERQVDCSHTLYPAFALMGSGGIQLEEPITAKYLEYQEDM

SEQ ID NO: 875960 - protein, 148 aa, Homo sapiens
CRHAIKAGECLAGAALSRVRTRFVCAFVCLRCGPNRCRDPRGGGASARPAPPGEGFTASAAAAAALVCSVRSRSPDRCTRILASRARLPGSPRWPSFHPSPLLAFPGASPLFLVNSLWAGSSAKLRLKTEKEKRKDKFDTPASVLQSL

SEQ ID NO: 875961 - protein, 148 aa, Homo sapiens; identical to SEQ ID NO: 875960

SEQ ID NO: 875962 - protein, 726 aa, Homo sapiens
MEGDGSDSPVTIKNIERELICPACKELFTHPLILPCQHSICHKCVKELLLTLDDSFNDVGSDNSNQSSPRLRLPSPSMDKIDRINRPASQRRSVGWRGWKRNSLTPRTTVFPCPGCEHDVDLGERGINGLFRNFTLETIVERYRQAARAATAIMCDLCKPPPQESTKSCMDCSASYCNECFKIHHPWGTIKAQHEYVGPTTNFRPKILMCPEHETERINMYCELCRRPVCHLCKLGGNHANHRVTTMSSAYKTLKEKLSKDIDYLIGKESQVKSQISELNLLMKETECNGERAKEEAITHFEKLFEVLEERKSSVLKAIDSSKKLRLDKFQTQMEEYQGLLENNGLVGYAQEVLKETDQSCFVQTAKQLHLRIQKATESLKSFRPAAQTSFEDYVVNTSKQTELLGELSFFSSGIDVPEINEEQSKVYNNALINWHHPEKDKADSYVLEYRKINRDDEMSWNEIEVCGTSKIIQDLENSSTYAFRVRAYKGSICSPCSRELILHTPPAPVFSFLFDEKCGYNNEHLLLNLKRDRVESRAGFNLLLAAERIQVGYYTSLDYIIGDTGITKGKHFWAFRVEPYSYLVKVGVASSDKLQEWLRSPRDAVSPRYEQDSGHDSGSEDACFDSSQPFTLVTIGMQKFFIPKSPTSSNEPENRVLPMPTSIGIFLDCDKGKVNFYDMDQMKCLYERQVDCSHTLYPAFALMGSGGIQLEEPITAKYLEYQEDM

SEQ ID NO: 875963 - protein, 573 aa, Homo sapiens
MCDLCKPPPQESTKSCMDCSASYCNECFKIHHPWGTIKAQHEYVGPTTNFRPKILMCPEHETERINMYCELCRRPVCHLCKLGGNHANHRVTTMSSAYKTLKEKLSKDIDYLIGKESQVKSQISELNLLMKETECNGERAKEEAITHFEKLFEVLEERKSSVLKAIDSSKKLRLDKFQTQMEEYQGLLENNGLVGYAQEVLKETDQSCFVQTAKQLHLRIQKATESLKSFRPAAQTSFEDYVVNTSKQTELLGELSFFSSGIDVPEINEEQSKVYNNALINWHHPEKDKADSYVLEYRKINRDDEMSWNEIEVCGTSKIIQDLENSSTYAFRVRAYKGSICSPCSRELILHTPPAPVFSFLFDEKCGYNNEHLLLNLKRDRVESRAGFNLLLAAERIQVGYYTSLDYIIGDTGITKGKHFWAFRVEPYSYLVKVGVASSDKLQEWLRSPRDAVSPRYEQDSGHDSGSEDACFDSSQPFTLVTIGMQKFFIPKSPTSSNEPENRVLPMPTSIGIFLDCDKGKVNFYDMDQMKCLYERQVDCSHTLYPAFALMGSGGIQLEEPITAKYLEYQEDM

SEQ ID NO: 875964 - protein, 133 aa, Homo sapiens
MSESGEMSEFGYIMELIAKGKVSDEARGAAAWAPDSGTTWPATVGVRVHSSAWEGREAGIQEPRRSPGVPAAAECKVAAFSLLRGISEISQEGTFGRFWGQLGSNRGSRTPKGESPASEDGEEGGALAKGALP

SEQ ID NO: 875965 - protein, 148 aa, Homo sapiens; identical to SEQ ID NO: 875960

SEQ ID NO: 875966 - protein, 716 aa, Homo sapiens [sequence omitted]

SEQ ID NO: 875967 - protein, 810 aa, Homo sapiens
MVARHFGRPRWEDHLRSGVRDQPGQHGCQRSEGKPAVTGLTQLPHSPKGQSHFHCTPNNSTKFVSRQWVSRAENLPQSTRLPAAKASMAFLLPPVESAHWIYTLPQVVARRLLHQFKLLQTLAGGFLLPVAFSQSLWPFSGRTPVRPGKNDLMGAQELPGVFPLLPLPLYFTQLSKLTQPPGWKRNSLTPRTTVFPCPGCEHDVDLGERGINGLFRNFTLETIVERYRQAARAATAIMCDLCKPPPQESTKSCMDCSASYCNECFKIHHPWGTIKAQHEYVGPTTNFRPKILMCPEHETERINMYCELCRRPVCHLCKLGGNHANHRVTTMSSAYKTLKEKLSKDIDYLIGKESQVKSQISELNLLMKETECNGERAKEEAITHFEKLFEVLEERKSSVLKAIDSSKKLRLDKFQTQMEEYQGLLENNGLVGYAQEVLKETDQSCFVQTAKQLHLRIQKATESLKSFRPAAQTSFEDYVVNTSKQTELLGELSFFSSGIDVPEINEEQSKVYNNALINWHHPEKDKADSYVLEYRKINRDDEMSWNEIEVCGTSKIIQDLENSSTYAFRVRAYKGSICSPCSRELILHTPPAPVFSFLFDEKCGYNNEHLLLNLKRDRVESRAGFNLLLAAERIQVGYYTSLDYIIGDTGITKGKHFWAFRVEPYSYLVKVGVASSDKLQEWLRSPRDAVSPRYEQDSGHDSGSEDACFDSSQPFTLVTIGMQKFFIPKSPTSSNEPENRVLPMPTSIGIFLDCDKGKVNFYDMDQMKCLYERQVDCSHTLYPAFALMGSGGIQLEEPITAKYLEYQEDM

SEQ ID NO: 875968 - protein, 655 aa, Homo sapiens
MVARHFGRPRWEDHLRSGVRDQPGQHGWKRNSLTPRTTVFPCPGCEHDVDLGERGINGLFRNFTLETIVERYRQAARAATAIMCDLCKPPPQESTKSCMDCSASYCNECFKIHHPWGTIKAQHEYVGPTTNFRPKILMCPEHETERINMYCELCRRPVCHLCKLGGNHANHRVTTMSSAYKTLKEKLSKDIDYLIGKESQVKSQISELNLLMKETECNGERAKEEAITHFEKLFEVLEERKSSVLKAIDSSKKLRLDKFQTQMEEYQGLLENNGLVGYAQEVLKETDQSCFVQTAKQLHLRIQKATESLKSFRPAAQTSFEDYVVNTSKQTELLGELSFFSSGIDVPEINEEQSKVYNNALINWHHPEKDKADSYVLEYRKINRDDEMSWNEIEVCGTSKIIQDLENSSTYAFRVRAYKGSICSPCSRELILHTPPAPVFSFLFDEKCGYNNEHLLLNLKRDRVESRAGFNLLLAAERIQVGYYTSLDYIIGDTGITKGKHFWAFRVEPYSYLVKVGVASSDKLQEWLRSPRDAVSPRYEQDSGHDSGSEDACFDSSQPFTLVTIGMQKFFIPKSPTSSNEPENRVLPMPTSIGIFLDCDKGKVNFYDMDQMKCLYERQVDCSHTLYPAFALMGSGGIQLEEPITAKYLEYQEDM

SEQ ID NO: 875969 - protein, 44 aa, Homo sapiens
SFSFGNLQVARWSGDGDEGEELAVAPSHGLCITNSPFLFPQNTL

SEQ ID NO: 875970 - protein, 88 aa, Homo sapiens
ARSRPAVGPPSFLPPAWTTVFRLNCGASPTVSPHRHLRGNRRSATSSCPPSWGDGQKSRARSLSRRTPGNRSRLIAGNCDKSSVGYWS

SEQ ID NO: 875971 - protein, 73 aa, Homo sapiens
ARSRPAVGPPSFLPPAWTTVFRLNCGASPTVSPHRHLRGNRRSATSSCPPSWGDGQKSRARSLSRRTPGNSSY

SEQ ID NO: 875972 - protein, 73 aa, Homo sapiens
ARSRPAVGPPSFLPPAWTTVFRLNCGASPTVSPHRHLRGNRRSATSSCPPSWGDGQKSRARSLSRRTPGNSTH

SEQ ID NO: 875973 - protein, 73 aa, Homo sapiens; identical to SEQ ID NO: 875971

SEQ ID NO: 875974 - protein, 76 aa, Homo sapiens
RQPLTSSLSSPPQFVEVEGQITSLVDLYPSFLRKGYRREIFIAFVCSISYLLGLTMVTEGGTYVFPDNLPHYGILR

SEQ ID NO: 875975 - protein, 620 aa, Homo sapiens
MATKEKLQCLKDFHKDILKPSPGKSPGTRPEDEAEGKPPQREKWSSKIDFVLSVAGGFVGLGNVWRFPYLCYKNGGGAFLIPYFIFLFGSGLPVFFLEIIIGQYTSEGGITCWEKICPLFSGIGYASVVIVSLLNVYYIVILAWATYYLFQSFQKELPWAHCNHSWNTPHCMEDTMRKNKSVWITISSTNFTSPVIEFWERNVLSLSPGIDHPGSLKWDLALCLLLVWLVCFFCIWKGVRSTGKVVYFTATFPFAMLLVLLVRGLTLPGAGAGIKFYLYPDITRLEDPQVWIDAGTQIFFSYAICLGAMTSLGSYNKYKYNSYRDCMLLGCLNSGTSFVSGFAIFSILGFMAQEQGVDIADVAESGPGLAFIAYPKAVTMMPLPTFWSILFFIMLLLLGLDSQFVEVEGQITSLVDLYPSFLRKGYRREIFIAFVCSISYLLGLTMVTEGGMYVFQLFDYYAASGVCLLWVAFFECFVIAWIYGGDNLYDGIEDMIGYRPGPWMKYSWAVITPVLCVGCFIFSLVKYVPLTYNKTYVYPNWAIGLGWSLALSSMLCVPLVIVIRLCQTEGPFLVRVKYLLTPREPNRWAVEREGATPYNSRTVMNGALVKPTHIIVETMM

SEQ ID NO: 875976 - protein, 506 aa, Homo sapiens
MATKEKLQCLKDFHKDILKPSPGKSPGTRPEDEAEGKPPQREKWSSKIDFVLSVAGGFVGLGNVWRFPYLCYKNGGGAFLIPYFIFLFGSGLPVFFLEIIIGQYTSEGGITCWEKICPLFSGIGYASVVIVSLLNVYYIVILAWATYYLFQSFQKELPWAHCNHSWNTPHCMEDTMRKNKSVWITISSTNFTSPVIEFWERNVLSLSPGIDHPGSLKWDLALCLLLVWLVCFFCIWKGVRSTGKVVYFTATFPFAMLLVLLVRGLTLPGAGAGIKFYLYPDITRLEDPQVWIDAGTQIFFSYAICLGAMTSLGSYNKYKYNSYRDCMLLGCLNSGTSFVSGFAIFSILGFMAQEQGVDIADVAESGPGLAFIAYPKAVTMMPLPTFWSILFFIMLLLLGLDSQGCFIFSLVKYVPLTYNKTYVYPNWAIGLGWSLALSSMLCVPLVIVIRLCQTEGPFLVRVKYLLTPREPNRWAVEREGATPYNSRTVMNGALVKPTHIIVETMM

SEQ ID NO: 875977 - protein, 200 aa, Homo sapiens
MATKEKLQCLKDFHKDILKPSPGKSPGTRPEDEAEGKPPQREKWSSKIDFVLSVAGGFVGLGNVWRFPYLCYKNGGGAFLIPYFIFLFGSGLPVFFLEIIIGQYTSEGGITCWEKICPLFSGIGYASVVIVSLLNVYYIVILAWATYYLFQSFQKELPWAHCNHSWNTPHCMEDTMRKNKSVWITISSTNFTSPVIEFWE

SEQ ID NO: 875978 - protein, 258 aa, Homo sapiens
MATKEKLQCLKDFHKDILKPSPGKSPGTRPEDEAEGKPPQREKWSSKIDFVLSVAGGFVGLGNVWRFPYLCYKNGGGAFLIPYFIFLFGSGLPVFFLEIIIGQYTSEGGITCWEKICPLFSGIGYASVVIVSLLNVYYIVILAWATYYLFQSFQKELPWAHCNHSWNTPHCMEDTMRKNKSVWITISSTNFTSPVIEFWERNVLSLSPGIDHPGSLKWDLALCLLLVWLVFIRRIHGTSVKSIQGRFQRIPPISSHQT

SEQ ID NO: 875979 - protein, 620 aa, Homo sapiens; identical to SEQ ID NO: 875975

SEQ ID NO: 875980 - protein, 620 aa, Homo sapiens; identical to SEQ ID NO: 875975

SEQ ID NO: 875981 - protein, 182 aa, Homo sapiens
MYHLVYSWNKAFIKHVSFIRSLTDWSACDDGVVASPFEFCIAWIYGGDNLYDGIEDMIGYRPGPWMKYSWAVITPVLCVGCFIFSLVKYVPLTYNKTYVYPNWAIGLGWSLALSSMLCVPLVIVIRLCQTEGPFLVRVKYLLTPREPNRWAVEREGATPYNSRTVMNGALVKPTHIIVETMM

SEQ ID NO: 875982 - protein, 200 aa, Homo sapiens; identical to SEQ ID NO: 875977

SEQ ID NO: 875983 - protein, 177 aa, Homo sapiens [sequence omitted]

SEQ ID NO: 875984 - protein, 130 aa, Homo sapiens
RRWNFSLHFSSCFFPPATFSASFAVSANPPSTLYFAICLRLSLNLLFSFKIFLFLLPRSPSLFLHTFTWKELGSDVHKQNTFSVGCYLARKNTGCQETEYRKPRKTRPWLEAQNCQHQPPSSRKGTGAGD

SEQ ID NO: 875985 - protein, 400 aa, Homo sapiens
AWFPGRPPLASPLEACGLRRRAGFGGVRASGAMGTPPGLQTDCEALLSRFQETDSVRFEDFTELWRNMKFGTIFCGRMRNLEKNMFTKEALALAWRYFLPPYTFQIRVGALYLLYGLYNTQLCQPKQKIRVALKDWDEVLKFQQDLVNAQHFDAAYIFRKLRLDRAFHFTAMPKLLSYRMKKKIHRAEVTEEFKDPSDRVMKLITSDVLEEMLNVHDHYQNMKHVISVDKSKPDKALSLIKDDFFDNIKNIVLEHQQWHKDRKNPSLKSKTNDGEEKMEGNSQETERCERAESLAKIKSKAFSVVIQASKSRRHRQVKLDSSDSDSASGQGQVKATRKKEKKERLKPAGRKMSLRNKGNVQNIHKEDKPLSLSMPVITEEEENESLSGTEFTASKKRRKH

SEQ ID NO: 875986 - protein, 123 aa, Homo sapiens [sequence omitted]

SEQ ID NO: 875987 - protein, 375 aa, Homo sapiens
VFTKGQVTTGQYRMLAKRGGYVWVETQATVIYNTKNSQPQCIVCVNYVVSGRMRNLEKNMFTKEALALAWRYFLPPYTFQIRVGALYLLYGLYNTQLCQPKQKIRVALKDWDEVLKFQQDLVNAQHFDAAYIFRKLRLDRAFHFTAMPKLLSYRMKKKIHRAEVTEEFKDPSDRVMKLITSDVLEEMLNVHDHYQNMKHVISVDKSKPDKALSLIKDDFFDNIKNIVLEHQQWHKDRKNPSLKSKTNDGEEKMEGNSQETERCERAESLAKIKSKAFSVVIQASKSRRHRQVKLDSSDSDSASGQGQVKATRKKEKKERLKPAGRKMSLRNKGNVQNIHKEDKPLSLSMPVITEEEENESLSGTEFTASKKRRKH

SEQ ID NO: 875988 - protein, 124 aa, Homo sapiens
RFLLKWLQGRRRGVRPVRVPCGLQPRRPGPAGLSSRRRRRLDGGQSHAASSARRGRQAGPVPPGETAPGIKERLASETTRQKGRPQMTLGGRLPGLRCSVPGGAARLSTPPQVRQHVFWAASVC

SEQ ID NO: 875989 - protein, 133 aa, Homo sapiens
MKQCVESSPLVPIQQEWLDHMLRLIPESLKEGKEREELLESLINEVSSDFENSMKRYLVQSVLVKPPVKSLEDEGGPLPESPVGLDYSNPWHSSYVQARNQIFSNLHIIHPTMKMLLDLGYTTFADTVLLDFT

SEQ ID NO: 875990 - protein, 299 aa, Homo sapiens
MGGPRALLAALWALEAAGTAALRIGAFNIQSFGDSKVSDPACGSIIAKILAGYDLALVQEVRDPDLSAVSALMEQINSVSEHEYSFVSSQPLGRDQYKEMYLFVYRKDAVSVVDTYLYPDPEDVFSREPFVVKFSAPGTGERAPPLPSRRALTPPPLPAAAQNLVLIPLHAAPHQAVAEIDALYDVYLDVIDKWGTDDMLFLGDFNADCSYVRAQDWAAIRLRSSEVFKWLIPDSADTTVGNSDCAYDRIVACGARLRRSLKPQSATVHDFQEEFGLDQTQALAISDHFPVEVTLKFHR

SEQ ID NO: 875991 - protein, 350 aa, Homo sapiens
GRAWVTSGSRAILGCAVLCRTRPQPGPGIPIPLGSLSLGPLHPHPSLSLRAMGGPRALLAALWALEAAGTAALRIGAFNIQSFGDSKVSDPACGSIIAKILAGYDLALVQEVRDPDLSAVSALMEQINSVSEHEYSFVSSQPLGRDQYKEMYLFVYRKDAVSVVDTYLYPDPEDVFSREPFVVKFSAPGTGERAPPLPSRRALTPPPLPAAAQNLVLIPLHAAPHQAVAEIDALYDVYLDVIDKWGTDDMLFLGDFNADCSYVRAQDWAAIRLRSSEVFKWLIPDSADTTVGNSDCAYDRIVACGARLRRSLKPQSATVHDFQEEFGLDQTQALAISDHFPVEVTLKFHR

SEQ ID NO: 875992 - protein, 358 aa, Homo sapiens
WQGLGYLGLPRNFGMCSPVSDTPAAWTRDPHPPRISEPRASAPTSKAAASVPPSLSLRAMGGPRALLAALWALEAAGTAALRIGAFNIQSFGDSKVSDPACGSIIAKILAGYDLALVQEVRDPDLSAVSALMEQINSVSEHEYSFVSSQPLGRDQYKEMYLFVYRKDAVSVVDTYLYPDPEDVFSREPFVVKFSAPGTGERAPPLPSRRALTPPPLPAAAQNLVLIPLHAAPHQAVAEIDALYDVYLDVIDKWGTDDMLFLGDFNADCSYVRAQDWAAIRLRSSEVFKWLIPDSADTTVGNSDCAYDRIVACGARLRRSLKPQSATVHDFQEEFGLDQTQALAISDHFPVEVTLKFHR

SEQ ID NO: 875993 - protein, 100 aa, Homo sapiens
AAAEGRGGSVGLTAGLRRRQRLSLPASRSAPWAGPGLCWPHSGRWKPPGPPRFASEPSTFRASVTAKCRTPLAAASSRRWGPGRGGAAFRGADRADPRTR

SEQ ID NO: 875994 - protein, 299 aa, Homo sapiens
MAEDKETKHGGHKNGRKGGLSGTSFFTWFMVIALLGVWTSVAVVWFDLVDYEEVLAKAKDFRYNLSEVLQGKLGIYDADGDGDFDVDDAKVLLGLKERSTSEPAVPPEEAEPHTEPEEQVPVEAEPQNIEDEAKEQIQSLLHEMVHAEHVEGEDLQQEDGPTGEPQQEDDEFLMATDVDDRFETLEPEVSHEETEHSYHVEETVSQDCNQDMEEMMSEQENPDSSEPVVEDERLHHDTDDVTYQVYEEQAVYEPLENEGIEITEVTAPPEDNPVEDSQVIVEEVSIFPVEEQQEVPPDT

SEQ ID NO: 875995 - protein, 226 aa, Homo sapiens
MAEDKETKHGGHKNGRKGGLSGTSFFTWFMVIALLGVWTSVAVVWFDLVDYEEVLAKAKDFRYNLSEVLQGKLGIYDADGDGDFDVDDAKVLLGEGPSGVAKRKTKAKVKELTKEELKKEKEKPESRKESKNEERKKGKKEDVRKDKKIADADLSRKESPKGKKDREKEKVDLEKSAKTKENRKKSTNMKDVSSKMASRDKDDRKESRSSTRYAHLTKGNTQKRNG

SEQ ID NO: 875996 - protein, 203 aa, Homo sapiens
MAQRKNAKSSGNSSSSGSGSGSTSAGSSSPGARRETKHGGHKNGRKGGLSGTSFFTWFMVIALLGVWTSVAVVWFDLVDYEEVLAKAKDFRYNLSEVLQGKLGIYDADGDGDFDVDDAKVLLGLTKDGSNENIDSLEEVLNILAEESSDWFYGFLSFLYDIMTPFEMLEEEEEESETADGVDGTSQNEGVQGKTCVILDLHNQ

SEQ ID NO: 875997 - protein, 130 aa, Homo sapiens
MAQRKNAKSSGNSSSSGSGSGSTSAGSSSPGARRETKHGGHKNGRKGGLSGTSFFTWFMVIALLGVWTSVAVVWFDLVDYEEVLGKLGIYDADGDGDFDVDDAKVLLGRQVHILCFLLVVIKCWKQLFLL

SEQ ID NO: 875998 - protein, 139 aa, Homo sapiens
ICSCRWFDLVDYEEVLGKLGIYDADGDGDFDVDDAKVLLGETKHGGHKNGRKGGLSGTSFFTWFMVIALLGVWTSVAVVWFDLVDYEEVLAKAKDFRYNLSEVLQGKLGIYDADGDGDFDVDDAKVLLETKHGGHNGEE

SEQ ID NO: 875999 - protein, 111 aa, Homo sapiens
LAALPGPPEDNPVEDSQVIVEEVSIFPVEEQQEVPPETNRKTDDPEQKAKGVKKKKPKLLNKFDKTIKAELDAAEKLRKRGKIEEAVNAFKELVRKYPQSPRARYGKAQVF

SEQ ID NO: 876000 - protein, 798 aa, Homo sapiens
RGILCCSRNSPPPPAAPASRVYPRALKEVHQPSPAPADRAMAQRKNAKSSGNSSSSGSGSGSTSAGSSSPGARRETKHGGHKNGRKGGLSGTSFFTWFMVIALLGVWTSVAVVWFDLVDYEEVLGKLGIYDADGDGDFDVDDAKVLLGLKERSTSEPAVPPEEAEPHTEPEEQVPVEAEPQNIEDEAKEQIQSLLHEMVHAEHVEGEDLQQEDGPTGEPQQEDDEFLMATDVDDRFETLEPEVSHEETEHSYHVEETVSQDCNQDMEEMMSEQENPDSSEPVVEDERLHHDTDDVTYQVYEEQAVYEPLENEGIEITEVTAPPEDNPVEDSQVIVEEVSIFPVEEQQEVPPETNRKTDDPEQKAKVKKKKPKLLNKFDKTIKAELDAAEKLRKRGKIEEAVNAFKELVRKYPQSPRARYGKAQCEDDLAEKRRSNEVLRGAIETYQEVASLPDVPADLLKLSLKRRSDRQQFLGHMRGSLLTLQRLVQLFPNDTSLKNDLGVGYLLIGDNDNAKKVYEEVLSVTPNDGFAKVHYGFILKAQNKIAESIPYLKEGIESGDPGTDDGRFYFHLGDAMQRVGNKEAYKWYELGHKRGHFASVWQRSLYNVNGLKAQPWWTPKETGYTELVKSLERNWKLIRDEGLAVMDKAKGLFLPEDENLREKGDWSQFTLWQQGRRNENACKGAPKTCTLLEKFPETTGCRRGQIKYSIMHPGTHVWPHTGPTNCRLRMHLGLVIPKEGCKIRCANETKTWEEGKVLIFDDSFEHEVWQDASSFRLIFIVDVWHPELTPQQRRSLPAI

SEQ ID NO: 876001 - protein, 758 aa, Homo sapiens
MAQRKNAKSSGNSSSSGSGSGSTSAGSSSPGARRETKHGGHKNGRKGGLSGTSFFTWFMVIALLGVWTSVAVVWFDLVDYEEVLGKLGIYDADGDGDFDVDDAKVLLGLKERSTSEPAVPPEEAEPHTEPEEQVPVEAEPQNIEDEAKEQIQSLLHEMVHAEHVEGEDLQQEDGPTGEPQQEDDEFLMATDVDDRFETLEPEVSHEETEHSYHVEETVSQDCNQDMEEMMSEQENPDSSEPVVEDERLHHDTDDVTYQVYEEQAVYEPLENEGIEITEVTAPPEDNPVEDSQVIVEEVSIFPVEEQQEVPPETNRKTDDPEQKAKVKKKKPKLLNKFDKTIKAELDAAEKLRKRGKIEEAVNAFKELVRKYPQSPRARYGKAQCEDDLAEKRRSNEVLRGAIETYQEVASLPDVPADLLKLSLKRRSDRQQFLGHMRGSLLTLQRLVQLFPNDTSLKNDLGVGYLLIGDNDNAKKVYEEVLSVTPNDGFAKVHYGFILKAQNKIAESIPYLKEGIESGDPGTDDGRFYFHLGDAMQRVGNKEAYKWYELGHKRGHFASVWQRSLYNVNGLKAQPWWTPKETGYTELVKSLERNWKLIRDEGLAVMDKAKGLFLPEDENLREKGDWSQFTLWQQGRRNENACKGAPKTCTLLEKFPETTGCRRGQIKYSIMHPGTHVWPHTGPTNCRLRMHLGLVIPKEGCKIRCANETKTWEEGKVLIFDDSFEHEVWQDASSFRLIFIVDVWHPELTPQQRRSLPAI

SEQ ID NO: 876002 - protein, 739 aa, Homo sapiens
MAQRKNAKSSGNSSSSGSGSGSTSAGSSSPGARRETKHGGHKNGRKGGLSGTSFFTWFMVIALLGVWTSVAVVWFDLVDYEEVLGKLGIYDADGDGDFDVDDAKVLLGLKERSTSEPAVPPEEAEPHTEPEEQVPVEAEPQNIEDEAKEQIQSLLHEMVHAEHVEGEDLQQEDGPTGEPQQEDDEFLMATDVDDRFETLEPEVSHEETEHSYHVEETDSSEPVVEDERLHHDTDDVTYQVYEEQAVYEPLENEGIEITEVTAPPEDNPVEDSQVIVEEVSIFPVEEQQEVPPETNRKTDDPEQKAKVKKKKPKLLNKFDKTIKAELDAAEKLRKRGKIEEAVNAFKELVRKYPQSPRARYGKAQCEDDLAEKRRSNEVLRGAIETYQEVASLPDVPADLLKLSLKRRSDRQQFLGHMRGSLLTLQRLVQLFPNDTSLKNDLGVGYLLIGDNDNAKKVYEEVLSVTPNDGFAKVHYGFILKAQNKIAESIPYLKEGIESGDPGTDDGRFYFHLGDAMQRVGNKEAYKWYELGHKRGHFASVWQRSLYNVNGLKAQPWWTPKETGYTELVKSLERNWKLIRDEGLAVMDKAKGLFLPEDENLREKGDTQKILVDSREATSVPHIYAIGDVVEGRPELTPTAIMAGSESVGADMHPGTHVWPHTGPTNCRLRMHLGLVIPKEGCKIRCANETKTWEEGKVLIFDDSFEHEVWQDASSFRLIFIVDVWHPELTPQQRRSLPAI

SEQ ID NO: 876003 - protein, 637 aa, Homo sapiens
MAQRKNAKSSGNSSSSGSGSGSTSAGSSSPGARRETKHGGHKNGRKGGLSGTSFFTWFMVIALLGVWTSVAVVWFDLVDYEEVLGKLGIYDADGDGDFDVDDAKVLLGLKERSTSEPAVPPEEAEPHTEPEEQVPVEAEPQNIEDEAKEQIQSLLHEMVHAEHVEGEDLQQEDGPTGEPQQEDDEFLMATDVDDRFETLEPEVSHEETEHSYHVEETDSSEPVVEDERLHHDTDDVTYQVYEEQAVYEPLENEGIEITEVTAPPEDNPVEDSQVIVEEVSIFPVEEQQEVPPETNRKTDDPEQKAKVKKKKPKLLNKFDKTIKAELDAAEKLRKRGKIEEAVNAFKELVRKYPQSPRARYGKAQCEDDLAEKRRSNEVLRGAIETYQEVASLPDVPADLLKLSLKRRSDRQQFLGHMRGSLLTLQRLVQLFPNDTSLKNDLGVGYLLIGDNDNAKKVYEEVLSVTPNDGFAKVHYGFILKAQNKIAESIPYLKEGIESGDPGTDDGRFYFHLGDAMQRVGNKEAYKWYELGHKRGHFASVWQRSLYNVNGLKAQPWWTPKETGYTELVKSLERNWKLIRDEGLAVMDKAKGLFLPEDENLREKGDWSQFTLWQQGRRNENACKGAPKTCTLLEKFPE

SEQ ID NO: 876004 - protein, 729 aa, Homo sapiens
MAEDKETKHGGHKNGRKGGLSGTSFFTWFMVIALLGVWTSVAVVWFDLVDYEEVLGKLGIYDADGDGDFDVDDAKVLLGLKERSTSEPAVPPEEAEPHTEPEEQVPVEAEPQNIEDEAKEQIQSLLHEMVHAEHVEGEDLQQEDGPTGEPQQEDDEFLMATDVDDRFETLEPEVSHEETEHSYHVEETVSQDCNQDMEEMMSEQENPDSSEPVVEDERLHHDTDDVTYQVYEEQAVYEPLENEGIEITEVTAPPEDNPVEDSQVIVEEVSIFPVEEQQEVPPETNRKTDDPEQKAKVKKKKPKLLNKFDKTIKAELDAAEKLRKRGKIEEAVNAFKELVRKYPQSPRARYGKAQCEDDLAEKRRSNEVLRGAIETYQEVASLPDVPADLLKLSLKRRSDRQQFLGHMRGSLLTLQRLVQLFPNDTSLKNDLGVGYLLIGDNDNAKKVYEEVLSVTPNDGFAKVHYGFILKAQNKIAESIPYLKEGIESGDPGTDDGRFYFHLGDAMQRVGNKEAYKWYELGHKRGHFASVWQRSLYNVNGLKAQPWWTPKETGYTELVKSLERNWKLIRDEGLAVMDKAKGLFLPEDENLREKGDWSQFTLWQQGRRNENACKGAPKTCTLLEKFPETTGCRRGQIKYSIMHPGTHVWPHTGPTNCRLRMHLGLVIPKEGCKIRCANETKTWEEGKVLIFDDSFEHEVWQDASSFRLIFIVDVWHPELTPQQRRSLPAI

SEQ ID NO: 876005 - protein, 701 aa, Homo sapiens
LAALPGPPEDNPVEDSQVIVEEVSIFPVEEQQEVPPETNRKTDDPEQKAKGLKERSTSEPAVPPEEAEPHTEPEEQVPVEAEPQNIEDEAKEQIQSLLHEMVHAEHVEGEDLQQEDGPTGEPQQEDDEFLMATDVDDRFETLEPEVSHEETEHSYHVEETVSQDCNQDMEEMMSEQENPDSSEPVVEDERLHHDTDDVTYQVYEEQAVYEPLENEGIEITEVTAPPEDNPVEDSQVIVEEVSIFPVEEQQEVPPETNRKTDDPEQKAKVKKKKPKLLNKFDKTIKAELDAAEKLRKRGKIEEAVNAFKELVRKYPQSPRARYGKAQCEDDLAEKRRSNEVLRGAIETYQEVASLPDVPADLLKLSLKRRSDRQQFLGHMRGSLLTLQRLVQLFPNDTSLKNDLGVGYLLIGDNDNAKKVYEEVLSVTPNDGFAKVHYGFILKAQNKIAESIPYLKEGIESGDPGTDDGRFYFHLGDAMQRVGNKEAYKWYELGHKRGHFASVWQRSLYNVNGLKAQPWWTPKETGYTELVKSLERNWKLIRDEGLAVMDKAKGLFLPEDENLREKGDWSQFTLWQQGRRNENACKGAPKTCTLLEKFPETTGCRRGQIKYSIMHPGTHVWPHTGPTNCRLRMHLGLVIPKEGCKIRCANETKTWEEGKVLIFDDSFEHEVWQDASSFRLIFIVDVWHPELTPQQRRSLPAI

SEQ ID NO: 876006 - protein, 701 aa, Homo sapiens
MAEDKETKHGGHKNGRKGGLSGTSFFTWFMVIALLGVWTSVAVVWFDLVDYEEVLAKAKDFRYNLSEVLQGKLGIYDADGDGDFDVDDAKVLLGLKERSTSEPAVPPEEAEPHTEPEEQVPVEAEPQNIEDEAKEQIQSLLHEMVHAEHETEHSYHVEETVSQDCNQDMEEMMSEQENPDSSEPVVEDERLHHDTDDVTYQVYEEQAVYEPLENEGIEITEVTAPPEDNPVEDSQVIVEEVSIFPVEEQQEVPPETNRKTDDPEQKAKVKKKKPKLLNKFDKTIKAELDAAEKLRKRGKIEEAVNAFKELVRKYPQSPRARYGKAQCEDDLAEKRRSNEVLRGAIETYQEVASLPDVPADLLKLSLKRRSDRQQFLGHMRGSLLTLQRLVQLFPNDTSLKNDLGVGYLLIGDNDNAKKVYEEVLSVTPNDGFAKVHYGFILKAQNKIAESIPYLKEGIESGDPGTDDGRFYFHLGDAMQRVGNKEAYKWYELGHKRGHFASVWQRSLYNVNGLKAQPWWTPKETGYTELVKSLERNWKLIRDEGLAVMDKAKGLFLPEDENLREKGDWSQFTLWQQGRRNENACKGAPKTCTLLEKFPETTGCRRGQIKYSIMHPGTHVWPHTGPTNCRLRMHLGLVIPKEGCKIRCANETKTWEEGKVLIFDDSFEHEVWQDASSFRLIFIVDVWHPELTPQQRRSLPAI

SEQ ID NO: 876007 - protein, 67 aa, Homo sapiens
  misc_feature (18)..(18): Xaa can be any naturally occurring amino acid
PKTRPRSQEPMQKQKNLXTWEEGKVLIFDDSFEHEVWQDASSFRLIFIVDVWHPELTPQQRRSLPAI

SEQ ID NO: 876008 - protein, 313 aa, Homo sapiens
MAQRKNAKSSGNSSSSGSGSGSTSAGSSSPGARRETKHGGHKNGRKGGLSGTSFFTWFMVIALLGVWTSVAVVWFDLVDYEEVLGKLGIYDADGDGDFDVDDAKVLLGLKERSTSEPAVPPEEAEPHTEPEEQVPVEAEPQNIEDEAKEQIQSLLHEMVHAEHVEGEDLQQEDGPTGEPQQEDDEFLMATDVDDRFETLEPEVSHEETEHSYHVEETVSQDCNQDMEEMMSEQENPDSSEPVVEDERLHHDTDDVTYQVYEEQAVYEPLENEGIEITEVTAPPEDNPVEDSQVIVEEVSIFPVEEQQEVPPDT

SEQ ID NO: 876009 - protein, 294 aa, Homo sapiens
MAQRKNAKSSGNSSSSGSGSGSTSAGSSSPGARRETKHGGHKNGRKGGLSGTSFFTWFMVIALLGVWTSVAVVWFDLVDYEEVLGKLGIYDADGDGDFDVDDAKVLLGLKERSTSEPAVPPEEAEPHTEPEEQVPVEAEPQNIEDEAKEQIQSLLHEMVHAEHVEGEDLQQEDGPTGEPQQEDDEFLMATDVDDRFETLEPEVSHEETEHSYHVEETDSSEPVVEDERLHHDTDDVTYQVYEEQAVYEPLENEGIEITEVTAPPEDNPVEDSQVIVEEVSIFPVEEQQEVPPDT

SEQ ID NO: 876010 - protein, 207 aa, Homo sapiens
MAQRKNAKSSGNSSSSGSGSGSTSAGSSSPGARRETKHGGHKNGRKGGLSGTSFFTWFMVIALLGVWTSVAVVWFDLVDYEEVLGKLGIYDADGDGDFDVDDAKVLLGLKERSTSEPAVPPEEAEPHTEPEEQVPVEAEPQNIEDEAKEQIQSLLHEMVHAEHVEGEDLQQEDGPTGEPQQEDDEFLMATDVDDRFETLEPEVSHER

SEQ ID NO: 876011 - protein, 270 aa, Homo sapiens
MAQRKNAKSSGNSSSSGSGSGSTSAGSSSPGARRETKHGGHKNGRKGGLSGTSFFTWFMVIALLGVWTSVAVVWFDLVDYEEVLGKLGIYDADGDGDFDVDDAKVLLGLKERSTSEPAVPPEEAEPHTEPEEQVPVEAEPQNIEDEAKEQIQSLLHEMVHAEHETEHSYHVEETVSQDCNQDMEEMMSEQENPDSSEPVVEDERLHHDTDDVTYQVYEEQAVYEPLENEGIEITEVTAPPEDNPVEDSQVIVEEVSIFPVEEQQEVPPDT

SEQ ID NO: 876012 - protein, 109 aa, Homo sapiens
MAQRKNAKSSGNSSSSGSGSGSTSAGSSSPGARRETKHGGHKNGRKGGLSGTSFFTWFMVIALLGVWTSVAVVWFDLVDYEEVLGKLGIYDADGDGDFDVDDAKVLLGR

SEQ ID NO: 876013 - protein, 104 aa, Homo sapiens
MAQRKNAKSSGNSSSSGSGSGSTSAGSSSPGARRETKHGGHKNGRKGGLSGTSFFTWFMVIALLGVWTSVAVVWFDLVDYEEVLGKLGIYDADSLMGCYAVMGG

SEQ ID NO: 876014 - protein, 133 aa, Homo sapiens
MAQRKNAKSSGNSSSSGSGSGSTSAGSSSPGARRETKHGGHKNGRKGGLSGTSFFTWFMVIALLGVWTSVAVVWFDLVDYEEVLAKAKDFRYNLSEVLQGKLGIYDADGDGDFDVDDAKVLLETKHGGHNGEE

SEQ ID NO: 876015 - protein, 210 aa, Homo sapiens
MAEDKETKHGGHKNGRKGGLSGTSFFTWFMVIALLGVWTSVAVVWFDLVDYEEVLGKLGIYDADGDGDFDVDDAKVLLEGPSGVAKRKTKAKVKELTKEELKKEKEKPESRKESKNEERKKGKKEDVRKDKKIADADLSRKESPKGKKDREKEKVDLEKSAKTKENRKKSTNMKDVSSKMASRDKDDRKESRSSTRYAHLTKGNTQKRNG

SEQ ID NO: 876016 - protein, 226 aa, Homo sapiens; identical to SEQ ID NO: 875995

SEQ ID NO: 876017 - protein, 174 aa, Homo sapiens
MAEDKETKHGGHKNGRKGGLSGTSFFTWFMVIALLGVWTSVAVVWFDLVDYEEVLAKAKDFRYNLSEVLQGKLGIYDADGDGDFDVDDAKVLLGLTKDGSNENIDSLEEVLNILAEESSDWFYGFLSFLYDIMTPFEMLEEEEEESETADGVDGTSQNEGVQGKTCVILDLHNQ

SEQ ID NO: 876018 - protein, 758 aa, Homo sapiens; identical to SEQ ID NO: 876001

SEQ ID NO: 876019 - protein, 758 aa, Homo sapiens; identical to SEQ ID NO: 876001

SEQ ID NO: 876020 - protein, 739 aa, Homo sapiens
MAQRKNAKSSGNSSSSGSGSGSTSAGSSSPGARRETKHGGHKNGRKGGLSGTSFFTWFMVIALLGVWTSVAVVWFDLVDYEEVLGKLGIYDADGDGDFDVDDAKVLLGLKERSTSEPAVPPEEAEPHTEPEEQVPVEAEPQNIEDEAKEQIQSLLHEMVHAEHVEGEDLQQEDGPTGEPQQEDDEFLMATDVDDRFETLEPEVSHEETEHSYHVEETDSSEPVVEDERLHHDTDDVTYQVYEEQAVYEPLENEGIEITEVTAPPEDNPVEDSQVIVEEVSIFPVEEQQEVPPETNRKTDDPEQKAKVKKKKPKLLNKFDKTIKAELDAAEKLRKRGKIEEAVNAFKELVRKYPQSPRARYGKAQCEDDLAEKRRSNEVLRGAIETYQEVASLPDVPADLLKLSLKRRSDRQQFLGHMRGSLLTLQRLVQLFPNDTSLKNDLGVGYLLIGDNDNAKKVYEEVLSVTPNDGFAKVHYGFILKAQNKIAESIPYLKEGIESGDPGTDDGRFYFHLGDAMQRVGNKEAYKWYELGHKRGHFASVWQRSLYNVNGLKAQPWWTPKETGYTELVKSLERNWKLIRDEGLAVMDKAKGLFLPEDENLREKGDWSQFTLWQQGRRNENACKGAPKTCTLLEKFPETTGCRRGQIKYSIMHPGTHVWPHTGPTNCRLRMHLGLVIPKEGCKIRCANETKTWEEGKVLIFDDSFEHEVWQDASSFRLIFIVDVWHPELTPQQRRSLPAI

SEQ ID NO: 876021 - protein, 382 aa, Homo sapiens
MAQRKNAKSSGNSSSSGSGSGSTSAGSSSPGARRETKHGGHKNGRKGGLSGTSFFTWFMVIALLGVWTSVAVVWFDLVDYEEVLGKLGIYDADGDGDFDVDDAKVLLGLKERSTSEPAVPPEEAEPHTEPEEQVPVEAEPQNIEDEAKEQIQSLLHEMVHAEHVEGEDLQQEDGPTGEPQQEDDEFLMATDVDDRFETLEPEVSHEETEHSYHVEETDSSEPVVEDERLHHDTDDVTYQVYEEQAVYEPLENEGIEITEVTAPPEDNPVEDSQVIVEEVSIFPVEEQQEVPPETNRKTDDPEQKAKVKKKKPKLLNKFDKTIKAELDAAEKLRKRGKIEEAVNAFKELVRKYPQSPRARYGKARNICLAAIHLGNTLLCVIS

SEQ ID NO: 876022 - protein, 784 aa, Homo sapiens
RGILCCSRNSPPPPAAPASRVYPRALKEVHQPSPAPADRAMAQRKNAKSSGNSSSPGARRETKHGGHKNGRKGGLSGTSFFTWFMVIALLGVWTSVAVVWFDLVDYEEVLGKLGIYDADGDGDFDVDDAKVLLGLKERSTSEPAVPPEEAEPHTEPEEQVPVEAEPQNIEDEAKEQIQSLLHEMVHAEHVEGEDLQQEDGPTGEPQQEDDEFLMATDVDDRFETLEPEVSHEETEHSYHVEETVSQDCNQDMEEMMSEQENPDSSEPVVEDERLHHDTDDVTYQVYEEQAVYEPLENEGIEITEVTAPPEDNPVEDSQVIVEEVSIFPVEEQQEVPPETNRKTDDPEQKAKVKKKKPKLLNKFDKTIKAELDAAEKLRKRGKIEEAVNAFKELVRKYPQSPRARYGKAQCEDDLAEKRRSNEVLRGAIETYQEVASLPDVPADLLKLSLKRRSDRQQFLGHMRGSLLTLQRLVQLFPNDTSLKNDLGVGYLLIGDNDNAKKVYEEVLSVTPNDGFAKVHYGFILKAQNKIAESIPYLKEGIESGDPGTDDGRFYFHLGDAMQRVGNKEAYKWYELGHKRGHFASVWQRSLYNVNGLKAQPWWTPKETGYTELVKSLERNWKLIRDEGLAVMDKAKGLFLPEDENLREKGDWSQFTLWQQGRRNENACKGAPKTCTLLEKFPETTGCRRGQIKYSIMHPGTHVWPHTGPTNCRLRMHLGLVIPKEGCKIRCANETKTWEEGKVLIFDDSFEHEVWQDASSFRLIFIVDVWHPELTPQQRRSLPAI

SEQ ID NO: 876023 - protein, 773 aa, Homo sapiens
MAQRKNAKSSGNSSSSGSGSGSTSAGSSSPGARRETKHGGHKNGRKGGLSGTSFFTWFMVIALLGVWTSVAVVWFDLVDYEEVLAKAKDFRYNLSEVLQGKLGIYDADGDGDFDVDDAKVLLGLKERSTSEPAVPPEEAEPHTEPEEQVPVEAEPQNIEDEAKEQIQSLLHEMVHAEHVEGEDLQQEDGPTGEPQQEDDEFLMATDVDDRFETLEPEVSHEETEHSYHVEETVSQDCNQDMEEMMSEQENPDSSEPVVEDERLHHDTDDVTYQVYEEQAVYEPLENEGIEITEVTAPPEDNPVEDSQVIVEEVSIFPVEEQQEVPPETNRKTDDPEQKAKVKKKKPKLLNKFDKTIKAELDAAEKLRKRGKIEEAVNAFKELVRKYPQSPRARYGKAQCEDDLAEKRRSNEVLRGAIETYQEVASLPDVPADLLKLSLKRRSDRQQFLGHMRGSLLTLQRLVQLFPNDTSLKNDLGVGYLLIGDNDNAKKVYEEVLSVTPNDGFAKVHYGFILKAQNKIAESIPYLKEGIESGDPGTDDGRFYFHLGDAMQRVGNKEAYKWYELGHKRGHFASVWQRSLYNVNGLKAQPWWTPKETGYTELVKSLERNWKLIRDEGLAVMDKAKGLFLPEDENLREKGDWSQFTLWQQGRRNENACKGAPKTCTLLEKFPETTGCRRGQIKYSIMHPGTHVWPHTGPTNCRLRMHLGLVIPKEGCKIRCANETKTWEEGKVLIFDDSFEHEVWQDASSFRLIFIVDVWHPELTPQQRRSLPAI

SEQ ID NO: 876024 - protein, 86 aa, Homo sapiens
GPAVCGPVCGTNCRLRMHLGLVIPKEGCKIRCANETKTWEEGKVLIFDDSFEHEVWQDASSFRLIFIVDVWHPELTPQQRRSLPAI

SEQ ID NO: 876025 - protein, 704 aa, Homo sapiens
MAQRKNAKSSGNSSSSGSGSGSTSAGSSSPGARRETKHGGHKNGRKGGLSGTSFFTWFMVIALLGVWTSVAVVWFDLVDYEEVLGKLGIYDADGDGDFDVDDAKVLLGLKERSTSEPAVPPEEAEPHTEPEEQVPVEAEPQNIEDEAKEQIQSLLHEMVHAEHVEGEDLQQEDGPTGEPQQEDDEFLMATDVDDRFETLEPEVSHEETEHSYHVEETDSSEPVVEDERLHHDTDDVTYQVYEEQAVYEPLENEGIEITEVTAPPEDNPVEDSQVIVEEVSIFPVEEQQEVPPETNRKTDDPEQKAKVKKKKPKLLNKFDKTIKAELDAAEKLRKRGKIEEAVNAFKELVRKYPQSPRARYGKAQCEDDLAEKRRSNEVLRGAIETYQEVASLPDVPADLLKLSLKRRSDRQQFLGHMRGSLLTLQRLVQLFPNDTSLKNDLGVGYLLIGDNDNAKKVYEEVLSVTPNDGFAKVHYGFILKAQNKIAESIPYLKEGIESGDPGTDDGRFYFHLGDAMQRVGNKEAYKWYELGHKRGHFASVWQRSLYNVNGLKAQPWWTPKETGYTELVKSLERNWKLIRDEGLAVMDKAKGLFLPEDENLREKGDWSQFTLWQQGRRNENACKGAPKTCTLLEKFPETTGCRRGQIKYSIMHPGTHVWPHTGPTNCRLRMHLGLVIPKEGCKIRCANETKYGSSVIRHIRHLRG

SEQ ID NO: 876026 - protein, 264 aa, Homo sapiens
MAQRKNAKSSGNSSSSGSGSGSTSAGSSSPGARRETKHGGHKNGRKGGLSGTSFFTWFMVIALLGVWTSVAVVWFDLVDYEEVLGKLGIYDADGDGDFDVDDAKVLLGLKERSTSEPAVPPEEAEPHTEPEEQVPVEAEPQNIEDEAKEQIQSLLHEMVHAEHVEGEDLQQEDGPTGEPQQEDDEFLMATDVDDRFETLEPEVSHEETEHSYHVEETVSQDCNQDMEEMMSEQENPDSSEPVVEDERLHHDTDDVTYQVYENWR

SEQ ID NO: 876027 - protein, 114 aa, Homo sapiens
MAQRKNAKSSGNSSSSGSGSGSTSAGSSSPGARRETKHGGHKNGRKGGLSGTSFFTWFMVIALLGVWTSVAVVWFDLVDYEEVLAKAKDFRYNLSEVLQGRLLELHFKSTCVTL

SEQ ID NO: 876028 - protein, 202 aa, Homo sapiens
ICSCRWFDLVDYEEVLGKLGIYDADGDGDFDVDDAKVLLGLKERSTSEPAVPPEEAEPHTEPEEQVPVEAEPQNIEDEAKEQIQSLLHEMVHAEHETEHSYHVEETVSQDCNQDMEEMMSEQENPDSSEPVVEDERLHHDTDDVTYQVYEEQAVYEPLENEGIEITEVTAPPEDNPVEDSQVIVEEVSIFPVEEQQEVPPDT

SEQ ID NO: 876029 - protein, 206 aa, Homo sapiens
RAAAPRVRPPPAPIQQPRRSHTAGQTRPRRVPARSSPAQPSPGTGRPGGRPAPEGAGRGGRMPKPTLLLRGGWERERSPGDSELGRQFRDWCLRTYGDSAKTKTVTRSKYQRIAEVLQGGGGTGAGSGPAAGEKGKFQFWVRSKGFRLGSGREPKMGQVVYVPVKTGSLCSIQFYGCTIIYLSSPLLMDIWIVYDILLSQDFSEHP

SEQ ID NO: 876030 - protein, 68 aa, Homo sapiens
SPAFWQYQGADPGMGCSVTAVPPMSGRGQQNTLIGRASREPEDNQSLKMQSTHENVFKDHDSVHQGDI

SEQ ID NO: 876031 - protein, 130 aa, Homo sapiens
FIQKVQHGLLEKEICSESLSTAEGTCSAEELAVRSFSWGLGGTCEQSGRHTQWEPVRAPVHLQELRTEGVGLHGGHVGVGTEKGHRSETETDRTSYPAEPCREPLRLSALILSSVRKFPLSQGNHVKPMK

SEQ ID NO: 876032 - protein, 108 aa, Homo sapiens
NLPGRESPLHTQFASLQLTAGAKNVASQVGRVTTDGGMEPPSAWGQPRLLITGQVFRSDVHHSHGLFVCQGLGPGYECSKIEQEVQKKAEAKRRLQHGRAGLGERIYL

SEQ ID NO: 876033 - protein, 342 aa, Homo sapiens
TQRGPGLHGRAATLPPGDGAACPARLSPGCRRLGQHHQVSLEGKGWSDLPHVPSSDPSLKSAPGHPACGSASPAPRCHLLRAGQQAPERPQTRGAAQPTTVTSGASGAQRCWAGLGHDREHAQSARFAHRARAHTCSAPTLRAAAGFRHARHGGGPGRLWPRPSVTRRESPDQAAELRRYKGSGYRQSRIRRRSSRRPREPPGPSRRRRRRRPDPRTMPSEKTFKQRRTFEQRVEDVRLIREQHPTKIPVIIERYKGEKQLPVLDKTKFLVPDHVNMSELIKIIRRRLQLNANQAFFLLVNGHSMVSVSTPISEVYESEKDEDGFLYMVYASQETFGMKLSV

SEQ ID NO: 876034 - protein, 165 aa, Homo sapiens
ARRGGQGSTGERRPCLPETARPALRASAPGAGVSGSTTKSLWRGKDGRICPMSLPLTPPSRVPRDTPPVAQPPPPRAAISSGPGSRLPSAHRPGVRPSPQPSPQGPQAPSGAGRGWGTTGSMRRARVSPIAHAHTPAPPPRCVPLLGSATPVMAAAPAGSGPAPR

SEQ ID NO: 876035 - protein, 159 aa, Homo sapiens
MSTASIADRIARERPREPPGPSRRRRRRRPDPRTMPSEKTFKQRRTFEQRVEDVRLIREQHPTKIPVIIERYKGEKQLPVLDKTKFLVPDHVNMSELIKIIRRRLQLNANQAFFLLVNGHSMVSVSTPISEVYESEKDEDGFLYMVYASQETFGMKLSV

SEQ ID NO: 876036 - protein, 342 aa, Homo sapiens; identical to SEQ ID NO: 876033

SEQ ID NO: 876037 - protein, 342 aa, Homo sapiens; identical to SEQ ID NO: 876033

SEQ ID NO: 876038 - protein, 342 aa, Homo sapiens; identical to SEQ ID NO: 876033

SEQ ID NO: 876039 - protein, 342 aa, Homo sapiens; identical to SEQ ID NO: 876033

SEQ ID NO: 876040 - protein, 351 aa, Homo sapiens
TQRGPGLHGRAATLPPGDGAACPARLSPGCRRLGQHHQVSLEGKGWSDLPHVPSSDPSLKSAPGHPACGSASPAPRCHLLRAGQQAPERPQTRGAAQPTTVTSGASGAQRCWAGLGHDREHAQSARFAHRARAHTCSAPTLRAAAGFRHARHGGGPGRLWPRPSVTRRESPDQAAELRRYKGSGYRQSRIRRRSSRRPREPPGPSRRRRRRRPDPRTMPSEKTFKQRRTFEQRVEDVRLIREQHPTKIPVIIERYKGEKQLPVLDKTKFLVPDHVNMSELIKIIRRRLQLNANQAFFLLVNGHSMVSVSTPISEVYESEKDEDGFLYMVYASQETFGMKCRRGREFSSSSR

SEQ ID NO: 876041 - protein, 165 aa, Homo sapiens; identical to SEQ ID NO: 876034

SEQ ID NO: 876042 - protein, 342 aa, Homo sapiens; identical to SEQ ID NO: 876033

SEQ ID NO: 876043 - protein, 342 aa, Homo sapiens; identical to SEQ ID NO: 876033

SEQ ID NO: 876044 - protein, 100 aa, Homo sapiens
RGGVPAVPRPPPPPQARCGRGSRFWGPTAPGAALGRSALKRGCAGTQRVTFRAGFPVEGARPGASASYRPQCLGREEGNVLGPGLAAPGTAHSGVASSCL

SEQ ID NO: 876045 - protein, 342 aa, Homo sapiens; identical to SEQ ID NO: 876033

SEQ ID NO: 876046 - protein, 342 aa, Homo sapiens; identical to SEQ ID NO: 876033

SEQ ID NO: 876047 - protein, 326 aa, Homo sapiens
TQRGPGLHGRAATLPPGDGAACPARLSPGCRRLGQHHQVSLEGKGWSDLPHVPSSDPSLKSAPGHPACGSASPAPRCHLLRAGQQAPERPQTRGAAQPTTVTSGASGAQRCWAGLGHDREHAQSARFAHRARAHTCSAPTLRAAAGFRHARHGGGPGRLWPRPSVTRRESPDQAAELRRYKGSGYRQSRIRRRSSRRPREPPGPSRRRRRRRPDPRTMPSEKTFKQRRTFEQRVEDVRLIREQHPTKIPVIIERYKGEKQLPVLDKTKFLVPDHVNMSELIKIIRRRLQLNANQAFFLLVNGHSMVSVSTPISEVYESEKLNVLLK

SEQ ID NO: 876048 - protein, 134 aa, Homo sapiens
MVPGLCRTQRCGWPWARWQWLLEDDREHVGGGRVEPTMSGNSLGAQETKLEVAPLSPPCTQCHLCGGPVRPPQFTGVAVTTPEITFKKEARAGACRSQEAEVHPECPGTGQPGGVHGPTVPTTASEMGREHAWF

SEQ ID NO: 876049 - protein, 37 aa, Homo sapiens
VFPSIVGHPRHQGVMVGMGQKDSYVGDEAQSKRGILT

SEQ ID NO: 876050 - protein, 91 aa, Homo sapiens
GRRDKGTRSEAEEERCIPEAEPAVMGLDYGGGRGRGEKGQNRTQCAASGLGRWTECGARERCHGDARAWMKPGGLTVSMVHTSVGSEGHLL

SEQ ID NO: 876051 - protein, 658 aa, Homo sapiens [sequence omitted]

SEQ ID NO: 876052 - protein, 491 aa, Homo sapiens [sequence omitted]

SEQ ID NO: 876053 - protein, 478 aa, Homo sapiens
THASGPTRRGRVGRPTRAENMVVKTGIEQGSDAGYLCESQKFGELVMTKESKALMGLYHGQVLCKKNKFGAPQKDVKHLAILGAGLMGAGIAQVSVDKGLKTILKDATLTALDRGQQQVFKGLNDKVKKKALTSFERDSIFSNLTGQLDYQGFEKADMVIEAVFEDLSLKHRVLKEVEAVIPDHCIFASNTSALPISEIAAVSKRPEKVIGMHYFSPVDKMQLLEIITTEKTSKDTSASAVAVGLKQGKVIIVVKDGPGFYTTRCLAPMMSEVIRILQEGVDPKKLDSLTTSFGFPVGAATLVDEVGVDVAKHVAEDLGKVFGERFGGGNPELLTQMVSKGFLGRKSGKGFYIYQEGVKRKDLNSDMDSILASLKLPPKSEVSSDEDIQFRLVTRFVNEAVMCLQEGILATPAEGDIGAVFGLGFPPCLGGPFRFVDLYGAQKIVDRLKKYEAAYGKQFTPCQLLADHANSPNKKFYQ

SEQ ID NO: 876054 - protein, 399 aa, Homo sapiens
  misc_feature (12)..(12): Xaa can be any naturally occurring amino acid
MMQETISPITGXRVLTLEKQAIQQQLRGRALKCSVFITPKFKGLNDKVKKKALTSFERDSIFSNLTGQLDYQGFEKADMVIEAVFEDLSLKHRVLKEVEAVIPDHCIFASNTSALPISEIAAVSKRPEKVIGMHYFSPVDKMQLLEIITTEKTSKDTSASAVAVGLKQGKVIIVVKDGPGFYTTRCLAPMMSEVIRILQEGVDPKKLDSLTTSFGFPVGAATLVDEVGVDVAKHVAEDLGKVFGERFGGGNPELLTQMVSKGFLGRKSGKGFYIYQEGVKRKDLNSDMDSILASLKLPPKSEVSSDEDIQFRLVTRFVNEAVMCLQEGILATPAEGDIGAVFGLGFPPCLGGPFRFVDLYGAQKIVDRLKKYEAAYGKQFTPCQLLADHANSPNKKFYQ

SEQ ID NO: 876055 - protein, 658 aa, Homo sapiens [sequence omitted]

SEQ ID NO: 876056 - protein, 658 aa, Homo sapiens [sequence omitted]

SEQ ID NO: 876057 - protein, 658 aa, Homo sapiens [sequence omitted]

SEQ ID NO: 876058 - protein, 264 aa, Homo sapiens
PTRPDPRVADAWVDPRVAENNCSASAVAVGLKQGKVIIVVKDGPGFYTTRCLAPMMSEVIRILQEGVDPKKLDSLTTSFGFPVGAATLVDEVGVDVAKHVAEDLGKVFGERFGGGNPELLTQMVSKGFLGRKSGKGFYIYQEGVKRKDLNSDMDSILASLKLPPKSEVSSDEDIQFRLVTRFVNEAVMCLQEGILATPAEGDIGAVFGLGFPPCLGGPFRFVDLYGAQKIVDRLKKYEAAYGKQFTPCQLLADHANSPNKKFYQ

SEQ ID NO: 876059 - protein, 106 aa, Homo sapiens [sequence omitted]

SEQ ID NO: 876060 - protein, 637 aa, Homo sapiens
MPQFYRVFCLLTRTHINYGVKGDVAVFRINSPNSKVNTLSKELHSEFSEVMNEIWASDQIRSAVLISSKPGCLCKGADINMLAACKTLQEVTQLSQEAQRIVEKLEKSTKPIVAAINGSCLGGGLEVAISCQYRIATKDRKTVLGTPEVLLGALPGAGGTQRLPKMVGVPAALDMMLTGRSIRADRAKKMGLVDQLVEPLGPGLKPPEERTIEYLEEVAITFAKGLADKKISPKRDKGLVEKLTAYAMTIPFVRQQVYKKVEEKVRKQTKGLYPAPLKIIDVVKTGIEQGSDAGYLCESQKFGELVMTKESKALMGLYHGQVLCKKNKFGAPQKDVKHLAILGAGLMGAGIAQVSVDKGLKTILKDATLTALDRGQQQVFKGLNDKVKKKALTSFERDSIFSNLTGQLDYQGFEKADMVIEAVFEDLSLKHRVLKEVEAVIPDHCIFASNTSALPISEIAAVSKRPEKVIGMHYFSPVDKMQLLEIITTEKTSKDTSASAVAVGLKQGKVIIVVKDGPGFYTTRCLAPMMSEVIRILQEGVDPKKLDSLTTSFGFPVGAATLVDEVGVDVAKHVAEDLGKVFGERFGGGNPELLTQMVSKGFLGRKLGMPFTIIGGREKEGFDFATVAFNEFELLLI

SEQ ID NO: 876061 - protein, 521 aa, Homo sapiens
MLAACKTLQEVTQLSQEAQRIVEKLEKSTKPIVAAINGSCLGGGLEVAISCQYRIATKDRKTVLGTPEVLLGALPGAGGTQRLPKMVGVPAALDMMLTGRSIRADRAKKMGLVDQLVEPLGPGLKPPEERTIEYLEEVAITFAKGLADKKISPKRDKGLVEKLTAYAMTIPFVRQQVYKKVEEKVRKQTKGLYPAPLKIIDVVKTGIEQGSDAGYLCESQKFGELVMTKESKALMGLYHGQVLCKKNKFGAPQKDVKHLAILGAGLMGAGIAQVSVDKGLKTILKDATLTALDRGQQQVFKGLNDKVKKKALTSFERDSIFSNLTGQLDYQGFEKADMVIEAVFEDLSLKHRVLKEVEAVIPDHCIFASNTSALPISEIAAVSKRPEKVIGMHYFSPVDKMQLLEIITTEKTSKDTSASAVAVGLKQGKVIIVVKDGPGFYTTRCLAPMMSEVIRILQEGVDPKKLDSLTTSFGFPVGAALGGALGVFRLGGIGHLGRVGPWAGPGPGWGLRGGLGCGRFN

SEQ ID NO: 876062 - protein, 424 aa, Homo sapiens
MPQFYRVFCLLTRTHINYGVKGDVAVFRINSPNSKVNTLSKELHSEFSEVMNEIWASDQIRSAVLISSKPGCLCKGADINMLAACKTLQEVTQLSQEAQRIVEKLEKSTKPIVAAINGSCLGGGLEVAISCQYRIATKDRKTVLGTPEVLLGALPGAGGTQRLPKMVGVPAALDMMLTGRSIRADRAKKMGLVDQLVEPLGPGLKPPEERTIEYLEEVAITFAKGLADKKISPKRDKGLVEKLTAYAMTIPFVRQQVYKKVEEKVRKQTKGLYPAPLKIIDVVKTGIEQGSDAGYLCESQKFGELVMTKESKALMGLYHGQVLCKKNKFGAPQKDVKHLAILGAGLMGAGIAQVSVDKGLKTILKDATLTALDRGQQQVFKGLNDKVKKKALTSFERDSIFSNLTGQLDYQGLKADVMSWSRLS

SEQ ID NO: 876063 - protein, 32 aa, Homo sapiens
MWNTGIITRWSRRKKQRGPQHNGAWRFSPQFK

SEQ ID NO: 876064 - protein, 322 aa, Homo sapiens
MPQFYRVFCLLTRTHINYGVKGDVAVFRINSPNSKVNTLSKELHSEFSEVMNEIWASDQIRSAVLISSKPGCLCKGADINMLAACKTLQEVTQLSQEAQRIVEKLEKSTKPIVAAINGSCLGGGLEVAISCQYRIATKDRKTVLGTPEVLLGALPGAGGTQRLPKMVGVPAALDMMLTGRSIRADRAKKMGLVDQLVEPLGPGLKPPEERTIEYLEEVAITFAKGLADKKISPKRDKGLVEKLTAYAMTIPFVRQQVYKKVEEKVRKQTKGLYPAPLKIIDVVKTGIEQGSDAGYLCESQVNLFPFNVLLSVKGKLKIQSSV

SEQ ID NO: 876065 - protein, 356 aa, Homo sapiens
MPQFYRVFCLLTRTHINYGVKGDVAVFRINSPNSKVNTLSKELHSEFSEVMNEIWASDQIRSAVLISSKPGCLCKGADINMLAACKTLQEVTQLSQEAQRIVEKLEKSTKPIVAAINGSCLGGGLEVAISCQYRIATKDRKTVLGTPEVLLGALPGAGGTQRLPKMVGVPAALDMMLTGRSIRADRAKKMGLVDQLVEPLGPGLKPPEERTIEYLEEVAITFAKGLADKKISPKRDKGLVEKLTAYAMTIPFVRQQVYKKVEEKVRKQTKGLYPAPLKIIDVVKTGIEQGSDAGYLCESQKFGELVMTKESKALMGLYHGQVLCKKNKFGAPQKDVKHLAILGAGLMGAGIFKYSL

SEQ ID NO: 876066 - protein, 491 aa, Homo sapiens [sequence omitted]

SEQ ID NO: 876067 - protein, 658 aa, Homo sapiens [sequence omitted]

SEQ ID NO: 876068 - protein, 658 aa, Homo sapiens [sequence omitted]

SEQ ID NO: 876069 - protein, 658 aa, Homo sapiens [sequence omitted]

SEQ ID NO: 876070 - protein, 687 aa, Homo sapiens
MLAACKTLQEVTQLSQEAQRIVEKLEKSTKPIVAAINGSCLGGGLEVAISCQYRIATKDRKTVLGTPEVLLGALPGAGGTQRLPKMVGVPAALDMMLTGRSIRADRAKKMGLVDQLVEPLGPGLKPPEERTIEYLEEVAITFAKGLADKKISPKRDKGLVEKLTAYAMTIPFVRQQVYKKVEEKVRKQTKGLYPAPLKIIDVVKTGIEQGSDAGYLCESQKFGELVMTKESKALMGLYHGQVLCKKNKFGAPQKDVKHLAILGAGLMGAGIAQVSVDKGLKTILKDATLTALDRGQQQVFKGLNDKVKKKALTSFERDSIFSNLTGQLDYQGFEKADMVIEAVFEDLSLKHRVLKEVEAVIPDHCIFASNTSALPISEIAAVSKRPEKVIGMHYFSPVDKMQLLEIITTEKTSKDTSASAVAVGLKQGKVIIVVKDGPGFYTTRCLAPMMSEVIRILQEGVDPKKLDSLTTSFGFPVGAATLVDEVGVDVAKHVAEDLGKVFGERFGGGNPELLTQMVSKGFLGRKSGKGFYIYQEGVKRKDLNSDMDSILASLKLPPKSEVSSDEDIQFRLVTRFVNEAVMCLQEGILATPAEGDIGAVFGLGFPPCLGGWSRRLGRKLTLAWSPCCVSFNEVLFLYSGPFRFVDLYGAQKIVDRLKKYEAAYGKQFTPCQLLADHANSPNKKFYQ

SEQ ID NO: 876071 - protein, 658 aa, Homo sapiens [sequence omitted]

SEQ ID NO: 876072 - protein, 658 aa, Homo sapiens [sequence omitted]

SEQ ID NO: 876073 - protein, 658 aa, Homo sapiens [sequence omitted]

SEQ ID NO: 876074 - protein, 74 aa, Homo sapiens
RWLSRGSLTAGETSERLGLGFPPCLGGPFRFVDLYGAQKIVDRLKKYEAAYGKQFTPCQLLADHANSPNKKFYQ

SEQ ID NO: 876075 - protein, 600 aa, Homo sapiens
MPQFYRVFCLLTRTHINYGVKGDVAVFRINSPNSKVNTLSKELHSEFSEVMNEIWASDQIRSAVLISSKPGCLCKGADINMLAACKTLQEVTQLSQEAQRIVEKLEKSTKPIVAAINGSCLGGGLEVAISCQYRIATKDRKTVLGTPEVLLGALPGAGGTQRLPKMVGVPAALDMMLTGRSIRADRAKKMGLVDQLVEPLGPGLKPPEERTIEYLEEVAITFAKGLADKKISPKRDKGLVEKLTAYAMTIPFVRQQVYKKVEEKVRKQTKGLYPAPLKIIDVVKTGIEQGSDAGYLCESQKFGELVMTKESKALMGLYHGQVLCKKNKFGAPQKDVKHLAILGAGLMGAGIAQVSVDKGLKTILKDATLTALDRGQQQVFKGLNDKVKKKALTSFERDSIFSNLTGQLDYQGFEKADMVIEAVFEDLSLKHRVLKEVEAVIPDHCIFASNTSALPISEIAAVSKRPEKVIGMHYFSPVDKMQLLEIITTEKTSKDTSASAVAVGLKQGKVIIVVKDGPGFYTTRCLAPMMSEVIRILQEGVDPKKLDSLTTSFGFPVGAATLVDEVGVDVAKHVAEDLGKVFGSGFEGEPKNVKQRVKVF

SEQ ID NO: 876076 - protein, 555 aa, Homo sapiens
MLAACKTLQEVTQLSQEAQRIVEKLEKSTKPIVAAINGSCLGGGLEVAISCQYRIATKDRKTVLGTPEVLLGALPGAGGTQRLPKMVGVPAALDMMLTGRSIRADRAKKMGLVDQLVEPLGPGLKPPEERTIEYLEEVAITFAKGLADKKISPKRDKGLVEKLTAYAMTIPFVRQQVYKKVEEKVRKQTKGLYPAPLKIIDVVKTGIEQGSDAGYLCESQKFGELVMTKESKALMGLYHGQVLCKKNKFGAPQKDVKHLAILGAGLMGAGIAQVSVDKGLKTILKDATLTALDRGQQQVFKGLNDKVKKKALTSFERDSIFSNLTGQLDYQGFEKADMVIEAVFEDLSLKHRVLKEVEAVIPDHCIFASNTSALPISEIAAVSKRPEKVIGMHYFSPVDKMQLLEIITTEKTSKDTKVIIVVKDGPGFYTTRCLAPMMSEVIRILQEGVDPKKLDSLTTSFGFPVGAATLVDEVGVDVAKHVAEDLGKVFGERFGGGNPELLTQMVSKGFLGRKSGKGFYIYQEGVKRKDLNSDMDSILASLKCFYSLKLIRRNI

SEQ ID NO: 876077 - protein, 382 aa, Homo sapiens
MPQFYRVFCLLTRTHINYGVKGDVAVFRINSPNSKVNTLSKELHSEFSEVMNEIWASDQIRSAVLISSKPGCLCKGADINMLAACKTLQEVTQLSQEAQRIVEKLEKSTKPIVAAINGSCLGGGLEVAISCQYRIATKDRKTVLGTPEVLLGALPGAGGTQRLPKMVGVPAALDMMLTGRSIRADRAKKMGLVDQLVEPLGPGLKPPEERTIEYLEEVAITFAKGLADKKISPKRDKGLVEKLTAYAMTIPFVRQQVYKKVEEKVRKQTKGLYPAPLKIIDVVKTGIEQGSDAGYLCESQKFGELVMTKESKALMGLYHGQVLCKKNKFGAPQKDVKHLAILGAGLMGAGIAQVSVDKGLKTILKDATLTALDRGQQQVFKG

SEQ ID NO: 876078 - protein, 337 aa, Homo sapiens
MPQFYRVFCLLTRTHINYGVKGDVAVFRINSPNSKVNTLSKELHSEFSEVMNEIWASDQIRSAVLISSKPGCLCKGADINMLAACKTLQEVTQLSQEAQRIVEKLEKSTKPIVAAINGSCLGGGLEVAISCQYRIATKDRKTVLGTPEVLLGALPGAGGTQRLPKMVGVPAALDMMLTGRSIRADRAKKMGLVDQLVEPLGPGLKPPEERTIEYLEEVAITFAKGLADKKISPKRDKGLVEKLTAYAMTIPFVRQQVYKKVEEKVRKQTKGLYPAPLKIIDVVKTGIEQGSDAGYLCESQKFGELVMTKESKALMGLYHGQVLCKKNKFGAPQKDVK

SEQ ID NO: 876079 - protein, 75 aa, Homo sapiens
QKRMHFNSNGLEPKENEPPSPLVSGIIDYNMPLTSTYLKQMKLRVMNSQEQPSSLSPAPGFVNTVITVLICAHEE

SEQ ID NO: 876080 - protein, 491 aa, Homo sapiens
MSLLMISENVKLAREYALLGNYDSAMVYYQGVLDQMNKYLYSVKDTYLQQKWQQVWQEINVEAKHVKDIMKTLESFKLDSTPLKAAQHDLPASEGEVWSMPVPVERRPSPGPRKRQSSQYSDPKSHGNRPSTTVRVHRSSAQNVHNDRGKAVRCREKKEQNKGREEKNKSPAAVTEPETNKFDSTGYDKDLVEALERDIISQNPNVRWDDIADLVEAKKLLKEAVVLPMWMPEFFKGIRRPWKGVLMVGPPGTGKTLLAKAVATECKTTFFNVSSSTLTSKYRGESEKLVRLLFEMARFYSPATIFIDEIDSICSRRGTSEEHEASRRVKAELLVQMDGVGGTSENDDPSKMVMVLAATNFPWDIDEALRRRLEKRIYIPLPSAKGREELLRISLRELELADDVDLASIAENMEGYSGADITNVCRDASLMAMRRRIEGLTPEEIRNLSKEEMHMPTTMEDFEMALKKVSKSVSAADIERYEKWIFEFGSC

SEQ ID NO: 876081 - protein, 491 aa, Homo sapiens; identical to SEQ ID NO: 876080

SEQ ID NO: 876082 - protein, 507 aa, Homo sapiens
MSLLMISENVKLAREYALLGNYDSAMVYYQGVLDQMNKYLYSVKDTYLQQKWQQVWQEINVEAKHVKDIMKTLESFKLDSTPLKAAQHDLPASEGEVWSMPVPVERRPSPGPRKRQSSQYSDPKSHGNRPSTTVRVHRSSAQNVHNDRGKAVRCREKKEQNKGREEKNKSPAAVTEPETNKFDSTGYDKDLVEALERDIISQNPNVRWDDIADLVEAKKLLKEAVVLPMWMPEFFKGIRRPWKNNGSINPLLRLLYSQQGVLMVGPPGTGKTLLAKAVATECKTTFFNVSSSTLTSKYRGESEKLVRLLFEMARFYSPATIFIDEIDSICSRRGTSEEHEASRRVKAELLVQMDGVGGTSENDDPSKMVMVLAATNFPWDIDEALRRRLEKRIYIPLPSAKGREELLRISLRELELADDVDLASIAENMEGYSGADITNVCRDASLMAMRRRIEGLTPEEIRNLSKEEMHMPTTMEDFEMALKKVSKSVSAADIERYEKWIFEFGSC

SEQ ID NO: 876083 - protein, 266 aa, Homo sapiens
MEKQWQINPLLRLLYSQQGVLMVGPPGTGKTLLAKAVATECKTTFFNVSSSTLTSKYRGESEKLVRLLFEMARFYSPATIFIDEIDSICSRRGTSEEHEASRRVKAELLVQMDGVGGTSENDDPSKMVMVLAATNFPWDIDEALRRRLEKRIYIPLPSAKGREELLRISLRELELADDVDLASIAENMEGYSGADITNVCRDASLMAMRRRIEGLTPEEIRNLSKEEMHMPTTMEDFEMALKKVSKSVSAADIERYEKWIFEFGSC

SEQ ID NO: 876084 - protein, 480 aa, Homo sapiens
MSLLMISENVKLAREYALLGNYDSAMVYYQGVLDQMNKYLYSVKDTYLQQKWQQVWQEINVEAKHVKDIMKTLESFKLDSTPLKAAQHDLPASEGEVWSMPVPVERRPSPGPRKRQSSQYSDPKSHGNRPSTTVRVHRSSAQNVHNDRGKAVRCREKKEQNKGREEKNKSPAAVTEPETNKFDSTGYDKDLVEALERDIISQNPNVRWDDIADLVEAKKLLKEAVVLPMWMPEFFKGIRRPWKGVLMVGPPGTGKTLLAKAVATECKTTFFNVFPNTEENLRSLFVFCLKWLDFILQPPYLFCSRRGTSEEHEASRRVKAELLVQMDGVGGTSENDDPSKMVMVLAATNFPWDIDEALRRRLEKRIYIPLPSAKGREELLRISLRELELADDVDLASIAENMEGYSGADITNVCRDASLMAMRRRIEGLTPEEIRNLSKEEMHMPTTMEDFEMALKKVSKSVSAADIERYEKWIFEFGSC

SEQ ID NO: 876085 - protein, 387 aa, Homo sapiens
MSLLMISENVKLAREYALLGNYDSAMVYYQGVLDQMNKYLYSVKDTYLQQKWQQVWQEINVEAKHVKDIMKTLESFKLDSTPLKAAQHDLPASEGEVWSMPVPVERRPSPGPRKRQSSQYSDPKSHGNRPSTTVRVHRSSAQNVHNDRGKAVRCREKKEQNKGREEKNKSPAAVTEPETNKFDSTGYDKDLVEALERDIISQNPNVRWDDIADLVEAKKLLKEAVVLPMWMPEFFKGIRRPWKGVLMVGPPGTGKTLLAKAVATECKTTFFNVSSSTLTSKYRGESEKLVRLLFEMARFYSPATIFIDEIDSICSRRGTSEEHEASRRVKAELLVQMDGVGGTSENDDPSKMVMVLAATNFPWDIDEALRRRLEKRIYIPLPSGMRP

SEQ ID NO: 876086 - protein, 491 aa, Homo sapiens; identical to SEQ ID NO: 876080

SEQ ID NO: 876087 - protein, 491 aa, Homo sapiens; identical to SEQ ID NO: 876080

SEQ ID NO: 876088 - protein, 422 aa, Homo sapiens
MKTLESFKLDSTPLKAAQHDLPASEGEVWSMPVPVERRPSPGPRKRQSSQYSDPKSHGNRPSTTVRVHRSSAQNVHNDRGKAVRCREKKEQNKGREEKNKSPAAVTEPETNKFDSTGYDKDLVEALERDIISQNPNVRWDDIADLVEAKKLLKEAVVLPMWMPEFFKGIRRPWKGVLMVGPPGTGKTLLAKAVATECKTTFFNVSSSTLTSKYRGESEKLVRLLFEMARFYSPATIFIDEIDSICSRRGTSEEHEASRRVKAELLVQMDGVGGTSENDDPSKMVMVLAATNFPWDIDEALRRRLEKRIYIPLPSAKGREELLRISLRELELADDVDLASIAENMEGYSGADITNVCRDASLMAMRRRIEGLTPEEIRNLSKEEMHMPTTMEDFEMALKKVSKSVSAADIERYEKWIFEFGSC

SEQ ID NO: 876089 - protein, 325 aa, Homo sapiens
MVIVQVQLSEFTVHLHRMFTMTEGKLFVVVKRKNRIKEERKRDDIADLVEAKKLLKEAVVLPMWMPEFFKGIRRPWKGVLMVGPPGTGKTLLAKAVATECKTTFFNVSSSTLTSKYRGESEKLVRLLFEMARFYSPATIFIDEIDSICSRRGTSEEHEASRRVKAELLVQMDGVGGTSENDDPSKMVMVLAATNFPWDIDEALRRRLEKRIYIPLPSAKGREELLRISLRELELADDVDLASIAENMEGYSGADITNVCRDASLMAMRRRIEGLTPEEIRNLSKEEMHMPTTMEDFEMALKKVSKSVSAADIERYEKWIFEFGSC

SEQ ID NO: 876090 - protein, 124 aa, Homo sapiens
NQLEKTAIKIQSWWRGNMVRRTLLQAALRAWVIQCWWRSMQAKMLEQRRRLALRLYTCQEWAVVKVQAQVRMWQARRRFLQARQAACIIQSHWRWHASQTRGLIRGHYEVRASRLELDIEILMT

SEQ ID NO: 876091 - protein, 102 aa, Homo sapiens
ELLQGKKSVLKLLCVHTQQPGFLEGHFPHCALWMIIPGIRCEALHPHPGAIKSLCKRRSWTQAGMQGCDLGSMQPLPPRIQAILLPQLLEYLGLQAPATTPD

SEQ ID NO: 876092 - protein, 69 aa, Homo sapiens
MMVLTPFWLGRDCPSRGQPTLREGKGLSVPFTCKLNNPQRYLLYLTHTPRRQYSPAWYLPGKLGITLTV

SEQ ID NO: 876093 - protein, 586 aa, Homo sapiens
MGVNAVHWFRKGLRLHDNPALKECIQGADTIRCVYILDPWFAGSSNVGINRWRFLLQCLEDLDANLRKLNSRLFVIRGQPADVFPRLFKEWNITKLSIEYDSEPFGKERDAAIKKLATEAGVEVIVRISHTLYDLDKIIELNGGQPPLTYKRFQTLISKMEPLEIPVETITSEVIEKCTTPLSDDHDEKYGVPSLEELGFDTDGLSSAVWPGGETEALTRLERHLERKAWVANFERPRMNANSLLASPTGLSPYLRFGCLSCRLFYFKLTDLYKKVKKNSSPPLSLYGQLLWREFFYTAATNNPRFDKMEGNPICVQIPWDKNPEALAKWAEGRTGFPWIDAIMTQLRQEGWIHHLARHAVACFLTRGDLWISWEEGMKVFEELLLDADWSINAGSWMWLSCSSFFQQFFHCYCPVGFGRRTDPNGDYIRRYLPVLRGFPAKYIYDPWNAPEGIQKVAKCLIGVNYPKPMVNHAEASRLNIERMKQIYQQLSRYRGLGLLASVPSNPNGNGGFMGYSAENIPGCSSSGSCSQGSGILHYAHGDSQQTHLLKQGRSSMGTGLSGGKRPSQEEDTQSIGPKVQRQSTN

SEQ ID NO: 876094 - protein, 613 aa, Homo sapiens
MGVNAVHWFRKGLRLHDNPALKECIQGADTIRCVYILDPWFAGSSNVGINRWRFLLQCLEDLDANLRKLNSRLFVIRGQPADVFPRLFKEWNITKLSIEYDSEPFGKERDAAIKKLATEAGVEVIVRISHTLYDLDKIIELNGGQPPLTYKRFQTLISKMEPLEIPVETITSEVIEKCTTPLSDDHDEKYGVPSLEELGFDTDGLSSAVWPGGETEALTRLERHLERKAWVANFERPRMNANSLLASPTGLSPYLRFGCLSCRLFYFKLTDLYKKVFSKIRAYCLDTLKKNSDNTSLLFNHEVKKNSSPPLSLYGQLLWREFFYTAATNNPRFDKMEGNPICVQIPWDKNPEALAKWAEGRTGFPWIDAIMTQLRQEGWIHHLARHAVACFLTRGDLWISWEEGMKVFEELLLDADWSINAGSWMWLSCSSFFQQFFHCYCPVGFGRRTDPNGDYIRRYLPVLRGFPAKYIYDPWNAPEGIQKVAKCLIGVNYPKPMVNHAEASRLNIERMKQIYQQLSRYRGLGLLASVPSNPNGNGGFMGYSAENIPGCSSSGSCSQGSGILHYAHGDSQQTHLLKQGRSSMGTGLSGGKRPSQEEDTQSIGPKVQRQSTN

SEQ ID NO: 876095 - protein, 427 aa, Homo sapiens
MEPLEIPVETITSEVIEKCTTPLSDDHDEKYGVPSLEELGFDTDGLSSAVWPGGETEALTRLERHLERKAWVANFERPRMNANSLLASPTGLSPYLRFGCLSCRLFYFKLTDLYKKVKKNSSPPLSLYGQLLWREFFYTAATNNPRFDKMEGNPICVQIPWDKNPEALAKWAEGRTGFPWIDAIMTQLRQEGWIHHLARHAVACFLTRGDLWISWEEGMKVFEELLLDADWSINAGSWMWLSCSSFFQQFFHCYCPVGFGRRTDPNGDYIRRYLPVLRGFPAKYIYDPWNAPEGIQKVAKCLIGVNYPKPMVNHAEASRLNIERMKQIYQQLSRYRGLGLLASVPSNPNGNGGFMGYSAENIPGCSSSGSCSQGSGILHYAHGDSQQTHLLKQGRSSMGTGLSGGKRPSQEEDTQSIGPKVQRQSTN

SEQ ID NO: 876096 - protein, 586 aa, Homo sapiens; identical to SEQ ID NO: 876093

SEQ ID NO: 876097 - protein, 586 aa, Homo sapiens; identical to SEQ ID NO: 876093

SEQ ID NO: 876098 - protein, 540 aa, Homo sapiens
MGVNAVHWFRKGLRLHDNPALKECIQGADTIRCVYILDPWFAGSSNVGINRWRFLLQCLEDLDANLRKLNSRLFVIRGQPADVFPRLFKEWNITKLSIEYDSEPFGKERDAAIKKLATEAGVEVIVRISHTLYDLDKIIELNGGQPPLTYKRFQTLISKMEPLEIPVETITSEVIEKCTTPLSDDHDEKYGVPSLEELGFDTDGLSSAVWPGGETEALTRLERHLERKAWVANFERPRMNANSLLASPTGLSPYLRFGCLSCRLFYFKLTDLYKKVKKNSSPPLSLYGQLLWREFFYTAATNNPRFDKMEGNPICVQIPWDKNPEALAKWAEGRTGFPWIDADWSINAGSWMWLSCSSFFQQFFHCYCPVGFGRRTDPNGDYIRRYLPVLRGFPAKYIYDPWNAPEGIQKVAKCLIGVNYPKPMVNHAEASRLNIERMKQIYQQLSRYRGLGLLASVPSNPNGNGGFMGYSAENIPGCSSSGSCSQGSGILHYAHGDSQQTHLLKQGRSSMGTGLSGGKRPSQEEDTQSIGPKVQRQSTN

SEQ ID NO: 876099 - protein, 238 aa, Homo sapiens
MGVNAVHWFRKGLRLHDNPALKECIQGADTIRCVYILDPWFAGSSNVGINRWRFLLQCLEDLDANLRKLNSRLFVIRGQPADVFPRLFKEWNITKLSIEYDSEPFGKERDAAIKKLATEAGVEVIVRISHTLYDLDKIIELNGGQPPLTYKRFQTLISKMEPLEIPVETITSEVIEKCTTPLSDDHDEKYGVPSLEELGFDTDGLSSAVWPGGETEALTRLERHLERKAWVAILKDLE

SEQ ID NO: 876100 - protein, 150 aa, Homo sapiens
MSLLATLGLELDRALLPASGLGWLVDYGKLPPAPAPLAPYEVLGGALEGGLPVGGEPLAGDGFSDWMTERVDFTALLPLEPPTVYKREPKGENSKKERQQREEKTQQTTQKQNKKKRETKKGTPEETQSGDEKNKKKKEQHHKTHKPENK

SEQ ID NO: 876101 - protein, 115 aa, Homo sapiens
MSLLATLGLELDRALLPASGLGWLVDYGKLPPAPAPLAPYEVLGGALEGGLPVGGEPLAGDGFSDWMTERVDFTALLPLEPPSGRPSPHNKGKKGNQKREEREKGKGSTKRTTQE

SEQ ID NO: 876102 - protein, 282 aa, Homo sapiens
MSLLATLGLELDRALLPASGLGWLVDYGKLPPAPAPLAPYEVLGGALEGGLPVGGEPLAGDGFSDWMTERVDFTALLPLEPPLPPGTLPQPSPTPPDLEAMASLLKKELEQMEDFFLDAPPLPPPSPPPLPPPPLPPAPSLPLSLPSFDLPQPPVLDTLDLLAIYCRNEAGQEEVGMPPLPPPQQPPPPSPPQPSRLAPYPHPATTRGDRKQKKRDQNKSAALRYRQRKRAEGEALEGECQGLEARNRELKERAESVEREIQYVKDLLIEVYKARSQRTRSC

SEQ ID NO: 876103 - protein, 282 aa, Homo sapiens; identical to SEQ ID NO: 876102

SEQ ID NO: 876104 - protein, 282 aa, Homo sapiens; identical to SEQ ID NO: 876102

SEQ ID NO: 876105 - protein, 282 aa, Homo sapiens; identical to SEQ ID NO: 876102

SEQ ID NO: 876106 - protein, 282 aa, Homo sapiens; identical to SEQ ID NO: 876102

SEQ ID NO: 876107 - protein, 282 aa, Homo sapiens; identical to SEQ ID NO: 876102

SEQ ID NO: 876108 - protein, 282 aa, Homo sapiens; identical to SEQ ID NO: 876102

SEQ ID NO: 876109 - protein, 282 aa, Homo sapiens; identical to SEQ ID NO: 876102

SEQ ID NO: 876110 - protein, 282 aa, Homo sapiens; identical to SEQ ID NO: 876102

SEQ ID NO: 876111 - protein, 282 aa, Homo sapiens; identical to SEQ ID NO: 876102

SEQ ID NO: 876112 - protein, 282 aa, Homo sapiens; identical to SEQ ID NO: 876102

SEQ ID NO: 876113 - protein, 282 aa, Homo sapiens; identical to SEQ ID NO: 876102

SEQ ID NO: 876114 - protein, 282 aa, Homo sapiens; identical to SEQ ID NO: 876102

SEQ ID NO: 876115 - protein, 196 aa, Homo sapiens
LSSVSAYHLSAYFWISSLLKKELEQMEDFFLDAPPLPPPSPPPLPPPPLPPAPSLPLSLPSFDLPQPPVLDTLDLLAIYCRNEAGQEEVGMPPLPPPQQPPPPSPPQPSRLAPYPHPATTRGDRKQKKRDQNKSAALRYRQRKRAEGEALEGECQGLEARNRELKERAESVEREIQYVKDLLIEVYKARSQRTRSC

SEQ ID NO: 876116 - protein, 145 aa, Homo sapiens
MIREGRAPPPSIYLSPVPGAASFPVLGSQSLSSLQCRRLCLRSPGHGSVASTPLCPRPVSALTTPALSAPTFFLQPRPPPPLLAAAMESSTFALVPVFAHLSILQSLVPAAGAASPVAISAQHLCYSHVTPGDPGAGAGQGPAPS

SEQ ID NO: 876117 - protein, 210 aa, Homo sapiens
  misc_feature (122)..(123): Xaa can be any naturally occurring amino acid
  misc_feature (128)..(129): Xaa can be any naturally occurring amino acid
  misc_feature (139)..(139): Xaa can be any naturally occurring amino acid
  misc_feature (144)..(144): Xaa can be any naturally occurring amino acid
  misc_feature (149)..(152): Xaa can be any naturally occurring amino acid
  misc_feature (157)..(158): Xaa can be any naturally occurring amino acid
  misc_feature (161)..(161): Xaa can be any naturally occurring amino acid
  misc_feature (174)..(176): Xaa can be any naturally occurring amino acid
  misc_feature (180)..(180): Xaa can be any naturally occurring amino acid
  misc_feature (183)..(186): Xaa can be any naturally occurring amino acid
  misc_feature (190)..(190): Xaa can be any naturally occurring amino acid
MSLLATLGLELDRALLPASGLGWLVDYGKLPPAPAPLAPYEVLGGALEGGLPVGGEPLAGDGFSDWMTERVDFTALLPLEPPLPPGTLPQPSPTPPDLEAMASLLKKELEQMEDFFLDAPPXXPKKKXXQQLKENHCPXPPPPXPGLVXXXXALFWXXGFXPLCRTGRAGAWGXXXPAQXPSXXXXVLLXSPSAPGGGPPPPPLGFRPPA

SEQ ID NO: 876118 - protein, 115 aa, Homo sapiens
MSLLATLGLELDRALLPASGLGWLVDYGKLPPAPAPLAPYEVLGGALEGGLPVGGEPLAGDGFSDWMTERVDFTALLPLEPPTGRPSPHNKGKKGNQKREEREKGKGSTKRTTQE

SEQ ID NO: 876119 - protein, 145 aa, Homo sapiens; identical to SEQ ID NO: 876116

SEQ ID NO: 876120 - protein, 117 aa, Homo sapiens
MERSSLQCRRLCLRSPGHGSVASTPLCPRPVSALTTPALSAPTFFLQPRPPPPLLAAAMESSTFALVPVFAHLSILQSLVPAAGAASPVAISAQHLCYSHVTPGDPGAGAGQGPAPS

SEQ ID NO: 876121 - protein, 282 aa, Homo sapiens; identical to SEQ ID NO: 876102

SEQ ID NO: 876122 - protein, 282 aa, Homo sapiens; identical to SEQ ID NO: 876102

SEQ ID NO: 876123 - protein, 282 aa, Homo sapiens; identical to SEQ ID NO: 876102

SEQ ID NO: 876124 - protein, 142 aa, Homo sapiens
MPRPLPSFDLPQPPVLDTLDLLAIYCRNEAGQEEVGMPPLPPPQQPPPPSPPQPSRLAPYPHPATTRGDRKQKKRDQNKSAALRYRQRKRAEGEALEGECQGLEARNRELKERAESVEREIQYVKDLLIEVYKARSQRTRSC

SEQ ID NO: 876125 - protein, 282 aa, Homo sapiens; identical to SEQ ID NO: 876102

SEQ ID NO: 876126 - protein, 282 aa, Homo sapiens; identical to SEQ ID NO: 876102

SEQ ID NO: 876127 - protein, 231 aa, Homo sapiens [sequence omitted]

SEQ ID NO: 876128 - protein, 282 aa, Homo sapiens; identical to SEQ ID NO: 876102

SEQ ID NO: 876129 - protein, 203 aa, Homo sapiens
  misc_feature (145)..(145): Xaa can be any naturally occurring amino acid
  misc_feature (149)..(149): Xaa can be any naturally occurring amino acid
  misc_feature (151)..(152): Xaa can be any naturally occurring amino acid
  misc_feature (160)..(160): Xaa can be any naturally occurring amino acid
  misc_feature (163)..(163): Xaa can be any naturally occurring amino acid
  misc_feature (166)..(168): Xaa can be any naturally occurring amino acid
  misc_feature (172)..(172): Xaa can be any naturally occurring amino acid
  misc_feature (174)..(174): Xaa can be any naturally occurring amino acid
  misc_feature (179)..(179): Xaa can be any naturally occurring amino acid
MSLLATLGLELDRALLPASGLGWLVDYGKLPPAPAPLAPYEVLGGALEGGLPVGGEPLAGDGFSDWMTERVDFTALLPLEPPLPPGTLPQPSPTPPDLEAMASLLKKELEQMEDFFLDAPPLPPPSPPPLPPPPLPPAPSLPLSXPSLXLXXQLLFFIFXISXIYXXXRRAXGXGIRFXPHRAPPPLHSTSRWPLPHLHTEGR

SEQ ID NO: 876130 - protein, 145 aa, Homo sapiens
MSLLATLGLELDRALLPASGLGWLVDYGKLPPAPAPLAPYEVLGGALEGGLPVGGEPLAGDGFSDWMTERVDFTALLPLEPPLPPGTLPQPSPTPPDLEAMASLLKKELEQMEDFFLDAPPAYYQPLCLVVNAPHLIRLFIYFLP

SEQ ID NO: 876131 - protein, 96 aa, Homo sapiens
GMKVLSDRRCVSSHHPRSRQTRCGMKVLGDRRCVSSDHPTSRQTCCGMKVLSDRCSVAYDHPRSRQTLCGMKVLGDRRSVASISSYPSERPTSPLW

SEQ ID NO: 876132 - protein, 79 aa, Homo sapiens
TWSSHSEMTRATPLETWGILEQGFQGNEGRESSLDFFLLQMRRRQLPGVSTSEKATESWADKVSLCGYSSLQPQIPALK

SEQ ID NO: 876133 - protein, 79 aa, Homo sapiens; identical to SEQ ID NO: 876132

SEQ ID NO: 876134 - protein, 772 aa, Homo sapiens
MKLKDTKSRPKQSSCGKFQTKGIKVVGKWKEVKIDPNMFADGQMDDLVCFEELTDYQLVSPAKNPSSLFSKEAPKRKAQAVSEEEEEEEGKSSSPKKKIKLKKSKNVATEGTSTQKEFEVKDPELEAQGDDMVCDDPEAGEMTSENLVQTAPKKKKNKGKKGLEPSQSTAAKVPKKAKTWIPEVHDQKADVSAWKDLFVPRPVLRALSFLGFSAPTPIQALTLAPAIRDKLDILGAAETGSGKTLAFAIPMIHAVLQWQKRNAAPPPSNTEAPPGETRTEAGAETRSPGKAEAESDALPDDTVIESEALPSDIAAEARAKTGGTVSDQALLFGDDDAGEGPSSLIREKPVPKQNENEEENLDKEQTGNLKQELDDKSATCKAYPKRPLLGLVLTPTRELAVQVKQHIDAVARFTGIKTAILVGGMSTQKQQRMLNRRPEIVVATPGRLWELIKEKHYHLRNLRQLRCLVVDEADRMVEKGHFAELSQLLEMLNDSQYNPKRQTLVFSATLTLVHQAPARILHKKHTKKMDKTAKLDLLMQKIGMRGKPKVIDLTRNEATVETLTETKIHCETDEKDFYLYYFLMQYPGRSLVFANSISCIKRLSGLLKVLDIMPLTLHACMHQKQRLRNLEQFARLEDCVLLATDVAARGLDIPKVQHVIHYQVPRTSEIYVHRSGRTARATNEGLSLMLIGPEDVINFKKIYKTLKKDEDIPLFPVQTKYMDVVKERIRLARQIEKSEYRNFQACLHNSWIEQAAAALEIELEEDMYKGHV

SEQ ID NO: 876135 - protein, 773 aa, Homo sapiens
MKLKDTKSRPKQSSCGKFQTKGIKVVGKWKEVKIDPNMFADGQMDDLVCFEELTDYQLVSPAKNPSSLFSKEAPKRKAQAVSEEEEEEEGKSSSPKKKIKLKKSKNVATEGTSTQKEFEVKDPELEAQGDDMVCDDPEAGEMTSENLVQTAPKKKKNKGKKGLEPSQSTAAKVPKKAKTWIPEVHDQKADVSAWKDLFVPRPVLRALSFLGFSAPTPIQALTLAPAIRDKLDILGAAETGSGKTLAFAIPMIHAVLQWQKRNAAPPPSNTEAPPGETRTEAGAETRSPGKAEAESDALPDDTVIESEALPSDIAAEARAKTGGTVSDQALLFGDDDAGEGPSSLIREKPVPKQNENEEENLDKEQTGNLKQELDDKSATCKAYPKRPLLGLVLTPTRELAVQVKQHIDAVARFTGIKTAILVGGMSTQKQQRMLNRRPEIVVATPGRLWELIKEKHYHLRNLRQLRCLVVDEADRMVEKGHFAELSQLLEMLNDSQYNPKRQTLVFSATLTLVHQAPARILHKKHTKKMDKTAKLDLLMQKIGMRGKPKVIDLTRNEATVETLTETKIHCETDEKDFYLYYFLMQYPGRSLVFANSISCIKRLSGLLKVLDIMPLTLHACMHQKQRLRNLEQFARLEDCVLLATDVAARGLDIPKVQHVIHYQVPRTSEIYVHRSGRTARATNEGLSLMLIGPEDVINFKKIYKTLKKDEDIPLFPVQTKYMDVVKERIRLARQIEKSEYRNFQACLHNSWIEQAAAALEIELEEDMYKGGKS

SEQ ID NO: 876136 - protein, 730 aa, Homo sapiens
MDDLVCFEELTDYQLVSPAKNPSSLFSKEAPKRKAQAVSEEEEEEEGKSSSPKKKIKLKKSKNVATEGTSTQKEFEVKDPELEAQGDDMVCDDPEAGEMTSENLVQTAPKKKKNKGKKGLEPSQSTAAKVPKKAKTWIPEVHDQKADVSAWKDLFVPRPVLRALSFLGFSAPTPIQALTLAPAIRDKLDILGAAETGSGKTLAFAIPMIHAVLQWQKRNAAPPPSNTEAPPGETRTEAGAETRSPGKAEAESDALPDDTVIESEALPSDIAAEARAKTGGTVSDQALLFGDDDAGEGPSSLIREKPVPKQNENEEENLDKEQTGNLKQELDDKSATCKAYPKRPLLGLVLTPTRELAVQVKQHIDAVARFTGIKTAILVGGMSTQKQQRMLNRRPEIVVATPGRLWELIKEKHYHLRNLRQLRCLVVDEADRMVEKGHFAELSQLLEMLNDSQYNPKRQTLVFSATLTLVHQAPARILHKKHTKKMDKTAKLDLLMQKIGMRGKPKVIDLTRNEATVETLTETKIHCETDEKDFYLYYFLMQYPGRSLVFANSISCIKRLSGLLKVLDIMPLTLHACMHQKQRLRNLEQFARLEDCVLLATDVAARGLDIPKVQHVIHYQVPRTSEIYVHRSGRTARATNEGLSLMLIGPEDVINFKKIYKTLKKDEDIPLFPVQTKYMDVVKERIRLARQIEKSEYRNFQACLHNSWIEQAAAALEIELEEDMYKGGKS

SEQ ID NO: 876137 - protein, 628 aa, Homo sapiens
MKLKDTKSRPKQSSCGKFQTKGIKVVGKWKEVKIDPNMFADGQMDDLVCFEELTDYQLVSPAKNPSSLFSKEAPKRKAQAVSEEEEEEEGKSSSPKKKIKLKKSKNVATEGTSTQKEFEVKDPELEAQGDDMVCDDPEAGEMTSENLVQTAPKKKKNKGKKGLEPSQSTAAKVPKKAKTWIPEVHDQKADVSAWKDLFVPRPVLRALSFLGFSAPTPIQALTLAPAIRDKLDILGAAETGSGKTLAFAIPMIHAVLQWQKRNAAPPPSNTEAPPGETRTEAGAETRSPGKAEAESDALPDDTVIESEALPSDIAAEARAKTGGTVSDQALLFGDDDAGEGPSSLIREKPVPKQNENEEENLDKEQTGNLKQELDDKSATCKAYPKRPLLGLVLTPTRELAVQVKQHIDAVARFTGIKTAILVGGMSTQKQQRMLNRRPEIVVATPGRLWELIKEKHYHLRNLRQLRCLVVDEADRMVEKERLRNLEQFARLEDCVLLATDVAARGLDIPKVQHVIHYQVPRTSEIYVHRSGRTARATNEGLSLMLIGPEDVINFKKIYKTLKKDEDIPLFPVQTKYMDVVKERIRLARQIEKSEYRNFQACLHNSWIEQAAAALEIELEEDMYKGGKS

SEQ ID NO: 876138 - protein, 772 aa, Homo sapiens; identical to SEQ ID NO: 876134

SEQ ID NO: 876139 - protein, 772 aa, Homo sapiens; identical to SEQ ID NO: 876134

SEQ ID NO: 876140 - protein, 772 aa, Homo sapiens; identical to SEQ ID NO: 876134

SEQ ID NO: 876141 - protein, 792 aa, Homo sapiens
MKLKDTKSRPKQSSCGKFQTKGIKVVGKWKEVKIDPNMFADGQMDDLVCFEELTDYQLVSPAKNPSSLFSKEAPKRKAQAVSEEEEEEEGKSSSPKKKIKLKKSKNVATEGTSTQKEFEVKDPELEAQGDDMVCDDPEAGEMTSENLVQTAPKKKKNKGKKGLEPSQSTAAKVPKKAKTWIPEVHDQKADVSAWKDLFVPRPVLRALSFLGFSAPTPIQALTLAPAIRDKLDILGAAETGSGKTLAFAIPMIHAVLQWQKRNAAPPPSNTEAPPGETRTEAGAETRSPGKAEAESDALPDDTVIESEALPSDIAAEARAKTGGTVSDQALLFGDDDAGEGPSSLIREKPVPKQNENEEENLDKEQTGNLKQELDDKSATCKAYPKRPLLGLVLTPTRELAVQVKQHIDAVARFTGIKTAILVGGMSTQKQQRMLNRRPEIVVATPGRLWELIKEKHYHLRNLRQLRCLVVDEADRMVEKGHFAELSQLLEMLNDSQYNPKRQTLVFSATLTLVHQAPARILHKKHTKKMDKTAKLDLLMQKIGMRGKPKVIDLTRNEATVETLTETKIHCETDEKDFYLYYFLMQYPGRSLVFANSISCIKRLSGLLKVLDIMPLTLHACMHQKQRLRNLEQFARLEDCVLLATDVAARGLDIPKVQHVIHYQVPRTSEIYVHRSGRTARATNEGLSLMLIGPEDVINFKKIYKTLKKDEDIPLFPVQTKYMDVVKERIRLARQIEKSEYRNFQACLHNSWMLPLRRDWRDSWQGRPTGNLSIPQSTPSHPSYNALFKALSR

SEQ ID NO: 876142 - protein, 406 aa, Homo sapiens
MKLKDTKSRPKQSSCGKFQTKGIKVVGKWKEVKIDPNMFADGQMDDLVCFEELTDYQLVSPAKNPSSLFSKEAPKRKAQAVSEEEEEEEGKSSSPKKKIKLKKSKNVATEGTSTQKEFEVKDPELEAQGDDMVCDDPEAGEMTSENLVQTAPKKKKNKGKKGLEPSQSTAAKVPKKAKTWIPEVHDQKADVSAWKDLFVPRPVLRALSFLGFSAPTPIQALTLAPAIRDKLDILGAAETGSGKTLAFAIPMIHAVLQWQKRNAAPPPSNTEAPPGETRTEAGAETRSPGKAEAESDALPDDTVIESEALPSDIAAEARAKTGGTVSDQALLFGDDDAGEGPSSLIREKPVPKQNENEEENLDKEQTGNLKQELDDKSATCKAYPKRPLLGLVLTPTREDMYKGGKS

SEQ ID NO: 876143 - protein, 399 aa, Homo sapiens
MKLKDTKSRPKQSSCGKFQTKGIKVVGKWKEVKIDPNMFADGQMDDLVCFEELTDYQLVSPAKNPSSLFSKEAPKRKAQAVSEEEEEEEGKSSSPKKKIKLKKSKNVATEGTSTQKEFEVKDPELEAQGDDMVCDDPEAGEMTSENLVQTAPKKKKNKGKKGLEPSQSTAAKVPKKAKTWIPEVHDQKADVSAWKDLFVPRPVLRALSFLGFSAPTPIQALTLAPAIRDKLDILGAAETGSGKTLAFAIPMIHAVLQWQKRNAAPPPSNTEAPPGETRTEAGAETRSPGKAEAESDALPDDTVIESEALPSDIAAEARAKTGGTVSDQALLFGDDDAGEGPSSLIREKPVPKQNENEEENLDKEQTGNLKQELDDKSATCRFPRSWWTVAPERRRYTCR

SEQ ID NO: 876144 - protein, 359 aa, Homo sapiens
MKLKDTKSRPKQSSCGKFQTKGIKVVGKWKEVKIDPNMFADGQMDDLVCFEELTDYQLVSPAKNPSSLFSKEAPKRKAQAVSEEEEEEEGKSSSPKKKIKLKKSKNVATEGTSTQKEFEVKDPELEAQGDDMVCDDPEAGEMTSENLVQTAPKKKKNKGKKGLEPSQSTAAKVPKKAKTWIPEVHDQKADVSAWKDLFVPRPVLRALSFLGFSAPTPIQALTLAPAIRDKLDILGAAETGSGKTLAFAIPMIHAVLQWQKRNAAPPPSNTEAPPGETRTEAGAETRSPGKAEAESDALPDDTVIESEALPSDIAAEARAKTGGTVSDQACPRAQAGKGPPGRGTFPRVMGDFKAGPRGA

SEQ ID NO: 876145 - protein, 210 aa, Homo sapiens
MKLKDTKSRPKQSSCGKFQTKGIKVVGKWKEVKIDPNMFADGQMDDLVCFEELTDYQLVSPAKNPSSLFSKEAPKRKAQAVSEEEEEEEGKSSSPKKKIKLKKSKNVATEKKKKKQKKFFGGLGLREKFSKHLCALGPAGPNVGKRRTPGPIGLGPPKEEPGDKDQGGGISHPIKKAPGGTHPAVFWHNSEKGRRRGNNGITQRGCQEAK

SEQ ID NO: 876146 - protein, 773 aa, Homo sapiens; identical to SEQ ID NO: 876135

SEQ ID NO: 876147 - protein, 586 aa, Homo sapiens
MKLKDTKSRPKQSSCGKFQTKGIKVVGKWKEVKIDPNMFADGQMDDLVCFEELTDYQLVSPAKNPSSLFSKEAPKRKAQAVSEEEEEEEGKSSSPKKKIKLKKSKNVATEGTSTQKEFEVKDPELEAQGDDMVCDDPEAGEMTSENLVQTAPKKKKNKGKKGLEPSQSTAAKVPKKAKTWIPEVHDQKADVSAWKDLFVPRPVLRALSFLGFSAPTPIQALTLAPAIRDKLDILGAAETGSGKTLAFAIPMIHAVLQWQKRNAAPPPSNTEAPPGETRTEAGAETRSPGKAEAESDALPDDTVIESEALPSDIAAEARAKTGGTVSDQALLFGDDDAGEGPSSLIREKPVPKQNENEEENLDKEQTGNLKQELDDKSATCKAYPKRPLLGLVLTPTRELAVQVKQHIDAVARFTGIKTAILVGGMSTQKQQRMLNRRPEIVVATPGRLWELIKEKHYHLRNLRQLRCLVVDEADRMVEKGHFAELSQLLEMLNDSQYNPKRQTLVFSATLTLVHQAPARILHKRGSETWSSLPVWKTVFSWQQMWQLGVWIFLKSSMSSITRSHVPRRFMSTEVVELLELPMKASV

SEQ ID NO: 876148 - protein, 523 aa, Homo sapiens
MIHAVLQWQKRNAAPPPSNTEAPPGETRTEAGAETRSPGKAEAESDALPDDTVIESEALPSDIAAEARAKTGGTVSDQALLFGDDDAGEGPSSLIREKPVPKQNENEEENLDKEQTGNLKQELDDKSATCKAYPKRPLLGLVLTPTRELAVQVKQHIDAVARFTGIKTAILVGGMSTQKQQRMLNRRPEIVVATPGRLWELIKEKHYHLRNLRQLRCLVVDEADRMVEKGHFAELSQLLEMLNDSQYNPKRQTLVFSATLTLVHQAPARILHKKHTKKMDKTAKLDLLMQKIGMRGKPKVIDLTRNEATVETLTETKIHCETDEKDFYLYYFLMQYPGRSLVFANSISCIKRLSGLLKVLDIMPLTLHACMHQKQRLRNLEQFARLEDCVLLATDVAARGLDIPKVQHVIHYQVPRTSEIYVHRSGRTARATNEGLSLMLIGPEDVINFKKIYKTLKKDEDIPLFPVQTKYMDVVKERIRLARQIEKSEYRNFQACLHNSWIEQAAAALEIELEEDMYKGGKS

SEQ ID NO: 876149 - protein, 482 aa, Homo sapiens
RSHEASRVIGRGYRECYMPSDIAAEARAKTGGTVSDQALLFGDDDAGEGPSSLIREKPVPKQNENEEENLDKEQTGNLKQELDDKSATCKAYPKRPLLGLVLTPTRELAVQVKQHIDAVARFTGIKTAILVGGMSTQKQQRMLNRRPEIVVATPGRLWELIKEKHYHLRNLRQLRCLVVDEADRMVEKGHFAELSQLLEMLNDSQYNPKRQTLVFSATLTLVHQAPARILHKKHTKKMDKTAKLDLLMQKIGMRGKPKVIDLTRNEATVETLTETKIHCETDEKDFYLYYFLMQYPGRSLVFANSISCIKRLSGLLKVLDIMPLTLHACMHQKQRLRNLEQFARLEDCVLLATDVAARGLDIPKVQHVIHYQVPRTSEIYVHRSGRTARATNEGLSLMLIGPEDVINFKKIYKTLKKDEDIPLFPVQTKYMDVVKERIRLARQIEKSEYRNFQACLHNSWIEQAAAALEIELEEDMYKGGKS

SEQ ID NO: 876150 - protein, 772 aa, Homo sapiens; identical to SEQ ID NO: 876134

SEQ ID NO: 876151 - protein, 748 aa, Homo sapiens
MKLKDTKSRPKQSSCGKFQTKGIKVVGKWKEVKIDPNMFADGQMDDLVCFEELTDYQLVSPAKNPSSLFSKEAPKRKAQAVSEEEEEEEGKSSSPKKKIKLKKSKNVATEGTSTQKEFEVKDPELEAQGDDMVCDDPEAGEMTSENLVQTAPKKKKNKGKKGLEPSQSTAAKVPKKAKTWIPEVHDQKADVSAWKDLFVPRPVLRALSFLGFSAPTPIQALTLAPAIRDKLDILGAAETGSGKTLAFAIPMIHAVLQWQKRNAAPPPSNTEAPPGETRTEAGAETRSPGKAEAESDALPDDTVIESEALPSDIAAEARAKTGGTVSDQALLFGDDDAGEGPSSLIREKPVPKQNENEEENLDKEQTGNLKQELDDKSATCKAYPKRPLLGLVLTPTRELAVQVKQHIDAVARFTGIKTAILVGGMSTQKQQRMLNRRPEIVVATPGRLWELIKEKHYHLRNLRQLRCLVVDEADRMVEKGHFAELSQLLEMLNDSQYNPKRQTLVFSATLTLVHQAPARILHKKHTKKMDKTAKLDLLMQKIGMRGKPKVIDLTRNEATVETLTETKIHCETDEKDFYLYYFLMQYPGRSLVFANSISCIKRLSGLLKVLDIMPLTLHACMHQKQRLRNLEQFARLEDCVLLATDVAARGLDIPKVQHVIHYQVPRTSEIYVHRSGRTARATNEGLSLMLIGPEDVINFKKIYKTLKKDEDIPLFPGEHILVCARANRELDNWKRYVRLRDPGYTHHL

SEQ ID NO: 876152 - protein, 598 aa, Homo sapiens
MKLKDTKSRPKQSSCGKFQTKGIKVVGKWKEVKIDPNMFADGQMDDLVCFEELTDYQLVSPAKNPSSLFSKEAPKRKAQAVSEEEEEEEGKSSSPKKKIKLKKSKNVATEGTSTQKEFEVKDPELEAQGDDMVCDDPEAGEMTSENLVQTAPKKKKNKGKKGLEPSQSTAAKVPKKAKTWIPEVHDQKADVSAWKDLFVPRPVLRALSFLGFSAPTPIQALTLAPAIRDKLDILGAAETGSGKTLAFAIPMIHAVLQWQKRNAAPPPSNTEAPPGETRTEAGAETRSPGKAEAESDALPDDTVIESEALPSDIAAEARAKTGGTVSDQALLFGDDDAGEGPSSLIREKPVPKQNENEEENLDKEQTGNLKQELDDKSATCKAYPKRPLLGLVLTPTRELAVQVKQHIDAVARFTGIKTAILVGGMSTQKQQRMLNRRPEIVVATPGRLWELIKEKHYHLRNLRQLRCLVVDEADRMVEKGHFAELSQLLEMLNDSQYNPKRQTLVFSATLTLVHQAPARILHKKHTKKMDKTAKLDLLMQKIGMRGKPKVIDLTRNEATVETLTETKIHCETDEKEGRKEGKEGGKEGRRELVPILWL

SEQ ID NO: 876153 - protein, 546 aa, Homo sapiens
MKLKDTKSRPKQSSCGKFQTKGIKVVGKWKEVKIDPNMFADGQMDDLVCFEELTDYQLVSPAKNPSSLFSKEAPKRKAQAVSEEEEEEEGKSSSPKKKIKLKKSKNVATEGTSTQKEFEVKDPELEAQGDDMVCDDPEAGEMTSENLVQTAPKKKKNKGKKGLEPSQSTAAKVPKKAKTWIPEVHDQKADVSAWKDLFVPRPVLRALSFLGFSAPTPIQALTLAPAIRDKLDILGAAETGSGKTLAFAIPMIHAVLQWQKRNAAPPPSNTEAPPGETRTEAGAETRSPGKAEAESDALPDDTVIESEALPSDIAAEARAKTGGTVSDQALLFGDDDAGEGPSSLIREKPVPKQNENEEENLDKEQTGNLKQELDDKSATCKAYPKRPLLGLVLTPTRELAVQVKQHIDAVARFTGIKTAILVGGMSTQKQQRMLNRRPEIVVATPGRLWELIKEKHYHLRNLRQLRCLVVDEADRMVEKGHFAELSQLLEMLNDSHPCVSLHHQPQVKKSPSLPLTPIAGETSCRFALFWSKNSMQQLNFSVLQCL

SEQ ID NO: 876154 - protein, 392 aa, Homo sapiens
MKLKDTKSRPKQSSCGKFQTKGIKVVGKWKEVKIDPNMFADGQMDDLVCFEELTDYQLVSPAKNPSSLFSKEAPKRKAQAVSEEEEEEEGKSSSPKKKIKLKKSKNVATEGTSTQKEFEVKDPELEAQGDDMVCDDPEAGEMTSENLVQTAPKKKKNKGKKGLEPSQSTAAKVPKKAKTWIPEVHDQKADVSAWKDLFVPRPVLRALSFLGFSAPTPIQALTLAPAIRDKLDILGAAETGSGKTLAFAIPMIHAVLQWQKRNAAPPPSNTEAPPGETRTEAGAETRSPGKAEAESDALPDDTVIESEALPSDIAAEARAKTGGTVSDQALLFGDDDAGEGPSSLIREKPVPKQNENEEENLDKEQTGNLKQELVKGPCRFQVSVAVDHRAPA

SEQ ID NO: 876155 - protein, 194 aa, Homo sapiens
PGSGSGGRAMWLLGPLCLLLSSAAAKAKSKCGPTFFPCASGIHCIIGRFRCNGFEDCPDGSDEENCTANPLLCSTARYHCKNGLCIDKSFICDGQNNCQDNSDEESCESSQEPGSGQVFVTSENQLVYYPSITYAIIGSSVIFVLVVALLALVLHHQRKRNNLMTLPVHRLQHPVLLSRLVVLDHPHHCNVTYN

SEQ ID NO: 876156 - protein, 51 aa, Homo sapiens
MDGASRAPGSVTGCLTASTRVMRRSAVSGLALCWGGVAAILGQRGAGPEQA

SEQ ID NO: 876157 - protein, 234 aa, Homo sapiens
MWLLGPLCLLLSSAAESQLLPGNNFTNECNIPGNFMCSNGRCIPGAWQCDGLPDCFDKSDEKECPKAKSKCGPTFFPCASGIHCIIGRFRCNGFEDCPDGSDEENCTANPLLCSTARYHCKNGLCIDKSFICDGQNNCQDNSDEESCESSQEPGSGQVFVTSENQLVYYPSITYAIIGSSVIFVLVVALLALVLHHQRKRNNLMTLPVHRLQHPVLLSRLVVLDHPHHCNVTYN

SEQ ID NO: 876158 - protein, 114 aa, Homo sapiens
NYDSEILLLSRVITKGSSLRAPCDSGGEVDHDLGGNVCSLFPLLEFCHRIMESTSQDRRATHVITIKPNETVLTAFPYRPHSSLLDFLKGEPRVLGATQILLALISGLWNYICT

SEQ ID NO: 876159 - protein, 537 aa, Homo sapiens
MIRGSASSGFEPSPVLFFLPSDVTQNSEQPAPEEYDQLQFVLQEEFSSDDSTTNAQSVIFGGYAFFKLTLSRSPLVSQPGNKGREFVPDEQKQSILPSPKFSEEEIEPLPPTLEKKPSENMSIQLDSTFKQMKDEDLQSAIVQPSQMQTKLLQDQAASLQVFPSHSALKLEDISPEDLPSQALPVEGLSEQTMPSKSTSSHVKQSSNLTANDLPPQGILSQDTSSQDMLFHDMTSQDMQSLDMLSQDTPSHAMPPQDIPSQDMLSQALSAHAILPEASTSHIVQFPEIQHLLQQPPDLQPENTEPQNQQILQMSYQDIRSEVMEETKEWKSEEELHRRKSSRRHSLNQQTKALQYLRRHSLDVQAKGQKSSKRHSLDQQSKGWQSPKQKSLDQQIKDWLSPKRHSVDKQAQLNQTKEQLPDQQAEDQQAKGEQYPEGQSKDRQVKDQQTDKEQNSKKQTQDQQTEDQPAQEKKSPKGQFQNVQAEGQQAQVEKVPKLLCQDSESQIQQYQFWQFHKGNLQAGQPRTVNLLAKNPLTG

SEQ ID NO: 876160 - protein, 732 aa, Homo sapiens
MNVISSLVAITGITFTILSYRHQDKYCQMPSFEEICVFSRTLFIVLFFLPSDVTQNSEQPAPEEYDQLQFVLQEEFSSDDSTTNAQSVIFGGYAFFKLTLSRSPLVSQPGNKGREFVPDEQKQSILPSPKFSEEEIEPLPPTLEKKPSENMSIQLDSTFKQMKDEDLQSAIVQPSQMQTKLLQDQAASLQVFPSHSALKLEDISPEDLPSQALPVEGLSEQTMPSKSTSSHVKQSSNLTANDLPPQGILSQDTSSQDMLFHDMTSQDMQSLDMLSQDTPSHAMPPQDIPSQDMLSQALSAHAILPEASTSHIVQFPEIQHLLQQPPDLQPENTEPQNQQILQMSYQDIRSEVMEETKEWKSEEELHRRKSSRRHSLNQQTKALQYLRRHSLDVQAKGQKSSKRHSLDQQSKGWQSPKQKSLDQQIKDWLSPKRHSVDKQAQLNQTKEQLPDQQAEDQQAKGEQYPEGQSKDRQVKDQQTDKEQNSKKQTQDQQTEDQPAQEKKSPKGQFQNVQAEGQQAQVEKVPKLLCQDSESQIQQIPILAIPQRQSPGWTTQDCQSFGQESPDWITQGWRNKDYKAREWQFEMKHWQTQDLLEKEALKQKALYQEVQTQHATAQHNLECQDTQDKDQQDLQSRVTQKGDMYTRDIKPGDMKCIGQTSGDLQSEDVKADFHSSSGQSSVQDTCLAYLSNLDSEQDVQPDTSASSNSYKEDVNLTSTSCDPKDQQQSEDSD

SEQ ID NO: 876161 - protein, 736 aa, Homo sapiens
NPAALNPASLQCKLDEKDDTILSYRHQDKYCQMPSFEEICVFSRTLFIVLFFLPSDVTQNSEQPAPEEYDQLQFVLQEEFSSDDSTTNAQSVIFGGYAFFKLTLSRSPLVSQPGNKGREFVPDEQKQSILPSPKFSEEEIEPLPPTLEKKPSENMSIQLDSTFKQMKDEDLQSAIVQPSQMQTKLLQDQAASLQVFPSHSALKLEDISPEDLPSQALPVEGLSEQTMPSKSTSSHVKQSSNLTANDLPPQGILSQDTSSQDMLFHDMTSQDMQSLDMLSQDTPSHAMPPQDIPSQDMLSQALSAHAILPEASTSHIVQFPEIQHLLQQPPDLQPENTEPQNQQILQMSYQDIRSEVMEETKEWKSEEELHRRKSSRRHSLNQQTKALQYLRRHSLDVQAKGQKSSKRHSLDQQSKGWQSPKQKSLDQQIKDWLSPKRHSVDKQAQLNQTKEQLPDQQAEDQQAKGEQYPEGQSKDRQVKDQQTDKEQNSKKQTQDQQTEDQPAQEKKSPKGQFQNVQAEGQQAQVEKVPKLLCQDSESQIQQIPILAIPQRQSPGWTTQDCQSFGQESPDWITQGWRNKDYKAREWQFEMKHWQTQDLLEKEALKQKALYQEVQTQHATAQHNLECQDTQDKDQQDLQSRVTQKGDMYTRDIKPGDMKCIGQTSGDLQSEDVKADFHSSSGQSSVQDTCLAYLSNLDSEQDVQPDTSASSNSYKEDVNLTSTSCDPKDQQQSEDSD

SEQ ID NO: 876162 - protein, 732 aa, Homo sapiens; identical to SEQ ID NO: 876160

SEQ ID NO: 876163 - protein, 114 aa, Homo sapiens; identical to SEQ ID NO: 876158

SEQ ID NO: 876164 - protein, 570 aa, Homo sapiens
MIRGSASSGFEPSPGILLILLIISIAELSISVTIASFRSKCWTQSDEVLFFLPSDVTQNSEQPAPEEYDQLQFVLQEEFSSDDSTTNAQSVIFGGYAFFKLTLSRSPLVSQPGNKGREFVPDEQKQSILPSPKFSEEEIEPLPPTLEKKPSENMSIQLDSTFKQMKDEDLQSAIVQPSQMQTKLLQDQAASLQVFPSHSALKLEDISPEDLPSQALPVEGLSEQTMPSKSTSSHVKQSSNLTANDLPPQGILSQDTSSQDMLFHDMTSQDMQSLDMLSQDTPSHAMPPQDIPSQDMLSQALSAHAILPEASTSHIVQFPEIQHLLQQPPDLQPENTEPQNQQILQMSYQDIRSEVMEETKEWKSEEELHRRKSSRRHSLNQQTKALQYLRRHSLDVQAKGQKSSKRHSLDQQSKGWQSPKQKSLDQQIKDWLSPKRHSVDKQAQLNQTKEQLPDQQAEDQQAKGEQYPEGQSKDRQVKDQQTDKEQNSKKQTQDQQTEDQPAQEKKSPKGQFQNVQAEGQQAQVEKVPKLLCQDSESQIQQYQFWQFHKGNLQAGQPRTVNLLAKNPLTG

SEQ ID NO: 876165 - protein, 537 aa, Homo sapiens; identical to SEQ ID NO: 876159

SEQ ID NO: 876166 - protein, 732 aa, Homo sapiens; identical to SEQ ID NO: 876160

SEQ ID NO: 876167 - protein, 114 aa, Homo sapiens
LEIKPGSSSKGELEVGSTVEVRVSYVENPGYFWCQLTRNIQGLKTLMSDIQYYCKNTAAPHQRNTLACLAKRTVNRQWSRALISGIQSVEHVNVTFVDYGDREMVSVKNIYSIS

SEQ ID NO: 876168 - protein, 88 aa, Homo sapiens
SWNTARTQTRMMGPCSKQPDRSNGHQQVKGIAAPGLKPGPQENTTSEAGLPQGEARTRDDGDEEGLLTHSEEELEHSQDTDADDGALQ

SEQ ID NO: 876169 - protein, 126 aa, Homo sapiens
MSLKLQASNVTNKNDPKSINSRVFIGNLNTALVKKSDVETIFSKYGRVAGCSVHKGYAFVQYSNERHARAAVLGENGRVLAGQTLDINMAGEPKPDRPKGLKRAASAIYSGYIFDYDYYRDDFYDR

SEQ ID NO: 876170 - protein, 114 aa, Homo sapiens
EYTARKSWNTARTQTRMMGPCSKQPDRSNGHQQVKGIAAPRPQAGHPTLDATPQRVPEESWQQARHQPPQENTTSEAGLPQGEARTRDDSDEEGLLTHSEEELEHIQDTTALVY

SEQ ID NO: 876171 - protein, 291 aa, Homo sapiens
MSLKLQASNVTNKNDPKSINSRVFIGNLNTALVKKSDVETIFSKYGRVAGCSVHKGYAFVQYSNERHARAAVLGENGRVLAGQTLDINMAGEPKPDRPKGLKRAASAIYRLFDYRGRLSPVPVPRAVPVKRPRVTVPLVRRVKTNVPVKLFARSTAVTTSSAKIKLKSSELQAIKTELTQIKSNIDALLSRLEQIAAEQKANPDGKKKGDGGGASGGGGGGGGSGGGGSGGGGGGGSSRPPAPQENTTSEAGLPQGEARTRDDGDEEGLLTHSEEELEHSQDTDADDGALQ

SEQ ID NO: 876172 - protein, 472 aa, Homo sapiens
SGPFQSQAERVGRAHAPGKPGCFWAGLQTPRARVTVSFPGDREGGEPGTRAGAAGGAELRGAAPGAPTPARLSGAGRGQGSRLRGSRRCQCGGARERRQLGAAEPREAEGAVAAATATTTTPARVPSLFPPQPPFSSLPYVPECGSTASFPAARLPPDLSARVGTMSLKLQASNVTNKNDPKSINSRVFIGNLNTALVKKSDVETIFSKYGRVAGCSVHKGYAFVQYSNERHARAAVLGENGRVLAGQTLDINMAGEPKPDRPKGLKRAASAIYSGYIFDYDYYRDDFYDRLFDYRGRLSPVPVPRAVPVKRPRVTVPLVRRVKTNVPVKLFARSTAVTTSSAKIKLKSSELQAIKTELTQIKSNIDALLSRLEQIAAEQKANPDGKKKGDGGGASGGGGGGGGSGGGGSGGGGGGGSSRPPAPQENTTSEAGLPQGEARTRDDGDEEGLLTHSEEELEHSQDTDADDGALQ

SEQ ID NO: 876173 - protein, 307 aa, Homo sapiens
MSLKLQASNVTNKNDPKSINSRVFIGNLNTALVKKSDVETIFSKYGRVAGCSVHKGYAFVQYSNERHARAAVLGENGRVLAGQTLDINMAGEPKPDRPKGLKRAASAIYSGYIFDYDYYRDDFYDRLFDYRGRLSPVPVPRAVPVKRPRVTVPLVRRVKTNVPVKLFARSTAVTTSSAKIKLKSSELQAIKTELTQIKSNIDALLSRLEQIAAEQKANPDGKKKGDGGGASGGGGGGGGSGGGGSGGGGGGGSSRPPAPQENTTSEAGLPQGEARTRDDGDEEGLLTHSEEELEHSQDTDADDGALQ

SEQ ID NO: 876174 - protein, 130 aa, Homo sapiens
MSLKLQASNVTNKNDPKSINSRVFIGNLNTALVKKSDVETIFSKYGRVAGCSVHKGYAFVQYSNERHARAAVLGENGRVLAGQTLDINMAGEPKPDRPKGLKRAASAIYSQGGPCEATPGHSPFGPACQN

SEQ ID NO: 876175 - protein, 270 aa, Homo sapiens
MSPCAQNSRHTAYLEKMVSNERHARPAPAHFSPSTAARAWRVLAGQTLDINMAGEPKPDRPKGLKRAASAIYSGYIFDYDYYRDDFYDRLFDYRGRLSPVPVPRAVPVKRPRVTVPLVRRVKTNVPVKLFARSTAVTTSSAKIKLKSSELQAIKTELTQIKSNIDALLSRLEQIAAEQKANPDGKKKGDGGGASGGGGGGGGSGGGGSGGGGGGGSSRPPAPQENTTSEAGLPQGEARTRDDGDEEGLLTHSEEELEHSQDTDADDGALQ

SEQ ID NO: 876176 - protein, 251 aa, Homo sapiens
MSLKLQASNVTNKNDPKSINSRVFIGNLNTALVKKSDVETIFSKYGRVAGCSVHKGYAFVQYSNERHARAAVLGENGRVLAGQTLDINMAGEPKPDRPKGLKRAASAIYSGYIFDYDYYRDDFYDRLFDYRGRLSPVPVPRAVPVKRPRVTVPLVRRVKTNVPVKLFARSTAVTTSSAKIKLKSSELQAIKTELTQIKSNIDALLSRLEQIAAEQKANPDGKKKGDGGGSSGGVCCLCFFFCFVFDIGLFS

SEQ ID NO: 876177 - protein, 307 aa, Homo sapiens; identical to SEQ ID NO: 876173

SEQ ID NO: 876178 - protein, 192 aa, Homo sapiens
MLQPLAHLPYRLFDYRGRLSPVPVPRAVPVKRPRVTVPLVRRVKTNVPVKLFARSTAVTTSSAKIKLKSSELQAIKTELTQIKSNIDALLSRLEQIAAEQKANPDGKKKGDGGGASGGGGGGGGSGGGGSGGGGGGGSSRPPAPQENTTSEAGLPQGEARTRDDGDEEGLLTHSEEELEHSQDTDADDGALQ

SEQ ID NO: 876179 - protein, 307 aa, Homo sapiens; identical to SEQ ID NO: 876173

SEQ ID NO: 876180 - protein, 204 aa, Homo sapiens
MSLKLQASNVTNKNDPKSINSRVFIGNLNTALVKKSDVETIFSKYGRVAGCSVHKGYAFVQYSNERHARAAVLGENGRVLAGQTLDINMAGEPKPDRPKGLKRAASAIYSGYIFDYDYYRDDFYDRLFDYRGRLSPVPVPRAVPVKRPRVTVPLVRRVKTNVPVKLFARSTAVTTSSAKIKLKSSELQAIKTELTRTQPGHRRG

SEQ ID NO: 876181 - protein, 319 aa, Homo sapiens [sequence omitted]

SEQ ID NO: 876182 - protein, 274 aa, Homo sapiens
MSLKLQASNVTNKNDPKSINSRVFIGNLNTALVKKSDVETIFSKYGRVAGCSVHKGYAFVQYSNERHARAAVLGENGRVLAGQTLDINMAGEPKPDRPKGLKRAASAIYSGYIFDYDYYRDDFYDRLFDYRGRLSPVPVPRAVPVKRPRVTVPLVRRVKTNVPVKLFARSTAVTTSSAKIKLKSSELQAIKTELTQIKSNIDALLSRLEQIAAEQKANPDGKKKGDGGGASGGGGGGGGSGGGVVRGGRQRHTPETHLRGSREHGRRRKEGARE

SEQ ID NO: 876183 - protein, 123 aa, Homo sapiens
MSLKLQASNVTNKNDPKSINSRVFIGNLNTALVKKSDVETIFSKYGRVAGCSVHKGYAFVQYSNERHARAAVLGENGRVLAGQTLDINMAGEPKPDRPKGLKRAASAIYSYIFDYDYWPTPSP

SEQ ID NO: 876184 - protein, 164 aa, Homo sapiens
MSLKLQASNVTNKNDPKSINSRVFIGNLNTALVKKSDVETIFSKYGRVAGCSVHKGYAFVQYSNERHARAAVLGENGRVLAGQTLDINMAGEPKPDRPKGLKRAASAIYSYIFDYDYSCHHDPGHNMIISTLAETNRTPFDLPEGESELVIRLEHRNAEINRAE

SEQ ID NO: 876185 - protein, 439 aa, Homo sapiens
SGPFQSQAERVGRAHAPGKPGCFWAGLQTPRARVTVSFPGDREGGEPGTRAGAAGGAELRGAAPGAPTPARLSGAGRGQGSRLRGSRRCQCGGARERRQLGAAEPREAEGAVAAATATTTTPARVPSLFPPQPPFSSLPYVPECGSTASFPAARLPPDLSARVGTMSLKLQASNVTNKNDPKSINSRVFIGNLNTALVKKSDVETIFSKYGRVAGCSVHKGYAFVQYSNERHARAAVLGENGRVLAGQTLDINMAGEPKPDRPKGLKRAASAIYSGYIFDYDYYRDDFYDRLFDYRGRLSPVPVPRAVPVKRPRVTVPLVRRVKTNVPVKLFARSTAVTTSSAKIKLKSSELQAIKTELTQIKSNIDALLSRLEQIAAEQKANPDGKKKGDGGGASGGGGGGGGSGGGVVRGGRQRHTPETHLRGSREHGRRRKEGARE

SEQ ID NO: 876186 - protein, 172 aa, Homo sapiens
SGPFQSQAERVGRAHAPGKPGCFWAGLQTPRARVTVSFPGDREGGEPGTRAGAAGGAELRGAAPGAPTPARLSGAGRGQGSRLRGSRRCQCGGARERRQLGAAEPREAEGAVAAATATTTTPARVPSLFPPQPPFSSLPYVPECGSTASFPAARLPPDLSARVSPIPRGRWC

SEQ ID NO: 876187 - protein, 329 aa, Homo sapiens
SGPFQSQAERVGRAHAPGKPGCFWAGLQTPRARVTVSFPGDREGGEPGTRAGAAGGAELRGAAPGAPTPARLSGAGRGQGSRLRGSRRCQCGGARERRQLGAAEPREAEGAVAAATATTTTPARVPSLFPPQPPFSSLPYVPECGSTASFPAARLPPDLSARVGTMSLKLQASNVTNKNDPKSINSRVFIGNLNTALVKKSDVETIFSKYGRVAGCSVHKGYAFVQYSNERHARAAVLGENGRVLAGQTLDINMAGEPKPDRPKGLKRAASAIYSYIFDYDYSCHHDPGHNMIISTLAETNRTPFDLPEGESELVIRLEHRNAEINRAE

SEQ ID NO: 876188 - protein, 307 aa, Homo sapiens; identical to SEQ ID NO: 876173

SEQ ID NO: 876189 - protein, 178 aa, Homo sapiens
MITTGTTSTTARAVPVKRPRVTVPLVRRVKTNVPVKLFARSTAVTTSSAKIKLKSSELQAIKTELTQIKSNIDALLSRLEQIAAEQKANPDGKKKGDGGGASGGGGGGGGSGGGGSGGGGGGGSSRPPAPQENTTSEAGLPQGEARTRDDGDEEGLLTHSEEELEHSQDTDADDGALQ

SEQ ID NO: 876190 - protein, 307 aa, Homo sapiens; identical to SEQ ID NO: 876173

SEQ ID NO: 876191 - protein, 307 aa, Homo sapiens; identical to SEQ ID NO: 876173

SEQ ID NO: 876192 - protein, 291 aa, Homo sapiens; identical to SEQ ID NO: 876171

SEQ ID NO: 876193 - protein, 257 aa, Homo sapiens
MSLKLQASNVTNKNDPKSINSRVFIGNLNTALVKKSDVETIFSKYGRVAGCSVHKGYAFVQYSNERHARAAVLGENGRVLAGQTLDINMAGEPKPDRPKGLKRAASAIYSGYIFDYDYYRDDFYDRLFDYRGRLSPVPVPRAVPVKRPRVTVPLVRRVKTNVPVKLFARSTAVTTSSAKIKLKSSELQAIKTELTQIKSNIDALLSRLEQIAAEQKANPDGKKKGDGGGAFRQAVSTEEKESYRMSAIQNSTLSNPC

SEQ ID NO: 876194 - protein, 307 aa, Homo sapiens; identical to SEQ ID NO: 876173

SEQ ID NO: 876195 - protein, 330 aa, Homo sapiens
MSLKLQASNVTNKNDPKSINSRVFIGNLNTALVKKSDVETIFSKYGRVAGCSVHKGYAFVQYSNERHARAAVLGENGRVLAGQTLDINMAGEPKPDRPKGLKRAASAIYSGYIFDYDYYRDDFYDRLFDYRGRLSPVPVPRAVPVKRPRVTVPLVRRVKTNVPVKLFARSTAVTTSSAKIKLKSSELQAIKTELTQIKSNIDALLSRLEQIAAEQKANPDGKKKGDGGGASGGGGGGGGSGGGGSGGGGGGGSSRPPAPQENTTSEAGLPQGEARTRDDGDERTGGLPWNTTSRRQELEQQAQGTHKERRGHRNRRALRQNSKPDRSPTG

SEQ ID NO: 876196 - protein, 172 aa, Homo sapiens; identical to SEQ ID NO: 876186

SEQ ID NO: 876197 - protein, 172 aa, Homo sapiens; identical to SEQ ID NO: 876186

SEQ ID NO: 876198 - protein, 172 aa, Homo sapiens; identical to SEQ ID NO: 876186

SEQ ID NO: 876199 - protein, 172 aa, Homo sapiens; identical to SEQ ID NO: 876186

SEQ ID NO: 876200 - protein, 71 aa, Homo sapiens
  misc_feature (4)..(4): Xaa can be any naturally occurring amino acid
  misc_feature (21)..(21): Xaa can be any naturally occurring amino acid
  misc_feature (23)..(25): Xaa can be any naturally occurring amino acid
  misc_feature (30)..(30): Xaa can be any naturally occurring amino acid
  misc_feature (47)..(48): Xaa can be any naturally occurring amino acid
  misc_feature (56)..(64): Xaa can be any naturally occurring amino acid
YYQXKRISNWRACYSIAVIGXWXXXYGPDXWAGECYTNSSQICCLWXXGHVLEAGXXXXXXXXXYWPTPSP

SEQ ID NO: 876201 - protein, 188 aa, Homo sapiens
  misc_feature (1)..(1): Xaa can be any naturally occurring amino acid
XSLYPCSCCSCCTEINAEQTDLRYCREYQRGNCNRGENDCRVLLIPADSTMIDTNDNTVTVCMDYIKRGKCFSGKKCKILSTPPATFAKPKIKAAPNTKSNQAAAAQAAATAAAMTQSAVKSLKRPLEATFDLGIPQAVLPPLPKRPALEKTNGATAVFNTGIFQYQQALANMQLQQHTAFLPPGKGW

SEQ ID NO: 876202 - protein, 489 aa, Homo sapiens
PGPAPGSILRETGLGCDAAAGVRMSYPGYPPTGYPPFPGYPPAGQESSFPPSGQYPYPSGFPPMGGGAYPQVPSSGYPGAGGYPAPGGYPAPGGYPGAPQPGGAPSYPGVPPGQGFGVPPGGAGFSGYPQPPSQSYGGGPAQVPLPGGFPGGQMPSQYPGGQPTYPSQPATVTQVTQGTIRPAANFDAIRDAEILRKAMKGFGTDEQAIVDVVANRSNDQRQKIKAAFKTSYGKDLIKDLKSELSGNMEELILALFMPPTYYDAWSLRKAMQGAGTQERVLIEILCTRTNQEIREIVRCYQSEFGRDLEKDIRSDTSGHFERLLVSMCQGNRDENQSINHQMAQEDAQRLYQAGEGRLGTDESCFNMILATRSFPQLRATMEAYSRMANRDLLSSVSREFSGYVESGLKTILQCALNRPAFFAERLYYAMKGAGTDDSTLVRIVVTRSEIDLVQIKQMFAQMYQKTLGTMIAGDTSGDYRRLLLAIVGQ

SEQ ID NO: 876203 - protein, 511 aa, Homo sapiens
PGPAPGSILRETGLGCDAAAGVRMSYPGYPPTGYPPFPGYPPAGQESSFPPSGQYPYPSGFPPMGGGAYPQVPSSGYPGAGGYPAPGGYPAPGGYPGAPQPGGAPSYPGVPPGQGFGVPPGGAGFSGYPQPPSQSYGGGPAQVPLPGGFPGGQMPSQYPGGQPTYPSQINTDSFSSYPVFSPVSLDYSSEPATVTQVTQGTIRPAANFDAIRDAEILRKAMKGFGTDEQAIVDVVANRSNDQRQKIKAAFKTSYGKDLIKDLKSELSGNMEELILALFMPPTYYDAWSLRKAMQGAGTQERVLIEILCTRTNQEIREIVRCYQSEFGRDLEKDIRSDTSGHFERLLVSMCQGNRDENQSINHQMAQEDAQRLYQAGEGRLGTDESCFNMILATRSFPQLRATMEAYSRMANRDLLSSVSREFSGYVESGLKTILQCALNRPAFFAERLYYAMKGAGTDDSTLVRIVVTRSEIDLVQIKQMFAQMYQKTLGTMIAGDTSGDYRRLLLAIVGQ

SEQ ID NO: 876204 - protein, 489 aa, Homo sapiens; identical to SEQ ID NO: 876202

SEQ ID NO: 876205 - protein, 489 aa, Homo sapiens; identical to SEQ ID NO: 876202

SEQ ID NO: 876206 - protein, 490 aa, Homo sapiens
MARYEAACLIRPRPGCAVKLLLGSMSYPGYPPTGYPPFPGYPPAGQESSFPPSGQYPYPSGFPPMGGGAYPQVPSSGYPGAGGYPAPGGYPAPGGYPGAPQPGGAPSYPGVPPGQGFGVPPGGAGFSGYPQPPSQSYGGGPAQVPLPGGFPGGQMPSQYPGGQPTYPSQPATVTQVTQGTIRPAANFDAIRDAEILRKAMKGFGTDEQAIVDVVANRSNDQRQKIKAAFKTSYGKDLIKDLKSELSGNMEELILALFMPPTYYDAWSLRKAMQGAGTQERVLIEILCTRTNQEIREIVRCYQSEFGRDLEKDIRSDTSGHFERLLVSMCQGNRDENQSINHQMAQEDAQRLYQAGEGRLGTDESCFNMILATRSFPQLRATMEAYSRMANRDLLSSVSREFSGYVESGLKTILQCALNRPAFFAERLYYAMKGAGTDDSTLVRIVVTRSEIDLVQIKQMFAQMYQKTLGTMIAGDTSGDYRRLLLAIVGQ

SEQ ID NO: 876207 - protein, 426 aa, Homo sapiens
MGGGAYPQVPSSGYPGAGGYPAPGGYPAPGGYPGAPQPGGAPSYPGVPPGQGFGVPPGGAGFSGYPQPPSQSYGGGPAQVPLPGGFPGGQMPSQYPGGQPTYPSQPATVTQVTQGTIRPAANFDAIRDAEILRKAMKGFGTDEQAIVDVVANRSNDQRQKIKAAFKTSYGKDLIKDLKSELSGNMEELILALFMPPTYYDAWSLRKAMQGAGTQERVLIEILCTRTNQEIREIVRCYQSEFGRDLEKDIRSDTSGHFERLLVSMCQGNRDENQSINHQMAQEDAQRLYQAGEGRLGTDESCFNMILATRSFPQLRATMEAYSRMANRDLLSSVSREFSGYVESGLKTILQCALNRPAFFAERLYYAMKGAGTDDSTLVRIVVTRSEIDLVQIKQMFAQMYQKTLGTMIAGDTSGDYRRLLLAIVGQ

SEQ ID NO: 876208 - protein, 467 aa, Homo sapiens
PGPAPGSILRETGLGCDAAAGVRMSYPGYPPTGYPPFPGYPPAGQESSFPPSGQYPYPSGFPPMGGGAYPQVPSSGYPGAGGYPAPGGYPAPGGYPGAPQPGGAPSYPGVPPGQGFGVPPGGAGFSGYPQPPSQSYGGGPAQVPLPGGFPGGQMPSQYPGGQPTYPSQPATVTQVTQGTIRPAANFDAIRDAEILRKAMKGFGTDEQAIVDVVANRSNDQRQKIKAAFKTSYGKDLIKDLKSELSGNMEELILALFMPPTYYDAWSLRKAMQGAGTQERVLIEILCTRTNQEIREIVRCYQSEFGRDGNRDENQSINHQMAQEDAQRLYQAGEGRLGTDESCFNMILATRSFPQLRATMEAYSRMANRDLLSSVSREFSGYVESGLKTILQCALNRPAFFAERLYYAMKGAGTDDSTLVRIVVTRSEIDLVQIKQMFAQMYQKTLGTMIAGDTSGDYRRLLLAIVGQ

SEQ ID NO: 876209 - protein, 358 aa, Homo sapiens
MPSQYPGGQPTYPSQINTDSFSSYPVFSPVSLDYSSEPATVTQVTQGTIRPAANFDAIRDAEILRKAMKGFGTDEQAIVDVVANRSNDQRQKIKAAFKTSYGKDLIKDLKSELSGNMEELILALFMPPTYYDAWSLRKAMQGAGTQERVLIEILCTRTNQEIREIVRCYQSEFGRDLEKDIRSDTSGHFERLLVSMCQGNRDENQSINHQMAQEDAQRLYQAGEGRLGTDESCFNMILATRSFPQLRATMEAYSRMANRDLLSSVSREFSGYVESGLKTILQCALNRPAFFAERLYYAMKGAGTDDSTLVRIVVTRSEIDLVQIKQMFAQMYQKTLGTMIAGDTSGDYRRLLLAIVGQ

SEQ ID NO: 876210 - protein, 394 aa, Homo sapiens
PGPAPGSILRETGLGCDAAAGVRMSYPGYPPTGYPPFPGYPPAGQESSFPPSGQYPYPSGFPPMGGGAYPQVPSSGYPGAGGYPAPGGYPAPGGYPGAPQPGGAPSYPGVPPGQGFGVPPGGAGFSGYPQPPSQSYGGGPAQVPLPGGFPGGQMPSQYPGGQPTYPSQPATVTQVTQGTIRPAANFDAIRDAEILRKAMKGFGTDEQAIVDVVANRSNDQRQKIKAAFKTSYGKGNRDENQSINHQMAQEDAQRLYQAGEGRLGTDESCFNMILATRSFPQLRATMEAYSRMANRDLLSSVSREFSGYVESGLKTILQCALNRPAFFAERLYYAMKGAGTDDSTLVRIVVTRSEIDLVQIKQMFAQMYQKTLGTMIAGDTSGDYRRLLLAIVGQ

SEQ ID NO: 876211 - protein, 490 aa, Homo sapiens
PGPAPGSILRETGLGCDAAAGVRMSYPGYPPTGYPPFPGYPPAGQESSFPPSGQYPYPSGFPPMGGGAYPQVPSSGYPGAGGYPAPGGYPAPGGYPGAPQPGGAPSYPGVPPGQGFGVPPGGAGFSGYPQPPSQSYGGGPAQVPLPGGFPGGQMPSQYPGGQPTYPSQPATVTQVTQGTIRPAANFDAIRDAEILRKAMKGFGTDEQAIVDVVANRSNDQRQKIKAAFKTSYGKDLIKDLKSELSGNMEELILALFMPPTYYDAWSLRKAMQGAGTQERVLIEILCTRTNQEIREIVRCYQSEFGRDLEKDIRSDTSGHFERLLVSMCQGNRDENQSINHQMAQEDAQRLYQAGEGRLGTDESCFNMILATRSFPQLRATMEAYSRMANRDLLSSVSREFSGYVESGLKTILQCALNRPAFFAERLYYAMKGAGTDDSTLVRIVVTRSEIDLVQIKQMFAQMYQKTLGTMIAGDTSGDYRRLSASLIASK

SEQ ID NO: 876212 - protein, 463 aa, Homo sapiens
  misc_feature (460)..(460): Xaa can be any naturally occurring amino acid
PGPAPGSILRETGLGCDAAAGVRMSYPGYPPTGYPPFPGYPPAGQESSFPPSGQYPYPSGFPPMGGGAYPQVPSSGYPGAGGYPAPGGYPAPGGYPGAPQPGGAPSYPGVPPGQGFGVPPGGAGFSGYPQPPSQSYGGGPAQVPLPGGFPGGQMPSQYPGGQPTYPSQPATVTQVTQGTIRPAANFDAIRDAEILRKAMKGFGTDEQAIVDVVANRSNDQRQKIKAAFKTSYGKDLIKDLKSELSGNMEELILALFMPPTYYDAWSLRKAMQGAGTQERVLIEILCTRTNQEIREIVRCYQSEFGRDLEKDIRSDTSGHFERLLVSMCQGNRDENQSINHQMAQEDAQRLYQAGEGRLGTDESCFNMILATRSFPQLRATMEAYSRMANRDLLSSVSREFSGYVESGLKTILQCALNRPAFFAERLYYAMKGAGTDDSTLVRIVVTRSEPLSINNVADVXTWP

SEQ ID NO: 876213 - protein, 489 aa, Homo sapiens; identical to SEQ ID NO: 876202

SEQ ID NO: 876214 - protein, 466 aa, Homo sapiens
MSYPGYPPTGYPPFPGYPPAGQESSFPPSGQYPYPSGFPPMGGGAYPQVPSSGYPGAGGYPAPGGYPAPGGYPGAPQPGGAPSYPGVPPGQGFGVPPGGAGFSGYPQPPSQSYGGGPAQVPLPGGFPGGQMPSQYPGGQPTYPSQPATVTQVTQGTIRPAANFDAIRDAEILRKAMKGFGTDEQAIVDVVANRSNDQRQKIKAAFKTSYGKDLIKDLKSELSGNMEELILALFMPPTYYDAWSLRKAMQGAGTQERVLIEILCTRTNQEIREIVRCYQSEFGRDLEKDIRSDTSGHFERLLVSMCQGNRDENQSINHQMAQEDAQRLYQAGEGRLGTDESCFNMILATRSFPQLRATMEAYSRMANRDLLSSVSREFSGYVESGLKTILQCALNRPAFFAERLYYAMKGAGTDDSTLVRIVVTRSEIDLVQIKQMFAQMYQKTLGTMIAGDTSGDYRRLLLAIVGQ

SEQ ID NO: 876215 - protein, 426 aa, Homo sapiens; identical to SEQ ID NO: 876207

SEQ ID NO: 876216 - protein, 385 aa, Homo sapiens
MARYEAALLNSAEAGLCCEAAAGVNVIPRLSPNRLPTFPWISCGFPGGQMPSQYPGGQPTYPSQPATVTQVTQGTIRPAANFDAIRDAEILRKAMKGFGTDEQAIVDVVANRSNDQRQKIKAAFKTSYGKDLIKDLKSELSGNMEELILALFMPPTYYDAWSLRKAMQGAGTQERVLIEILCTRTNQEIREIVRCYQSEFGRDLEKDIRSDTSGHFERLLVSMCQGNRDENQSINHQMAQEDAQRLYQAGEGRLGTDESCFNMILATRSFPQLRATMEAYSRMANRDLLSSVSREFSGYVESGLKTILQCALNRPAFFAERLYYAMKGAGTDDSTLVRIVVTRSEIDLVQIKQMFAQMYQKTLGTMIAGDTSGDYRRLLLAIVGQ

SEQ ID NO: 876217 - protein, 328 aa, Homo sapiens
MRLVWLDQRLSCVRDKLYVIVWKCESDDQIIHKSLASSEGFGTDEQAIVDVVANRSNDQRQKIKAAFKTSYGKDLIKDLKSELSGNMEELILALFMPPTYYDAWSLRKAMQGAGTQERVLIEILCTRTNQEIREIVRCYQSEFGRDLEKDIRSDTSGHFERLLVSMCQGNRDENQSINHQMAQEDAQRLYQAGEGRLGTDESCFNMILATRSFPQLRATMEAYSRMANRDLLSSVSREFSGYVESGLKTILQCALNRPAFFAERLYYAMKGAGTDDSTLVRIVVTRSEIDLVQIKQMFAQMYQKTLGTMIAGDTSGDYRRLLLAIVGQ

SEQ ID NO: 876218 - protein, 489 aa, Homo sapiens; identical to SEQ ID NO: 876202

SEQ ID NO: 876219 - protein, 172 aa, Homo sapiens
ELGYLSHSCHVPGNRDENQSINHQMAQEDAQRLYQAGEGRLGTDESCFNMILATRSFPQLRATMEAYSRMANRDLLSSVSREFSGYVESGLKTILQCALNRPAFFAERLYYAMKGAGTDDSTLVRIVVTRSEIDLVQIKQMFAQMYQKTLGTMIAGDTSGDYRRLLLAIVGQ

SEQ ID NO: 876220 - protein, 103 aa, Homo sapiens
MYPNFLHHIKLKEIPLPGKKHITVFGSTEGESSDDSLVDLAVGLGVRFIKLGGLSRGERVTKYNRLLTIEEELVQNGTLATSSSSCDARIGGQEQETMTLVKV

SEQ ID NO: 876221 - protein, 324 aa, Homo sapiens
RTRGAAGRAAARGGRGPARGLHGPRLRRPRGLEGTRSAAGAAQRPGPRSTLRKLVFLRSALRAGYIVLLRWPGEVAATSPRLRTPAARLLPLPTGERLEAAKESGSGGAGVGGCLPFNPPQEVVPLSPKAEGPSWGWVRAGGDRSFQSRAEVKEKLEWTFCSGRTSKMCYLRCPILMTTSSCAGSEEKGPKAHQGACPGNQGACVQCSWVSGYLSHCGSPGQEQGPLARSFDLQKSEDMLRKHMEFRKQQDLANILAWQPPEVVRLYNANGICGHDGEGSPVWYHIVGSLDPKGLLLSASKQELLRDSFRSCELLLRECELQSQ

SEQ ID NO: 876222 - protein, 88 aa, Homo sapiens
MEFRKQQDLANILAWQPPELVKTGENNHSYFGLEEQACGIGGCRNSSLQEFLALTISVIGSYVVTPEYTTPPGRHADARQANATLRRP

SEQ ID NO: 876223 - protein, 225 aa, Homo sapiens
MSTVVELNVGGEFHTTTLGTLRKFPGSKLAEMFSSLAKASTDAEGRFFIDRPSTYFRPILDYLRTGQVPTQHIPEVYREAQFYEIKPLVKLLEDMPQIFGEQVSRKQFLLQVPGYSENLELMVRLARAEAITARKSSVLVCLVETEEQDAYYSEVLCFLQDKKMFKSVVKFGPWKAVLDNSDLMHCLEMDIKAQGYKVFSKFYLTYPTKRNEFHFNIYSFTFTWW

SEQ ID NO: 876224 - protein, 258 aa, Homo sapiens
VICMWQGCAVERPVGRMTSQTPLPQSPRPRRPTMSTVVELNVGGEFHTTTLGTLRKFPGSKLAEMFSSLAKASTDAEGRFFIDRPSTYFRPILDYLRTGQVPTQHIPEVYREAQFYEIKPLVKLLEDMPQIFGEQVSRKQFLLQVPGYSENLELMVRLARAEAITARKSSVLVCLVETEEQDAYYSEVLCFLQDKKMFKSVVKFGPWKAVLDNSDLMHCLEMDIKAQGYKVFSKFYLTYPTKRNEFHFNIYSFTFTWW

SEQ ID NO: 876225 - protein, 258 aa, Homo sapiens; identical to SEQ ID NO: 876224

SEQ ID NO: 876226 - protein, 77 aa, Homo sapiens
MPFNCLLIGFCSSFLLLLLPYCPSLVLSGNRSSCWFSEKSQPEVKFKCRIWLLVLILIWRKPAEMLVWLYMVINFYL

SEQ ID NO: 876227 - protein, 167 aa, Homo sapiens
MLHIGTLDKVREEWQSEHIKACEAFEAQECERINFFRNALWLHVNQLSQQCVTSDENWVKPPGAKKKPPPKKKGGLFPPPMYEQVRKSLEMCSIQRDIEYFVNQRKTGQIPPAPIMYENFYSSQKNAVPAGKATGPNLARRGPLPIPKSSPDDPNYSLVDDYSLLYQ

SEQ ID NO: 876228 - protein, 233 aa, Homo sapiens
ARKMEEFREKQKLQRKKTELIMDAIHKQKSLQFKKTMDAKKNYEQKCRDKDEAEQAVSRSANLVNPKQQEKLFVKLATSKTAVEDSDKAYMLHIGTLDKVREEWQSEHIKACEAFEAQECERINFFRNALWLHVNQLSQQCVTSDEMYEQVRKSLEMCSIQRDIEYFVNQRKTGQIPPAPIMYENFYSSQKNAVPAGKATGPNLARRGPLPIPKSSPDDPNYSLVDDYSLLYQ

SEQ ID NO: 876229 - protein, 233 aa, Homo sapiens; identical to SEQ ID NO: 876228

SEQ ID NO: 876230 - protein, 285 aa, Homo sapiens
VPGDYSKRVYQGVRVKHTVKDLLAEKRSGQTSNSRLNGSVSSSQSPFVQMPGSPVTSGYYGVRRSFLSDSDFHNSKQFSNDVYTSSVGKPFPCESSAGQSHAALLEPYFPQEPYGDYRPPALTPNAGSLFSASPLPPLLPPPFPGDPAHFLFRDSWEQTLPDGLSQPDPVSADALLTLPPSTSCLSQLESGSIAQHRGSSWGSSLAGAQSYSLHALEDLHHTPGYPTPPPYPFTPFMTVSNDLPPKVGPLSPDEEADTGSLHDPSPWVKEDGSIAWGSYECRRAY

SEQ ID NO: 876231 - protein, 305 aa, Homo sapiens
RPPADITWSLADPAEAAVPAGSRLLLPAVGPGHAGTYACLAANPRTGRRRRSLLNLTVADLPPGAPQCSVEGGPGDRSLRFRCSWPGGAPAASLQFQVSPKASAPGQCPLCCWRPSPPTPGSAASPSPALLATWWPRVPAQSRRRPPREVLLHPLVAETQLGEAEVALEASGCPPPSRASWAREGRPLAPGGGSRLRLSQDGRKLHIGNFSLDWDLGNYSVLCSGALGAGGDQITLIGPSISSWRLQRARDAAVLTWDVERGALISSFEIQAWPDGPALGQDFHLQGLGLPAHPGASGAVSRGAP

SEQ ID NO: 876232 - protein, 215 aa, Homo sapiens
RGWRRNEKGTPSSFSPFSPQTCPPGPHSAQLKGVPGTAASASAARGPAGPLLPPCSSRSPRRHPRRASVLCAAGGRPRPPPAQRRPHHLPCSPPGGHAYLHSHAGGPPERCCCIRWWQRHSWGRQRWHWRPLVVPHPHGHPGPGKGGPWLQEAGVACGSVKMGGNSTSATSAWIGTWEITPCCAVGRWVLAVTRSPSLDPPYPRGGFREPEMQPC

SEQ ID NO: 876233 - protein, 196 aa, Homo sapiens
MTCPPGPHSAQLKGVPGTAASASAARGPAGPLLPPCSSRSPRRHPRRASVLCAAGGRPRPPPAQRRPHHLPCSPPGGHAYLHSHAGGPPERCCCIRWWQRHSWGRQRWHWRPLVVPHPHGHPGPGKGGPWLQEAGVACGSVKMGGNSTSATSAWIGTWEITPCCAVGRWVLAVTRSPSLDPPYPRGGFREPEMQPC

SEQ ID NO: 876234 - protein, 116 aa, Homo sapiens
MAPPSVPLVLLLVLLLSLAETPASAPAHRGRGGWTLNSAGYLLGPVLHLPQMGDQDGKRETALEILDLWKAIDGLPYSHPPQPSKRNVMETFAKPEIGDLGMLSMKIPKEEDVLKS

SEQ ID NO: 876235 - protein, 103 aa, Homo sapiens
TSAFLSAKLELGSPAPRTLRASPNSKPFCKGDGLAHPRLSSSSSLAGSLSRKRAWSSPPCSPQAVPDPEAQRHKRTSVEPRGAGCSLGAPAGSRCGQAVPNSG

SEQ ID NO: 876236 - protein, 780 aa, Homo sapiens
MTESASSTSGQEFDVFSVMDWKDGVGTLPGSDLKFRVNEFGALEVITDENEMENVKKATATTTWMVPTAQEAPTSPPSSRPVFPPAYWTSPPGCPTVFSEKTGMPFRLKDPVKVEGLQFCENCCQYGNVDECLSGGNYCSQNCARHIKDKDQKEERDVEEDNEEEDPKCSRKKKPKLSLKADTKEDGEERDDEMENKQDVRILRGSQRARRKRRGDSAVLKQGLPPKGKKAWCWASYLEEEKAVAVPAKLFKEHQSFPYNKNGFKVGMKLEGVDPEHQSVYCVLTVAEVCGYRIKLHFDGYSDCYDFWVNADALDIHPVGWCEKTGHKLHPPKGYKEEEFNWQTYLKTCKAQAAPKSLFENQNITVIPSGFRVGMKLEAVDKKNPSFICVATVTDMVDNRFLVHFDNWDESYDYWCEASSPHIHPVGWCKEHRRTLITPPGYPNVKHFSWDKYLEETNSLPAPARAFKVKPPHGFQKKMKLEVVDKRNPMFIRVATVADTDDHRVKVHFDGWNNCYDYWIDADSPDIHPVGWCSKTGHPLQPPLSPLELMEASEHGGCSTPGCKGIGHFKRARHLGPHSAANCPYSEINLNKDRIFPDRLSGEMPPASPSFPRNKRTDANESSSSPEIRDQHADDVKEDFEERTESEMRTSHEARGAREEPTVQQAQRRSAVFLSFKSPIPCLPLRWEQQSKLLPTVAGIPASKVSKWSTDEVSEFIQSLPGCEEHGKVFKDEQIDGEAFLLMTQTDIVKIMSIKLGPALKIFNSILMFKAAEKNSHNEL

SEQ ID NO: 876237 - protein, 211 aa, Homo sapiens
MTTLTRQDLNFGQVVADVLCEFLEVAVHLILYVREVYPVGIFQKRKKYNVPVQMSCHPELNQYIQDTLHCVKPLLEKNDVEKVVVVILDKEHRPVEKFVFEITQPPLLSISSDSLLSHVEQLLRAFILKISVCDAVLDHNPPGCTFTVLVHTREAATRNMEKIQVIKDFPWILADEQDVHMHDPRLIPLKTMTSDILKMQLYVEERAHKGS

SEQ ID NO: 876238 - protein, 148 aa, Homo sapiens
GRVGRPTRPPLLEKNDVEKVVVVILDKEHRPVEKFVFEITQPPLLSISSDSLLSHVEQLLRAFILKISVCDAVLDHNPPGCTFTVLVHTREAATRNMEKIQVIKDFPWILADEQDVHMHDPRLIPLKTMTSDILKMQLYVEERAHKGS

SEQ ID NO: 876239 - protein, 211 aa, Homo sapiens; identical to SEQ ID NO: 876237

SEQ ID NO: 876240 - protein, 284 aa, Homo sapiens
PPAEGQPRGRARRAPGQRALASCALSSGPAPQRPRRRRREGAGQTKEADKGGRSPAAVRAPGEAGPLLPVAGRMTTLTRQDLNFGQVVADVLCEFLEVAVHLILYVREVYPVGIFQKRKKYNVPVQMSCHPELNQYIQDTLHCVKPLLEKNDVEKVVVVILDKEHRPVEKFVFEITQPPLLSISSDSLLSHVEQLLRAFILKISVCDAVLDHNPPGCTFTVLVHTREAATRNMEKIQVIKDFPWILADEQDVHMHDPRLIPLKTMTSDILKMQLYVEERAHKGS

SEQ ID NO: 876241 - protein, 206 aa, Homo sapiens
FFFPFCPQVVADVLCEFLEVAVHLILYVREVYPVGIFQKRKKYNVPVQMSCHPELNQYIQDTLHCVKPLLEKNDVEKVVVVILDKEHRPVEKFVFEITQPPLLSISSDSLLSHVEQLLRAFILKISVCDAVLDHNPPGCTFTVLVHTREAATRNMEKIQVIKDFPWILADEQDVHMHDPRLIPLKTMTSDILKMQLYVEERAHKGS

SEQ ID NO: 876242 - protein, 128 aa, Homo sapiens
MTTLTRQDLNFGQVVADVLCEFLEVAVHLILYVREVYPVGIFQKRKKYNVPVQMSCHPELNQYIQDTLHCVKPLLEKNDVEKVVVVILDKEHRPVEKFVFEITQPPLLSISSDSLLSHVEPSHSFSTP

SEQ ID NO: 876243 - protein, 276 aa, Homo sapiens [sequence omitted]

SEQ ID NO: 876244 - protein, 211 aa, Homo sapiens; identical to SEQ ID NO: 876237

SEQ ID NO: 876245 - protein, 211 aa, Homo sapiens; identical to SEQ ID NO: 876237

SEQ ID NO: 876246 - protein, 241 aa, Homo sapiens
MTTLTRQDLNFGQGREAGPAGPGAGASGPAGFLERATGLCPPAVVADVLCEFLEVAVHLILYVREVYPVGIFQKRKKYNVPVQMSCHPELNQYIQDTLHCVKPLLEKNDVEKVVVVILDKEHRPVEKFVFEITQPPLLSISSDSLLSHVEQLLRAFILKISVCDAVLDHNPPGCTFTVLVHTREAATRNMEKIQVIKDFPWILADEQDVHMHDPRLIPLKTMTSDILKMQLYVEERAHKGS

SEQ ID NO: 876247 - protein, 224 aa, Homo sapiens
MTTLTRQDLNFGQVVADVLCEFLEVAVHLILYVREVYPVGIFQKRKKYNVPVQMSCHPELNQYIQDTLHCVKPLLEKNDVEKVVVVILDKEHRPVEKFVFEITQPPLLSIRWAAPAPRPLAGISSDSLLSHVEQLLRAFILKISVCDAVLDHNPPGCTFTVLVHTREAATRNMEKIQVIKDFPWILADEQDVHMHDPRLIPLKTMTSDILKMQLYVEERAHKGS

SEQ ID NO: 876248 - protein, 120 aa, Homo sapiens
PKYAGNKEHNECNGTSHFNSNIECKWPKCSTKRYRTAEWIRTNQSTICYLQETHLTHKDSHKLKVKGWKKAFHANGHQKQAGAAILISDKTNFKATVVKRDKEGHYITVNGWSNRKTSQP

SEQ ID NO: 876249 - protein, 188 aa, Homo sapiens
MMTSPKALLFFIWLASETQGSAQRRLAPASRDPSGRHLCCQAVQVLSFPGPLFRELCAQLPHLHCALGIARSQELSLLAVELQTVDRAFILGLLDQNCGFLGAFLEIKQLHVTFPRGSCKNQGPHWGPAHSKQILEGELQRSQGRGLQHGVQVDMPVSPSAQEEIPVEGGTAHRVDGTAVGGEGKLCW

SEQ ID NO: 876250 - protein, 118 aa, Homo sapiens
MWASSWSLSVDAERLHAGWRVDVAPAELRVDVGIIVVVEHGHLRAFTQDGGWMWHLLNRGWMWASSWLLRVDTESLHTGWWVDVAPAEQRVDVGIIVVIECGCPPDPVALLDREVLHR

SEQ ID NO: 876251 - protein, 87 aa, Homo sapiens
GTASDLEGFSAQDVKIKVPPTHATHATLTHAAHERPQNTRSCPTSTLLKSKSSPSCGTRACCLLHPSPQGPLPSPRCCRADGDPGTE

SEQ ID NO: 876252 - protein, 147 aa, Homo sapiens
FCVPKLQDQAAETIEALHAAGLKVWVLTGDKMETAKSTCYACRLFQTNTELLELTTKTIEESERKEDRLHELLIEYRKKLLHEFPKSTRSFKKAWTEHQEYGLIIDGSTLSLILNSSQDSSSNNYKSIFLQICMKCTAVLCCRMAPL

SEQ ID NO: 876253 - protein, 90 aa, Homo sapiens
LLCLLAEAEHNQEMSGRSLLRISSKLQLWLSKFLCDCMKVICWGADEQHGQMPWSPAHPGLSFSPLKNSLCCSHENRLHLREHHLSRFVG

SEQ ID NO: 876254 - protein, 1045 aa, Homo sapiens
MGSQPPLGSPLSREEGEAPPPAPASEGRRRSRRVRLRGSCRHRPSFLGCRELAASAPARPAPASSEIMASAAKEFKMDNFSPKAGTSKLQQTVPADASPDSKCPICLDRFDNVSYLDRCLHKFCFRCVQEWSKNKAECPLCKQPFDSIFHSVRAEDDFKEYVLRPSYNGSFVTPDRRFRYRTTLTRERNASVYSPSGPVNRRTTTPPDSGVLFEGLGISTRPRDVEIPQFMRQIAVRRPTTADERSLRKIQEQDIINFRRTLYRAGARVRNIEDGGRYRDISAEFFRRNPACLHRLVPWLKRELTVLFGAHGSLVNIVQHIIMSNVTRYDLESQAFVSDLRPFLLNRTEHFIHEFISFARSPFNMAAFDQHANYDCPAPSYEEGSHSDSSVITISPDEAETQELDINVATVSQAPWDDETPGPSYSSSEQVHVTMSSLLNTSDSSDEELVTGGATSQIQGVQTNDDLNNDSDDSSDNCVIVGFVKPLAERTPELVELSSDSEDLGSYEKMETVKTQEQEQSYSSGDSDVSRCSSPHSVLGKDEQINKGHCDSSTRIKSKKEEKRSTSLSSPRNLNSSVRGDRVYSPYNHRHRKRGRSRSSDSRSQSRSGHDQKNHRKHHGKKRMKSKRSRSRESSRPRGRRDKKRSRTRDSSWSRRSQTLSLSSESTSRSRSRSSDHGKRRSRSRNRDRYYLRNNYGSRYKWEYTYYSRNKDRDGYESSYRRRTLSRAHYSRQSSSPEFRVQSFSERTNARKKNNHSERKYYYYERHRSRSLSSNRSRTASTGTDRVRNEKPGGKRKYKTRHLEGTNEVAQPSREFASKAKDSHYQKSSSKLDGNYKNESDTFSDSRSSDRETKHKRRKRKTRSLSVEIVYEGKATDTTKHHKKKKKKHKKKHKKHHGDNASRSPVVITIDSDSDKDSEVKEDTECDNSGPQDPLQNEFLAPSLEPFETKDVVTIEAEFGVLDKECDIATLSNNLNNANKTVDNIPPLAASVEQTLDVREESTFVSDLENQPSNIVSLQTEPSRQLPSPRTSLMSVCLGRDCDMS

SEQ ID NO: 876255 - protein, 978 aa, Homo sapiens [sequence omitted]

SEQ ID NO: 876256 - protein, 1045 aa, Homo sapiens; identical to SEQ ID NO: 876254

SEQ ID NO: 876257 - protein, 669 aa, Homo sapiens
MGSQPPLGSPLSREEGEAPPPAPASEGRRRSRRVRLRGSCRHRPSFLGCRELAASAPARPAPASSEIMASAAKEFKMDNFSPKAGTSKLQQTVPADASPDSKCPICLDRFDNVSYLDRCLHKFCFRCVQEWSKNKAECPLCKQPFDSIFHSVRAEDDFKEYVLRPSYNGSFVTPDRRFRYRTTLTRERNASVYSPSGPVNRRTTTPPDSGVLFEGLGISTRPRDVEIPQFMRQIAVRRPTTADERSLRKIQEQDIINFRRTLYRAGARVRNIEDGGRYRDISAEFFRRNPACLHRLVPWLKRELTVLFGAHGSLVNIVQHIIMSNVTRYDLESQAFVSDLRPFLLNRTEHFIHEFISFARSPFNMAAFDQHANYDCPAPSYEEGSHSDSSVITISPDEAETQELDINVATVSQAPWDDETPGPSYSSSEQVHVTMSSLLNTSDSSDEELVTGGATSQIQGVQTNDDLNNDSDDSSDNCVIVGFVKPLAERTPELVELSSDSEDLGSYEKMETVKTQEQEQSYSSGDSDVSRCSSPHSVLGKDEQINKGHCDSSTRIKSKKEEKRSTSLSSPRNLNSSVRGDRVYSPYNHRHRKRGRSRSSDSRSQSRSGHDQKNHRKHHGKKRMKSKRSRSRESSRPRGVSVLPVEGVQPGSWHLEQRIGQTHIQARKE

SEQ ID NO: 876258 - protein, 107 aa, Homo sapiens
MGSQPPLGSPLSREEGEAPPPAPASEGRRRSRRVRLRGSCRHRPSFLGCRELAASAPARPAPASSEKRCSIFRLRKTTRAQWRLPHFFSSSCWSSRRKAGSVAFWMP

SEQ ID NO: 876259 - protein, 1045 aa, Homo sapiens; identical to SEQ ID NO: 876254

SEQ ID NO: 876260 - protein, 581 aa, Homo sapiens
PTFRVEVGMIRRIIESIMGRKERKVNDPELVELSSDSEDLGSYEKMETVKTQEQEQSYSSGDSDVSRCSSPHSVLGKDEQINKGHCDSSTRIKSKKEEKRSTSLSSPRNLNSSVRGDRVYSPYNHRHRKRGRSRSSDSRSQSRSGHDQKNHRKHHGKKRMKSKRSRSRESSRPRGRRDKKRSRTRDSSWSRRSQTLSLSSESTSRSRSRSSDHGKRRSRSRNRDRYYLRNNYGSRYKWEYTYYSRNKDRDGYESSYRRRTLSRAHYSRQSSSPEFRVQSFSERTNARKKNNHSERKYYYYERHRSRSLSSNRSRTASTGTDRVRNEKPGGKRKYKTRHLEGTNEVAQPSREFASKAKDSHYQKSSSKLDGNYKNESDTFSDSRSSDRETKHKRRKRKTRSLSVEIVYEGKATDTTKHHKKKKKKHKKKHKKHHGDNASRSPVVITIDSDSDKDSEVKEDTECDNSGPQDPLQNEFLAPSLEPFETKDVVTIEAEFGVLDKECDIATLSNNLNNANKTVDNIPPLAASVEQTLDVREESTFVSDLENQPSNIVSLQTEPSRQLPSPRTSLMSVCLGRDCDMS

SEQ ID NO: 876261 - protein, 46 aa, Homo sapiens
MAVTTFRRNIPIKTQQIWKTEHMKQKYLKIFRNLENLNYILRHRMS

SEQ ID NO: 876262 - protein, 36 aa, Homo sapiens
DASKRTLQMSLLTGGLCDCRRKGPSRTHHLPPEAPP

SEQ ID NO: 876263 - protein, 191 aa, Homo sapiens
TGLSPGAESIAGDRRGREEVASMAPASSSHAAPSPGHGASLGVRDQGVQSELLYLTKERPLLFTRATALLPQDLFILPVLGLSICKLEVLRAGKGGCEEGFGQLLLLSEVASSSRHGGLSTTGLLGYLPLICSLVRALVNRQARGAGTRRGLQRVQYQIFQTQHLCPGVSKLSSALGFIHTVKLPVYANDM

SEQ ID NO: 876264 - protein, 251 aa, Homo sapiens
SLGPPWESGRRAVGSQNRDPGPSPLLPHHVPCQDQFEVLERHTQWGLDLLDRYVKFVKERTEVEQAYAKQLRSLVKKYLPKRPAKDDPESKFSQQQSFVQILQEVNDFAGQRELVAENLSVRVCLELTKYSQEMKQERKMHFQEGRRAQQQLENGFKQLENSKRKFERDCREAEKAAQTAERLDQDINATKADVEKAKAASPPSESHGRRKQKRICGSTAALQPRPSPISIFHRLPQIFDEAPDMMNAGHP

SEQ ID NO: 876265 - protein, 249 aa, Homo sapiens
KEFGTGGGDRGAVVAAAAAAGASMDWGTELWDQFEVLERHTQWGLDLLDRYVKFVKERTEVEQAYAKQLRSLVKKYLPKRPAKDDPESKFSQQQSFVQILQEVNDFAGQRELVAENLSVRVCLELTKYSQEMKQERKMHFQEGRRAQQQLENGFKQLENSKRTFERDCREAEKAAQTAERLDQDINATKADVEKAKAASPPSESHGRRKQKRICGSTAALQPRPSPISIFHRLPQIFDKAPDMMNAGHP

SEQ ID NO: 876266 - protein, 140 aa, Homo sapiens
KEFGTGGGDRGAVVAAAAAAGASMDWGTELWDQFEVLERHTQWGLDLLDRYVKFVKERTEVEQAYAKQLRSLVKKYLPKRPAKDDPESKFSQQQSFVQILQEVNDFAGQRELVAENLSVRVCLELTKYSQELCLLPSFHH

SEQ ID NO: 876267 - protein, 101 aa, Homo sapiens
SHVSSHPYKLGPQWRGVAGPQRPEPHKLTHPPPGLPLPVPPADGLLGDPGARSPQYCPRSERGRWMHQQHQGIGLTPKTLPTPAPNPNQKIAPKKGMSSQK

SEQ ID NO: 876268 - protein, 101 aa, Homo sapiens
SRQGGTRALASPADPAIVSLRASERTEAYARAGRPAGGNREWGPSPCSVWTQRESIWVRLVQGEAVRSVHKGQGSRGHKSLGLRPYGASGKPPIRSLGALI

SEQ ID NO: 876269 - protein, 59 aa, Homo sapiens
VSYVRPAEPAFLARFKERVGYREGPTVETKRIQPQPPDEDGDHSDKEDEQPQVVVLKKG

SEQ ID NO: 876270 - protein, 556 aa, Homo sapiens
MSTMVYIKEDKLEKLTQDEIISKTKQVIQGLEALKNEHNSILQSLLETLKCLKKDDESNLVEEKSNMIRKSLEMLELGLSEAQVMMALSNHLNAVESEKQKLRAQVRRLCQENQWLRDELANTQQKLQKSEQSVAQLEEEKKHLEFMNQLKKYDDDISPSEDKDTDSTKEPLDDLFPNDEDDPGQGIQQQHSSAAAAAQQGGYEIPARLRTLHNLVIQYASQGRYEVAVPLCKQALEDLEKTSGHDHPDVATMLNILALVYRDQNKYKDAANLLNDALAIREKTLGKDHPAVAATLNNLAVLYGKRGKYKEAEPLCKRALEIREKVLGKDHPDVAKQLNNLALLCQNQGKYEEVEYYYQRALEIYQTKLGPDDPNVAKTKNNLASCYLKQGKFKQAETLYKEILTRAHEREFGSVDDENKPIWMHAEEREECKGKQKDGTSFGEYGGWYKACKVDSPTVTTTLKNLGALYRRQGKFEAAETLEEAAMRSRKQGLDNVHKQRVAEVLNDPENMEKRRSRESLNVDVVKYESGPDGGEEVSMSVEWNGMRKMKLGLVN

SEQ ID NO: 876271 - protein, 133 aa, Homo sapiens
VSPSPPHRSAATSPLLQWPRTRYSDHPNLATVPPKPARGGHDLFRRSARQGPDALQALLRRVRPGLPLPRRGALWETTWGSGWGCRLRHPQGQCLPCIQALALCSELAWPGQGVETALCPPAPRRASRGGPPQ

SEQ ID NO: 876272 - protein, 202 aa, Homo sapiens
VVPSSVKTHRATSHILYPRWSPGSASQLHHLCLSAGRQLCWGLLKQPLSVLPFFSHCSHVKISTRFEDTKFLPRIIGEWNIWLEIDEFLFLKNDNKGWTRWLMPVIPGLWEAEAGGSLEARSSRPAWPTWRKLVCAKKTKISQAWSCAPVIPVTQEAEAGNCLNPVGGGCIEPRSCHCTPAWVTEPESVSNYTSKTTRICQK

SEQ ID NO: 876273 - protein, 133 aa, Homo sapiens; identical to SEQ ID NO: 876271

SEQ ID NO: 876274 - protein, 556 aa, Homo sapiens; identical to SEQ ID NO: 876270

SEQ ID NO: 876275 - protein, 556 aa, Homo sapiens; identical to SEQ ID NO: 876270

SEQ ID NO: 876276 - protein, 538 aa, Homo sapiens
MSTMVYIKEDKLEKLTQDEIISKTKQVIQGLEALKNEHNSILQSLLETLKCLKKDDESNLVEEKSNMIRKSLEMLELGLSEAQVMMALSNHLNAVESEKQKLRAQVRRLCQENQWLRDELANTQQKLQKSEQSVAQLEEEKKHLEFMNQLKKYDDDISPSEDKDTDSTKEPLDDLFPNDEDDPGQGIQQQHSSAAAAAQQGGYEIPARLRTLHNLVIQYASQGRYEVAVPLCKQALEDLEKTSGHDHPDVATMLNILALVYRDQNKYKDAANLLNDALAIREKTLGKDHPAVAATLNNLAVLYGKRGKYKEAEPLCKRALEIREKVLGKDHPDVAKQLNNLALLCQNQGKYEEVEYYYQRALEIYQTKLGPDDPNVAKTKNNLASCYLKQGKFKQAETLYKEILTRAHEREFGSVDDENKPIWMHAEEREECKGKQKDGTSFGEYGGWYKACKVDSPTVTTTLKNLGALYRRQGKFEAAETLEEAAMRSRKQGLDNVHKQRVAEVLNDPENMEKRRSRESLNVDVVKYESGPDGGEEA

SEQ ID NO: 876277 - protein, 562 aa, Homo sapiens
MSTMVYIKEDKLEKLTQDEIISKTKQVIQGLEALKNEHNSILQSLLETLKCLKKDDESNLVEEKSNMIRKSLEMLELGLSEAQVMMALSNHLNAVESEKQKLRAQVRRLCQENQWLRDELANTQQKLQKSEQSVAQLEEEKKHLEFMNQLKKYDDDISPSEDKDTDSTKEPLDDLFPNDEDDPGQGIQQQHSSAAAAAQQGGYEIPARLRTLHNLVIQYASQGRYEVAVPLCKQALEDLEKTSGHDHPDVATMLNILALVYRDQNKYKDAANLLNDALAIREKTLGKDHPAVAATLNNLAVLYGKRGKYKEAEPLCKRALEIREKVLGKDHPDVAKQLNNLALLCQNQGKYEEVEYYYQRALEIYQTKLGPDDPNVAKTKNNLASCYLKQGKFKQAETLYKEILTRAHEREFGSVDDENKPIWMHAEEREECKGKQKDGTSFGEYGGWYKACKVDSPTVTTTLKNLGALYRRQGKFEAAETLEEAAMRSRKQRSISEIPKKILSANGSNHFPLPGSQVLTMFTNRGWQKCSMTLRTWRSAGAVRASTWTWSSTRVALTEGRK

SEQ ID NO: 876278 - protein, 635 aa, Homo sapiens
MSTMVYIKEDKLEKLTQDEIISKTKQVIQGLEALKNEHNSILQSLLETLKCLKKDDESNLVEEKSNMIRKSLEMLELGLSEAQVMMALSNHLNAVESEKQKLRAQVRRLCQENQWLRDELANTQQKLQKSEQSVAQLEEEKKHLEFMNQLKKYDDDISPSEDKDTDSTKEPLDDLFPNDEDDPGQGIQQQHSSAAAAAQQGGYEIPARLRTLHNLVIQYASQGRYEVAVPLCKQALEDLEKTSGHDHPDVATMLNILALVYRDQNKYKDAANLLNDALAIREKTLGKDHPAVAATLNNLAVLYGKRGKYKEAEPLCKRALEIREKVLGKDHPDVAKQLNNLALLCQNQGKYEEVEYYYQRALEIYQTKLGPDDPNVAKTKNNLASCYLKQGKFKQAETLYKEILTRAHEREFGSVDDENKPIWMHAEEREECKGKQKDGTSFGEYGGWYKACKVDSPTVTTTLKNLGALYRRQGKFEAAETLEEAAMRSRKQGLDNVHKQRVAEVLNDPENMEKRRSRESLNVDVVKYESGPDGGEEVSMSVEWNGDGTGSLKRSGSFSKLRASIRRSSEKLVRKLKGGSSRESEPKNPGMKRASSLNVLNVGGKAAEDRFQGVSGRASFCGKRQQQQWPGRRHR

SEQ ID NO: 876279 - protein, 560 aa, Homo sapiens
MSTMVYIKEDKLEKLTQDEIISKTKQVIQGLEALKNEHNSILQSLLETLKCLKKDDESNLVEEKSNMIRKSLEMLELGLSEAQVMMALSNHLNAVESEKQKLRAQVRRLCQENQWLRDELANTQQKLQKSEQSVAQLEEEKKHLEFMNQLKKYDDDISPSEDKDTDSTKEPLDDLFPNDEDDPGQGIQQQHSSAAAAAQQGGYEIPARLRTLHNLVIQYASQGRYEVAVPLCKQALEDLEKTSGHDHPDVATMLNILALVYRDQNKYKDAANLLNDALAIREKTLGKDHPAVAATLNNLAVLYGKRGKYKEAEPLCKRALEIREKVLGKDHPDVAKQLNNLALLCQNQGKYEEVEYYYQRALEIYQTKLGPDDPNVAKTKNNLASCYLKQGKFKQAETLYKEILTRAHEREFGSVDDENKPIWMHAEEREECKGKQKDGTSFGEYGGWYKACKVDSPTVTTTLKNLGALYRRQGKFEAAETLEEAAMRSRKQGLDNVHKQRVAEVLNDPENMEKRRSRESLNVDVVKYESGPDGGEEGVSGRASFCGKRQQQQWPGRRHR

SEQ ID NO: 876280 - protein, 547 aa, Homo sapiens
MSTMVYIKEDKLEKLTQDEIISKTKQVIQGLEALKNEHNSILQSLLETLKCLKKDDESNLVEEKSNMIRKSLEMLELGLSEAQVMMALSNHLNAVESEKQKLRAQVRRLCQENQWLRDELANTQQKLQKSEQSVAQLEEEKKHLEFMNQLKKYDDDISPSEDKDTDSTKEPLDDLFPNDEDDPGQGIQQQHSSAAAAAQQGGYEIPARLRTLHNLVIQYASQGRYEVAVPLCKQALEDLEKTSGHDHPDVATMLNILALVYRDQNKYKDAANLLNDALAIREKTLGKDHPAVAATLNNLAVLYGKRGKYKEAEPLCKRALEIREKVLGKDHPDVAKQLNNLALLCQNQGKYEEVEYYYQRALEIYQTKLGPDDPNVAKTKNNLASCYLKQGKFKQAETLYKEILTRAHEREFGSVDDENKPIWMHAEEREECKGKQKDGTSFGEYGGWYKACKVDSPTVTTTLKNLGALYRRQGKFEAAETLEEAAMRSRKQGLDNVHKQRVAEVLNDPENMEKRRSRESLNVDVVKYESGPDGGEEMRKMKLGLVN

SEQ ID NO: 876281 - protein, 556 aa, Homo sapiens; identical to SEQ ID NO: 876270

SEQ ID NO: 876282 - protein, 590 aa, Homo sapiens
MSTMVYIKEDKLEKLTQDEIISKTKQVIQGLEALKNEHNSILQSLLETLKCLKKDDESNLVEEKSNMIRKSLEMLELGLSEAQVMMALSNHLNAVESEKQKLRAQVRRLCQENQWLRDELANTQQKLQKSEQSVAQLEEEKKHLEFMNQLKKYDDDISPSEDKDTDSTKEPLDDLFPNDEDDPGQGIQQQHSSAAAAAQQGGYEIPARLRTLHNLVIQYASQGRYEVAVPLCKQALEDLEKTSGHDHPDVATMLNILALVYRDQNKYKDAANLLNDALAIREKTLGKDHPAVAATLNNLAVLYGKRGKYKEAEPLCKRALEIREKVLGKDHPDVAKQLNNLALLCQNQGKYEEVEYYYQRALEIYQTKLGPDDPNVAKTKNNLASCYLKQGKFKQAETLYKEILTRAHEREFGSVDDENKPIWMHAEEREECKGKQKDGTSFGEYGGWYKACKVDSPTVTTTLKNLGALYRRQGKFEAAETLEEAAMRSRKQGLDNVHKQRVAEVLNDPENMEKRRSRESLNVDVVKYESGPDGGEEVSMSVEWNGDGTGSLKRSGSFSKLRASIRRSSEKLVRKLKGGSSRESEPKNPG

SEQ ID NO: 876283 - protein, 621 aa, Homo sapiens
MSTMVYIKEDKLEKLTQDEIISKTKQVIQGLEALKNEHNSILQSLLETLKCLKKDDESNLVEEKSNMIRKSLEMLELGLSEAQVMMALSNHLNAVESEKQKLRAQVRRLCQENQWLRDELANTQQKLQKSEQSVAQLEEEKKHLEFMNQLKKYDDDISPSEDKDTDSTKEPLDDLFPNDEDDPGQGIQQQHSSAAAAAQQGGYEIPARLRTLHNLVIQYASQGRYEVAVPLCKQALEDLEKTSGHDHPDVATMLNILALVYRDQNKYKDAANLLNDALAIREKTLGKDHPAVAATLNNLAVLYGKRGKYKEAEPLCKRALEIREKVLGKDHPDVAKQLNNLALLCQNQGKYEEVEYYYQRALEIYQTKLGPDDPNVAKTKNNLASCYLKQGKFKQAETLYKEILTRAHEREFGSVDDENKPIWMHAEEREECKGKQKDGTSFGEYGGWYKACKVDSPTVTTTLKNLGALYRRQGKFEAAETLEEAAMRSRKQGLDNVHKQRVAEVLNDPENMEKRRSRESLNVDVVKYESGPDGGEEVSMSVEWNGDGTGSLKRSGSFSKLRASIRRSSEKLVRKLKGGSSRESEPKNPGMKRASSLNVLNVGGKAAEDRFQVRSLPRIVS

SEQ ID NO: 876284 - protein, 621 aa, Homo sapiens; identical to SEQ ID NO: 876283

SEQ ID NO: 876285 - protein, 635 aa, Homo sapiens
MSTMVYIKEDKLEKLTQDEIISKTKQVIQGLEALKNEHNSILQSLLETLKCLKKDDESNLVEEKSNMIRKSLEMLELGLSEAQVMMALSNHLNAVESEKQKLRAQVRRLCQENQWLRDELANTQQKLQKSEQSVAQLEEEKKHLEFMNQLKKYDDDISPSEDKDTDSTKEPLDDLFPNDEDDPGQGIQQQHSSAAAAAQQGGYEIPARLRTLHNLVIQYASQGRYEVAVPLCKQALEDLEKTSGHDHPDVATMLNILALVYRDQNKYKDAANLLNDALAIREKTLGKDHPAVAATLNNLAVLYGKRGKYKEAEPLCKRALEIREKVLGKDHPDVAKQLNNLALLCQNQGKYEEVEYYYQRALEIYQTKLGPDDPNVAKTKNNLASCYLKQGKFKQAETLYKEILTRAHEREFGSVDDENKPIWMHAEEREECKGKQKDGTSFGEYGGWYKACKVDSPTVTTTLKNLGALYRRQGKFEAAETLEEAAMRSRKQGLDNVHKQRVAEVLNDPENMEKRRSRESLNVDVVKYESGPDGGEEVSMSVEWNGGGDFEYPAVLYGKRGKYKEAEPLCKRALEIREKVLGKDHPDVAKQLNNLALLCQNLGKYEEVEYYYQRALEIYQTKLGPDDPNVARGVC

SEQ ID NO: 876286 - protein, 626 aa, Homo sapiens
MSTMVYIKEDKLEKLTQDEIISKTKQVIQGLEALKNEHNSILQSLLETLKCLKKDDESNLVEEKSNMIRKSLEMLELGLSEAQVMMALSNHLNAVESEKQKLRAQVRRLCQENQWLRDELANTQQKLQKSEQSVAQLEEEKKHLEFMNQLKKYDDDISPSEDKDTDSTKEPLDDLFPNDEDDPGQGIQQQHSSAAAAAQQGGYEIPARLRTLHNLVIQYASQGRYEVAVPLCKQALEDLEKTSGHDHPDVATMLNILALVYRDQNKYKDAANLLNDALAIREKTLGKDHPAVAATLNNLAVLYGKRGKYKEAEPLCKRALEIREKVLGKDHPDVAKQLNNLALLCQNQGKYEEVEYYYQRALEIYQTKLGPDDPNVAKTKNNLASCYLKQGKFKQAETLYKEILTRAHEREFGSVDDENKPIWMHAEEREECKGKQKDGTSFGEYGGWYKACKVDSPTVTTTLKNLGALYRRQGKFEAAETLEEAAMRSRKQGLDNVHKQRVAEVLNDPENMEKRRSRESLNVDVVKYESGPDGGEEDGTGSLKRSGSFSKLRASIRRSSEKLVRKLKGGSSRESEPKNPGMKRASSLNVLNVGGKAAEDRFQGVSGRASFCGKRQQQQWPGRRHR

SEQ ID NO: 876287 - protein, 565 aa, Homo sapiens
MYDNMSTMVYIKEDKLEKLTQDEIISKTKQVIQGLEALKNEHNSILQSLLETLKCLKKDDESNLVEEKSNMIRKSLEMLELGLSEAQVMMALSNHLNAVESEKQKLRAQVRRLCQENQWLRDELANTQQKLQKSEQSVAQLEEEKKHLEFMNQLKKYDDDISPSEDKDTDSTKEPLDDLFPNDEDDPGQGIQQQHSSAAAAAQQGGYEIPARLRTLHNLVIQYASQGRYEVAVPLCKQALEDLEKTSGHDHPDVATMLNILALVYRDQNKYKDAANLLNDALAIREKTLGKDHPAVAATLNNLAVLYGKRGKYKEAEPLCKRALEIREKVLGKDHPDVAKQLNNLALLCQNQGKYEEVEYYYQRALEIYQTKLGPDDPNVAKTKNNLASCYLKQGKFKQAETLYKEILTRAHEREFGSVDDENKPIWMHAEEREECKGKQKDGTSFGEYGGWYKACKVDSPTVTTTLKNLGALYRRQGKFEAAETLEEAAMRSRKQRVAEVLNDPENMEKRRSRESLNVDVVKYESGPDGGEEVSMSVEWNGGVSGRASFCGKRQQQQWPGRRHR

SEQ ID NO: 876288 - protein, 459 aa, Homo sapiens
MSTMVYIKEDKLEKLTQDEIISKTKQVIQGLEALKNEHNSILQSLLETLKCLKKDDESNLVEEKSNMIRKSLEMLELGLSEAQVMMALSNHLNAVESEKQKLRAQVRRLCQENQWLRDELANTQQKLQKSEQSVAQLEEEKKHLEFMNQLKKYDDDISPSEDKDTDSTKEPLDDLFPNDEDDPGQGIQQQHSSAAAAAQQGGYEIPARLRTLHNLVIQYASQGRYEVAVPLCKQALEDLEKTSGHDHPDVATMLNILALVYRDQNKYKDAANLLNDALAIREKTLGKDHPAVAATLNNLAVLYGKRGKYKEAEPLCKRALEIREKVLGKDHPDVAKQLNNLALLCQNQGKYEEVEYYYQRALEIYQTKLGPDDPNVAKTKNNLASCYLKQGKFKQAETLYKEILTRAHEREFGSVDDENKPIWMHAEEREECKGKQKDGTSFLEWLYQLDYQLLDRERP

SEQ ID NO: 876289 - protein, 202 aa, Homo sapiens; identical to SEQ ID NO: 876272

SEQ ID NO: 876290 - protein, 120 aa, Homo sapiens
GGARRGAGGSNTETPFSAAGAAQAAERDWLGRLGCWCEEPRGCARRPRGQRVGGRGCCGAVAPAPLAGDCCAVPHTAEAGSAHSRCSALAPGGAPGADSARERGPQEQGECMTTCPQWCT

SEQ ID NO: 876291 - protein, 569 aa, Homo sapiens
MSTMVYIKEDKLEKLTQDEIISKTKQVIQGLEALKNEHNSILQSLLETLKCLKKDDESNLVEEKSNMIRKSLEMLELGLSEAQVMMALSNHLNAVESEKQKLRAQVRRLCQENQWLRDELANTQQKLQKSEQSVAQLEEEKKHLEFMNQLKKYDDDISPSEDKDTDSTKEPLDDLFPNDEDDPGQGIQQQHSSAAAAAQQGGYEIPARLRTLHNLVIQYASQGRYEVAVPLCKQALEDLEKTSGHDHPDVATMLNILALVYRDQNKYKDAANLLNDALAIREKTLGKDHPAVAATLNNLAVLYGKRGKYKEAEPLCKRALEIREKVLGKDHPDVAKQLNNLALLCQNQGKYEEVEYYYQRALEIYQTKLGPDDPNVAKTKNNLASCYLKQGKFKQAETLYKEILTRAHEREFGSVDDENKPIWMHAEEREECKGKQKDGTSFGEYGGWYKACKVDSPTVTTTLKNLGALYRRQGKFEAAETLEEAAMRSRKQGLDNVHKQRVAEVLNDPENMEKRRSRESLNVDVVKYESGPDGGEEVSMSVEWNGGVSGRASFCGKRQQQQWPGRRHR

SEQ ID NO: 876292 - protein, 124 aa, Homo sapiens
LGVGVPQRAVSRTELSNTVRFWRPSPDLLSSLAVTPTWPRSRMGLPSVARSWPGTARAAGRAPGREPQRSLISPASVCIGHDTNNHTAGVTLGLGLGLSWCPGAAWSLPGDLGHELGPRLPSHV

SEQ ID NO: 876293 - protein, 547 aa, Homo sapiens; identical to SEQ ID NO: 876280

SEQ ID NO: 876294 - protein, 547 aa, Homo sapiens; identical to SEQ ID NO: 876280

SEQ ID NO: 876295 - protein, 548 aa, Homo sapiens
MSTMVYIKEDKLEKLTQDEIISKTKQVIQGLEALKNEHNSILQSLLETLKCLKKDDESNLVEEKSNMIRKSLEMLELGLSEAQVMMALSNHLNAVESEKQKLRAQVRRLCQENQWLRDELANTQQKLQKSEQSVAQLEEEKKHLEFMNQLKKYDDDISPSEDKDTDSTKEPLDDLFPNDEDDPGQGIQQQHSSAAAAAQQGGYEIPARLRTLHNLVIQYASQGRYEVAVPLCKQALEDLEKTSGHDHPDVATMLNILALVYRDQNKYKDAANLLNDALAIREKTLGKDHPAVAATLNNLAVLYGKRGKYKEAEPLCKRALEIREKVLGKDHPDVAKQLNNLALLCQNQGKYEEVEYYYQRALEIYQTKLGPDDPNVAKTKNNLASCYLKQGKFKQAETLYKEILTRAHEREFGSVDDENKPIWMHAEEREECKGKQKDGTSFGEYGGWYKACKVDSPTVTTTLKNLGALYRRQGKFEAAETLEEAAMRSRKQRVAEVLNDPENMEKRRSRESLNVDVVKYESGPDGGEEVSMSVEWNGMRKMKLGLVN

SEQ ID NO: 876296 - protein, 562 aa, Homo sapiens; identical to SEQ ID NO: 876277

SEQ ID NO: 876297 - protein, 539 aa, Homo sapiens
MSTMVYIKEDKLEKLTQDEIISKTKQVIQGLEALKNEHNSILQSLLETLKCLKKDDESNLVEEKSNMIRKSLEMLELGLSEAQVMMALSNHLNAVESEKQKLRAQVRRLCQENQWLRDELANTQQKLQKSEQSVAQLEEEKKHLEFMNQLKKYDDDISPSEDKDTDSTKEPLDDLFPNDEDDPGQGIQQQHSSAAAAAQQGGYEIPARLRTLHNLVIQYASQGRYEVAVPLCKQALEDLEKTSGHDHPDVATMLNILALVYRDQNKYKDAANLLNDALAIREKTLGKDHPAVAATLNNLAVLYGKRGKYKEAEPLCKRALEIREKVLGKDHPDVAKQLNNLALLCQNQGKYEEVEYYYQRALEIYQTKLGPDDPNVAKTKNNLASCYLKQGKFKQAETLYKEILTRAHEREFGSVDDENKPIWMHAEEREECKGKQKDGTSFGEYGGWYKACKVDSPTVTTTLKNLGALYRRQGKFEAAETLEEAAMRSRKQRVAEVLNDPENMEKRRSRESLNVDVVKYESGPDGGEEMRKMKLGLVN

SEQ ID NO: 876298 - protein, 537 aa, Homo sapiens
MSTMVYIKEDKLEKLTQDEIISKTKQVIQGLEALKNEHNSILQSLLETLKCLKKDDESNLVEEKSNMIRKSLEMLELGLSEAQVMMALSNHLNAVESEKQKLRAQVRRLCQENQWLRDELANTQQKLQKSEQSVAQLEEEKKHLEFMNQLKKYDDDISPSEDKDTDSTKEPLDDLFPNDEDDPGQGIQQQHSSAAAAAQQGGYEIPARLRTLHNLVIQYASQGRYEVAVPLCKQALEDLEKTSGHDHPDVATMLNILALVYRDQNKYKDAANLLNDALAIREKTLGKDHPAVAATLNNLAVLYGKRGKYKEAEPLCKRALEIREKVLGKDHPDVAKQLNNLALLCQNQGKYEEVEYYYQRALEIYQTKLGPDDPNVAKTKNNLASCYLKQGKFKQAETLYKEILTRAHEREFGSVDDENKPIWMHAEEREECKGKQKDGTSFGEYGGWYKACKVDSPTVTTTLIEEAAMRLVNGLDNVHKQRVAEVLNDPENMEKRRSRESLNVDVVKYESGPDGGEEVSMSVEWNGMRKMKLGLVN

SEQ ID NO: 876299 - protein, 547 aa, Homo sapiens; identical to SEQ ID NO: 876280

SEQ ID NO: 876300 - protein, 590 aa, Homo sapiens; identical to SEQ ID NO: 876282

SEQ ID NO: 876301 - protein, 621 aa, Homo sapiens; identical to SEQ ID NO: 876283

SEQ ID NO: 876302 - protein, 528 aa, Homo sapiens
MSTMVYIKEDKLEKLTQDEIISKTKQVIQGLEALKNEHNSILQSLLETLKCLKKDDESNLVEEKSNMIRKSLEMLELGLSEAQVMMALSNHLNAVESEKQKLRAQVRRLCQENQWLRDELANTQQKLQKSEQSVAQLEEEKKHLEFMNQLKKYDDDISPSEDKDTDSTKEPLDDLFPNDEDDPGQGIQQQHSSAAAAAQQGGYEIPARLRTLHNLVIQYASQGRYEVAVPLCKQALEDLEKTSGHDHPDVATMLNILALVYRDQNKYKDAANLLNDALAIREKTLGKDHPAVAATLNNLAVLYGKRGKYKEAEPLCKRALEIREKVLGKDHPDVAKQLNNLALLCQNQGKYEEVEYYYQRALEIYQTKLGPDDPNVAKTKNNLASCYLKQGKFKQAETLYKEILTRAHEREFGSVDDENKPIWMHAEEREECKGKQKDGTSFGEYGGWYKACKVDSPTVTTTLIEEAAMRLVNGLDNVHKQRVAEVLNDPENMEKRRSRESLNVDVVKYESGPDGGEEMRKMKLGLVN

SEQ ID NO: 876303 - protein, 538 aa, Homo sapiens; identical to SEQ ID NO: 876276

SEQ ID NO: 876304 - protein, 475 aa, Homo sapiens
MSTMVYIKEDKLEKLTQDEIISKTKQVIQGLEALKNEHNSILQSLLETLKCLKKDDESNLVEEKSNMIRKSLEMLELGLSEAQVMMALSNHLNAVESEKQKLRAQVRRLCQENQWLRDELANTQQKLQKSEQSVAQLEEEKKHLEFMNQLKKYDDDISPSEDKDTDSTKEPLDDLFPNDEDDPGQGIQQQHSSAAAAAQQGGYEIPARLRTLHNLVIQYASQGRYEVAVPLCKQALEDLEKTSGHDHPDVATMLNILALVYRDQNKYKDAANLLNDALAIREKTLGKDHPAVAATLNNLAVLYGKRGKYKEAEPLCKRALEIREKVLGKDHPDVAKQLNNLALLCQNQGKYEEVEYYYQRALEIYQTKLGPDDPNVAKTKNNLASCYLKQGKFKQAETLYKEILTRAHEREFGSVDDENKPIWMHAEEREECKGKQKDGTSFGEYGGWYKACKVDSNPDNTQLLLVTLKKPWAGF

SEQ ID NO: 876305 - protein, 196 aa, Homo sapiens
MSTMVYIKEDKLEKLTQDEIISKTKQVIQGLEALKNEHNSILQSLLETLKCLKKDDESNLVEEKSNMIRKSLEMLELGLSEAQQNSVASLEYYLRIFVCHVKKRKWDDDYVRYWFTCTTEVDGTQRPQCVLCNSVFSNADLRPSKLSDHFNRQHGGVAGHDLNSLKHMPAPSDQSETLKAFGVASHEDTLLQASYQ

SEQ ID NO: 876306 - protein, 110 aa, Homo sapiens
KAKKEAPPMEKQEVVKTHLRDMIILPEMVGSMVGVYNGKTFNQVEIKPEMIGHYLGEFSITSPSTPPRKLREPAPPWPAEKGAPTVQRRAEGLLKCRQSGSPGRGGAESE

SEQ ID NO: 876307 - protein, 553 aa, Homo sapiens
EVVMEKPRANETNIPSEQSLPGKEATLLDFGWRSAFKEVSLPMAHCVVTAIEGFSTKILQQEQNERSSAVSYAMNLVNVQQVWQDSHMFPEEEQPKKIGKFCSDIMEKLDTMLPLALACRDDSFQEIRANLVEACCKVATAVLQRLQERAKEVPSKAPLKNLHTYLSTAVYVFQHFKRYDNLMKEMTKKPIFLVLVQRYQEFINTLQFQVTNYCVRVCATSILQDAESHHWDDYKAFYEGERCSFSIQMWHYFCWSLHYDLWTILPPKLAQEILVEVLEKSLSLLASRYARAHPSRKRTPQLRLDVTTILICTENMLWSVCTSVQKLLNPHQHTDDKIFKIHTHCNNLFTTLVILTSPLTELYKTFQHGLDESASDSLKSFFKQPLYWVSCISHFYPSLLRTPSAGGLKAEGQLKLLLSQPRCNWNLLLETLLHHDGLLLRILLKSSKRTFQEQVSDTENNLNQGPSLMETIFRILYHCSFSPQTFANVFVSYMEEEQLWDFLYNIPGMRHLLFVKEMFYRYLYVPLKMFRSCIDTGFAESVVGESLPYIFSV

SEQ ID NO: 876308 - protein, 641 aa, Homo sapiens
EVVMEKPRANETNIPSEQSLPGKEATLLDFGWRSAFKEVSLPMAHCVVTAIEGFSTKILQQEQNERSSAVSYAMNLVNVQQVWQDSHMFPEEEQPKKIGKFCSDIMEKLDTMLPLALACRDDSFQEIRANLVEACCKVATAVLQRLQERAKEVPSKAPLKNLHTYLSTAVYVFQHFKRYDNLMKEMTKKPIFLVLVQRYQEFINTLQFQVTNYCVRVCATSILQDAESHHWDDYKAFYEGERCSFSIQMWHYFCWSLHYDLWTILPPKLAQEILVEVLEKSLSLLASRYARAHPSRKRTPQLRLDVTTILICTENMLWSVCTSVQKLLNPHQHTDDKIFKIHTHCNNLFTTLVILTSPLTELYKTFQHGLDESASDSLKSFFKQPLYWVSCISHFYPSLLRTPSAGGLKAEGQLKLLLSQPRCNWNLLLETLLHHDGLLLRILLKSSKRTFQEQVSDTENNLNQGPSLMETIFRILYHCSFSPQTFANVFVSYMEEEQLWDFLYNIPVSTCVEYELEVIRCLRLALTDAIKDAVQQIVSVMSSRRNCETNLNKHVVPDCLLESMPKEWNYGPKETNRKESCKSFTRLTAQAVSIVISKLPTVIACLPPPVKYFFFLSERKMSKKFVELKKAGLLVWNLIVI

SEQ ID NO: 876309 - protein, 336 aa, Homo sapiens
MTDLNDNICKRYIKMITNIVILSLIICISLAFWIISMTASTYYGNLRPISPWRWLFSVVVPVLIVSNGLKKKSLDHSGALGGLVVGFILTIANFSFFTSLLMFFLSSSKLTKWKGEVKKRLDSEYKEGGQRNWVQVFCNGAVPTELALLYMIENGPGEIPVDFSKQYSASWMCLSLLAALACSAGDTWASEVGPVLSKSSPRLITTWEKVPVGTNGGVTVVGLVSSLLGGTFVGIAYFLTQLIFVNDLDISAPQWPIIAFGGLAGLLGSIVDSYLGATMQYTGLDESTGMVVNSPTNKARHIAGKPILDNNAVNLFSSVLIALLLPTAAWGFWPRG

SEQ ID NO: 876310 - protein, 235 aa, Homo sapiens [sequence omitted]

SEQ ID NO: 876311 - protein, 421 aa, Homo sapiens
HSGRGARGGGAGRRGLCSWGLGLGRLDLTLGRLAQLSGRDCVQPRRACFPDLPKFGCPSCPFAAAGLPGPRVRRLRREELISLFSMTDLNDNICKRYIKMITNIVILSLIICISLAFWIISMTASTYYGNLRPISPWRWLFSVVVPVLIVSNGLKKKSLDHSGALGGLVVGFILTIANFSFFTSLLMFFLSSSKLTKWKGEVKKRLDSEYKEGGQRNWVQVFCNGAVPTELALLYMIENGPGEIPVDFSKQYSASWMCLSLLAALACSAGDTWASEVGPVLSKSSPRLITTWEKVPVGTNGGVTVVGLVSSLLGGTFVGIAYFLTQLIFVNDLDISAPQWPIIAFGGLAGLLGSIVDSYLGATMQYTGLDESTGMVVNSPTNKARHIAGKPILDNNAVNLFSSVLIALLLPTAAWGFWPRG

SEQ ID NO: 876312 - protein, 336 aa, Homo sapiens; identical to SEQ ID NO: 876309

SEQ ID NO: 876313 - protein, 129 aa, Homo sapiens
HSGRGARGGGAGRRGLCSWGLGLGRLDLTLGRLAQLSGRDCVQPRRACFPDLPKFGCPSCPFAAAGLPGPRVRRLRREVGGTRQRRDRGLAASAFSFPRGLRREALKRPAAGDRPSPSAGLRSAFAVRR

SEQ ID NO: 876314 - protein, 336 aa, Homo sapiens; identical to SEQ ID NO: 876309

SEQ ID NO: 876315 - protein, 336 aa, Homo sapiens; identical to SEQ ID NO: 876309

SEQ ID NO: 876316 - protein, 298 aa, Homo sapiens
MTDLNDNICKRYIKMITNIVILSLIICISLAFWIISMTASTYYGNLRPISPWRWLFSVVVPVLIVSNGLKKKSLDHSGALGGLVVGFILTIANFSFFTSLLMFFLSSSKLTKWKGEVKKRLDSEYKEGGQRNWVQVFCNGAVPTELALLYMIENGPGEIPVDFSKQYSASWMCLSLLAALACSAGDTWASEVGPVLSKSSPRLITTWEKVPVGTNGGVTVVGLVSSLLGGTFVGIAYFLTQLIFVNDLDISAPQWPIIAFGGLAGLLGSIVDSYLGATMQYTGKNIPSFLQLIGMLKK

SEQ ID NO: 876317 - protein, 336 aa, Homo sapiens; identical to SEQ ID NO: 876309

SEQ ID NO: 876318 - protein, 336 aa, Homo sapiens; identical to SEQ ID NO: 876309

SEQ ID NO: 876319 - protein, 133 aa, Homo sapiens
TSSCRFGTIPDKESGGGSHGNAASSCSRFHYSYAGVHSESTHFSLVLLLDWAMAFILCPLTCPGECEGSTGKLECCLCLPSQWAVLTAAPHPYRWSQEAGRVGEGKIGKTGRPRPRQNSLSSLHFWSPVVMCL

SEQ ID NO: 876320 - protein, 132 aa, Homo sapiens
MHPWNQQVPDKESGGGSHGNAASSCSRFHYSYAGVHSESTHFSLVLLLDWAMAFILCPLTCPGECEGSTGKLECCLCLPSQWAVLTAAPHPYRWSQEAGRVGEGKIGKTGRPRPRQNSLSSLHFWSPVVMCL

SEQ ID NO: 876321 - protein, 132 aa, Homo sapiens; identical to SEQ ID NO: 876320

SEQ ID NO: 876322 - protein, 132 aa, Homo sapiens; identical to SEQ ID NO: 876320

SEQ ID NO: 876323 - protein, 132 aa, Homo sapiens; identical to SEQ ID NO: 876320

SEQ ID NO: 876324 - protein, 132 aa, Homo sapiens; identical to SEQ ID NO: 876320

SEQ ID NO: 876325 - protein, 987 aa, Homo sapiens
IPVSPALGQLMLFVDGMLGVVAHSDTIQWLYTLCASLSRLVVKTALKLLLVFVEYSENNAPLFIRAVNSVASTTGAPPWANLVSILEEKNGADPELLVYTVTLINKTLAALPDQDSFYDVTDALEQQGMEALVQRHLGTAGTDVDLRTQLVLYENALKLEDGDIEEAPGAGGRRERRKPSSEEGKRSRRSLEGGGCPARAPEPGPTGPASPVGPTSSTGPALLTGPASSPVGPPSGLQASVNLFPTISVAPSADTSSERSIYKARFLENVAAAETEKQVALAQGRAETLAGAMPNEAGGHPDARQLWDSPETAPAARTPQSPAPCVLLRAQRSLAPEPKEPLIPASPKAEPIWELPTRAPRLSIGDLDFSDLGEDEDQDMLNVESVEAGKDIPAPSPPLPLLSGVPPPPPLPPPPPIKGPFPPPPPLPLAAPLPHSVPDSSALPTKRKTVKLFWRELKLAGGHGVSASRFGPCATLWASLDPVSVDTARLEHLFESRAKEVLPSKKAGEGRRTMTTVLDPKRSNAINIGLTTLPPVHVIKAALLNFDEFAVSKDGIEKLLTMMPTEEERQKIEEAQLANPDIPLGPAENFLMTLASIGGLAARLQLWAFKLDYDSMEREIAEPLFDLKVGMEQLVQNATFRCILATLLAVGNFLNGSQSSGFELSYLEKVSEVKDTVRRQSLLHHLCSLVLQTRPESSDLYSEIPALTRCAKVDFEQLTENLGQLERRSRAAEESLRSLAKHELAPALRARLTHFLDQCARRVAMLRIVHRRVCNRFHAFLLYLGYTPQAAREVRIMQFCHTLREFALEYRTCRERVLQQQQKQATYRERNKTRGRMITETEKFSGVAGEAPSNPSVPVAVSSGPGRGDADSHASMKSLLTSRPEDTTHNRRSRGMVQSSSPIMPTVGPSTASPEEPPGSSLPSDTSDEIMDLLVQSVTKSSPRALAARERKRSRGNRKSLRRTLKSGLGDDLVQALGLSKGPGLEV

SEQ ID NO: 876326 - protein, 1170 aa, Homo sapiens
MAGGEDRGDGEPVSVVTVRVQYLEDTDPFACANFPEPRRAPTCSLDGALPLGAQIPAVHRLLGAPLKLEDCALQVSPSGYYLDTELSLEEQREMLEGFYEEISKGRKPTLILRTQLSVRVNAILEKLYSSSGPELRRSLFSLKQIFQEDKDLVPEFVHSEGLSCLIRVGAAADHNYQSYILRALGQLMLFVDGMLGVVAHSDTIQWLYTLCASLSRLVVKTALKLLLVFVEYSENNAPLFIRAVNSVASTTGAPPWANLVSILEEKNGADPELLVYTVTLINKTLAALPDQDSFYDVTDALEQQGMEALVQRHLGTAGTDVDLRTQLVLYENALKLEDGDIEEAPGAGGRRERRKPSSEEGKRSRRSLEGGGCPARAPEPGPTGPASPVGPTSSTGPALLTGPASSPVGPPSGLQASVNLFPTISVAPSADTSSERSIYKARFLENVAAAETEKQVALAQGRAETLAGAMPNEAGGHPDARQLWDSPETAPAARTPQSPAPCVLLRAQRSLAPEPKEPLIPASPKAEPIWELPTRAPRLSIGDLDFSDLGEDEDQDMLNVESVEAGKDIPAPSPPLPLLSGVPPPPPLPPPPPIKGPFPPPPPLPLAAPLPHSVPDSSALPTKRKTVKLFWRELKLAGGHGVSASRFGPCATLWASLDPVSVDTARLEHLFESRAKEVLPSKKAGEGRRTMTTVLDPKRSNAINIGLTTLPPVHVIKAALLNFDEFAVSKDGIEAWLHPQKLLTMMPTEEERQKIEEAQLANPDIPLGPAENFLMTLASIGGLAARLQLWAFKLDYDSMEREIAEPLFDLKVGMEQLVQNATFRCILATLLAVGNFLNGSQSSGFELSYLEKVSEVKDTVRRQSLLHHLCSLVLQTRPESSDLYSEIPALTRCAKVDFEQLTENLGQLERRSRAAEESLRSLAKHELAPALRARLTHFLDQCARRVAMLRIVHRRVCNRFHAFLLYLGYTPQAAREVRIMQFCHTLREFALEYRTCRERVLQQQQKQATYRERNKTRGRMITETEKFSGVAGEAPSNPSVPVAVSSGPGRGDADSHASMKSLLTSRPEDTTHNRRSRGMVQSSSPIMPTVGPSTASPEEPPGSSLPSDTSDEIMDLLVQSVTKSSPRALAARERKRSRGNRKSLRRTLKSGLGDDLVQALGLSKGPGLEV

SEQ ID NO: 876327 - protein, 1139 aa, Homo sapiens [sequence omitted]

SEQ ID NO: 876328 - protein, 1164 aa, Homo sapiens
MAGGEDRGDGEPVSVVTVRVQYLEDTDPFACANFPEPRRAPTCSLDGALPLGAQIPAVHRLLGAPLKLEDCALQVSPSGYYLDTELSLEEQREMLEGFYEEISKGRKPTLILRTQLSVRVNAILEKLYSSSGPELRRSLFSLKQIFQEDKDLVPEFVHSEGLSCLIRVGAAADHNYQSYILRALGQLMLFVDGMLGVVAHSDTIQWLYTLCASLSRLVVKTALKLLLVFVEYSENNAPLFIRAVNSVASTTGAPPWANLVSILEEKNGADPELLVYTVTLINKTLAALPDQDSFYDVTDALEQQGMEALVQRHLGTAGTDVDLRTQLVLYENALKLEDGDIEEAPGAGGRRERRKPSSEEGKRSRRSLEGGGCPARAPEPGPTGPASPVGPTSSTGPALLTGPASSPVGPPSGLQASVNLFPTISVAPSADTSSERSIYKARFLENVAAAETEKQVALAQGRAETLAGAMPNEAGGHPDARQLWDSPETAPAARTPQSPAPCVLLRAQRSLAPEPKEPLIPASPKAEPIWELPTRAPRLSIGDLDFSDLGEDEDQDMLNVESVEAGKDIPAPSPPLPLLSGVPPPPPLPPPPPIKGPFPPPPPLPLAAPLPHSVPDSSALPTKRKTVKLFWRELKLAGGHGVSASRFGPCATLWASLDPVSVDTARLEHLFESRAKEVLPSKKAGEGRRTMTTVLDPKRSNAINIGLTTLPPVHVIKAALLNFDEFAVSKDGIEKLLTMMPTEEERQKIEEAQLANPDIPLGPAENFLMTLASIGGLAARLQLWAFKLDYDSMEREIAEPLFDLKVGMEQLVQNATFRCILATLLAVGNFLNGSQSSGFELSYLEKVSEVKDTVRRQSLLHHLCSLVLQTRPESSDLYSEIPALTRCAKVDFEQLTENLGQLERRSRAAEESLRSLAKHELAPALRARLTHFLDQCARRVAMLRIVHRRVCNRFHAFLLYLGYTPQAAREVRIMQFCHTLREFALEYRTCRERVLQQQQKQATYRERNKTRGRMITETEKFSGVAGEAPSNPSVPVAVSSGPGRGDADSHASMKSLLTSRPEDTTHNRRSRGMVQSSSPIMPTVGPSTASPEEPPGSSLPSDTSDEIMDLLVQSVTKSSPRALAARERKRSRGNRKSLRRTLKSGLGDDLVQALGLSKGPGLEV

SEQ ID NO: 876329 - protein, 1164 aa, Homo sapiens; identical to SEQ ID NO: 876328

SEQ ID NO: 876330 - protein, 1164 aa, Homo sapiens; identical to SEQ ID NO: 876328

SEQ ID NO: 876331 - protein, 1253 aa, Homo sapiens
MAGGEDRGDGEPVSVVTVRVQYLEDTDPFACANFPEPRRAPTCSLDGALPLGAQIPAVHRLLGAPLKLEDCALQVSPSGYYLDTELSLEEQREMLEGFYEEISKGRKPTLILRTQLSVRVNAILEKLYSSSGPELRRSLFSLKQIFQEDKDLVPEFVHSEGLSCLIRVGAAADHNYQSYILRALGQLMLFVDGMLGVVAHSDTIQWLYTLCASLDKWLSTQPYTLCLLLLCGPQLPVLQSELEGSESEASVSLEGTSVPGPGARVILPRFSLGPAPAALPLPQQQLAQVWPKPHFICTDLSPQSRLVVKTALKLLLVFVEYSENNAPLFIRAVNSVASTTGAPPWANLVSILEEKNGADPELLVYTVTLINKTLAALPDQDSFYDVTDALEQQGMEALVQRHLGTAGTDVDLRTQLVLYENALKLEDGDIEEAPGAGGRRERRKPSSEEGKRSRRSLEGGGCPARAPEPGPTGPASPVGPTSSTGPALLTGPASSPVGPPSGLQASVNLFPTISVAPSADTSSERSIYKARFLENVAAAETEKQVALAQGRAETLAGAMPNEAGGHPDARQLWDSPETAPAARTPQSPAPCVLLRAQRSLAPEPKEPLIPASPKAEPIWELPTRAPRLSIGDLDFSDLGEDEDQDMLNVESVEAGKDIPAPSPPLPLLSGVPPPPPLPPPPPIKGPFPPPPPLPLAAPLPHSVPDSSALPTKRKTVKLFWRELKLAGGHGVSASRFGPCATLWASLDPVSVDTARLEHLFESRAKEVLPSKKAGEGRRTMTTVLDPKRSNAINIGLTTLPPVHVIKAALLNFDEFAVSKDGIEKLLTMMPTEEERQKIEEAQLANPDIPLGPAENFLMTLASIGGLAARLQLWAFKLDYDSMEREIAEPLFDLKVGMEQLVQNATFRCILATLLAVGNFLNGSQSSGFELSYLEKVSEVKDTVRRQSLLHHLCSLVLQTRPESSDLYSEIPALTRCAKVDFEQLTENLGQLERRSRAAEESLRSLAKHELAPALRARLTHFLDQCARRVAMLRIVHRRVCNRFHAFLLYLGYTPQAAREVRIMQFCHTLREFALEYRTCRERVLQQQQKQATYRERNKTRGRMITETEKFSGVAGEAPSNPSVPVAVSSGPGRGDADSHASMKSLLTSRPEDTTHNRRSRGMVQSSSPIMPTVGPSTASPEEPPGSSLPSDTSDEIMDLLVQSVTKSSPRALAARERKRSRGNRKSLRRTLKSGLGDDLVQALGLSKGPGLEV

SEQ ID NO: 876332 - protein, 283 aa, Homo sapiens
MCTPLLSQVDFEQLTENLGQLERRSRAAEESLRSLAKHELAPALRARLTHFLDQCARRVAMLRIVHRRVCNRFHAFLLYLGYTPQAAREVRIMQFCHTLREFALEYRTCRERVLQQQQKQATYRERNKTRGRMITETEKFSGVAGEAPSNPSVPVAVSSGPGRGDADSHASMKSLLTSRPEDTTHNRRSRGMVQSSSPIMPTVGPSTASPEEPPGSSLPSDTSDEIMDLLVQSVTKSSPRALAARERKRSRGNRKSLRRTLKSGLGDDLVQALGLSKGPGLEV

SEQ ID NO: 876333 - protein, 1164 aa, Homo sapiens; identical to SEQ ID NO: 876328

SEQ ID NO: 876334 - protein, 127 aa, Homo sapiens
PQPCLLIPALQTLAALPDQDSFYDVTDALEQQGMEALVQRHLGTAGTDVDLRTQLVLYEVGRALRSEADWKEGREKRSPQRPTPPAYTLTTFLHPGPPLLERPEIGGWRHRRSPRRWWAAGTTKAFF

SEQ ID NO: 876335 - protein, 466 aa, Homo sapiens
  misc_feature (22)..(22): Xaa can be any naturally occurring amino acid
AQTSFSTSSDQCSEPETKWSSXSSFEAGDGDSSHEDRAPPWPGGVSVRTGPEKRSSTRPPAEMEPGKGEQASSSESDPEGPIAAQMLSFVMDDPDFESEGSDTQRRADDFPVRDDPSDVTDEDEGPAEPPPPPKLPLPAFRLKNDSDLFGLELEEAVLKFRQKPSSIRCPGLPGLRATHPSLTKAPGCSQAGSWEYTHCQQACVSHRGARGLHLHTPELLSPDSGTAPNSGLGSWVAHHGSRACAPHCCVPIAFCSFKSVEKKMTDMLKEEEERLQLAHSNMTKGQELLLTIQMGIDNLYVRLMGINLPATQVPGVRLSCHTPGPWAGPEGRGDPPPGLQREVVLSNTLDLNSKLAYCEGKLTYLADRVQMVSRTEEGDTKVRDTLESSTLMEKYNTRISFENREEDMIGLLRTLGRPGSRRGARDTQDRGRFCVRRQPGPGTARQNRVRMRRPRAPRPRGPRGAP

SEQ ID NO: 876336 - protein, 878 aa, Homo sapiens
MFSALKKLVGSDQAPGRDKNIPAGLQSMNQALQRRFAKGVQYNMKIVIRGDRNTGKTALWHRLQGRPFVEEYIPTQEIQVTSIHWSYKTTDDIVKVEVWDVVDKGKCKKRGDGLKMENDPQEAESEMALDAEFLDVYKNCNGVVMMFDITKQWTFNYILRELPKVPTHVPVCVLGNYRDMGEHRVILPDDVRDFIDNLDRPPGSSYFRYAESSMKNSFGLKYLHKFFNIPFLQLQRETLLRQLETNQLDMDATLEELSVQQETEDQNYGIFLEMMEARSRGHASPLAANGQSPSPGSQSPVVPAGAVSTGSSSPGTPQPAPQLPLNAAPPSSVPPVPPSEALPPPACPSAPAPRRSIISRLFGTSPATEAAPPPPEPVPAAQGPATVQSVEDFVPDDRLDRSFLEDTTPARDEKKVGAKAAQQDSDSDGEALGGNPMVAGFQDDVDLEDQPRGSPPLPAGPVPSQDITLSSEEEAEVAAPTKGPAPAPQQCSEPETKWSSIPASKPRRGTAPTRTAAPPWPGGVSVRTGPEKRSSTRPPAEMEPGKGEQASSSESDPEGPIAAQMLSFVMDDPDFESEGSDTQRRADDFPVRDDPSDVTDEDEGPAEPPPPPKLPLPAFRLKNDSDLFGLGLEEAGPKESSEEGKEGKTPSKEKKKKKKKGKEEEEKAAKKKSKHKKSKDKEEGKEERRRRQQRPPRSRERTAADELEAFLGGGAPGGPPPWGWRLRGALGRRGQWPPWGGGRACHCLGRHLPLYHRLCRCPVAAVCASELEEAGHWWSPGWALQVLGLQAQCEPALQEGRGQLASARLGGHPGPLGAEPPVFLRDVTEAQEGPVRVCLQRLGRGRLAVGCALPRHLLALRAHLGPQHAYGSASGREP

SEQ ID NO: 876337 - protein, 878 aa, Homo sapiens; identical to SEQ ID NO: 876336

SEQ ID NO: 876338 - protein, 763 aa, Homo sapiens
MENDPQEAESEMALDAEFLDVYKNCNGVVMMFDITKQWTFNYILRELPKVPTHVPVCVLGNYRDMGEHRVILPDDVRDFIDNLDRPPGSSYFRYAESSMKNSFGLKYLHKFFNIPFLQLQRETLLRQLETNQLDMDATLEELSVQQETEDQNYGIFLEMMEARSRGHASPLAANGQSPSPGSQSPVVPAGAVSTGSSSPGTPQPAPQLPLNAAPPSSVPPVPPSEALPPPACPSAPAPRRSIISRLFGTSPATEAAPPPPEPVPAAQGPATVQSVEDFVPDDRLDRSFLEDTTPARDEKKVGAKAAQQDSDSDGEALGGNPMVAGFQDDVDLEDQPRGSPPLPAGPVPSQDITLSSEEEAEVAAPTKGPAPAPQQCSEPETKWSSIPASKPRRGTAPTRTAAPPWPGGVSVRTGPEKRSSTRPPAEMEPGKGEQASSSESDPEGPIAAQMLSFVMDDPDFESEGSDTQRRADDFPVRDDPSDVTDEDEGPAEPPPPPKLPLPAFRLKNDSDLFGLGLEEAGPKESSEEGKEGKTPSKEKKKKKKKGKEEEEKAAKKKSKHKKSKDKEEGKEERRRRQQRPPRSRERTAADELEAFLGGGAPGGPPPWGWRLRGALGRRGQWPPWGGGRACHCLGRHLPLYHRLCRCPVAAVCASELEEAGHWWSPGWALQVLGLQAQCEPALQEGRGQLASARLGGHPGPLGAEPPVFLRDVTEAQEGPVRVCLQRLGRGRLAVGCALPRHLLALRAHLGPQHAYGSASGREP

SEQ ID NO: 876339 - protein, 914 aa, Homo sapiens
MFSALKKLVGSDQAPGRDKNIPAGLQSMNQALQRRFAKGVQYNMKIVIRGDRNTGKTALWHRLQGRPFVEEYIPTQEIQVTSIHWSYKTTDDIVKVEVWDVVDKGKCKKRGDGLKMENDPQEAESEMALDAEFLDVYKNCNGVVMMFDITKQWTFNYILRELPKVPTHVPVCVLGNYRDMGEHRVILPDDVRDFIDNLDRPPGSSYFRYAESSMKNSFGLKYLHKFFNIPFLQLQRETLLRQLETNQLDMDATLEELSVQQETEDQNYGIFLEMMEARSRGHASPLAANGQSPSPGSQSPVVPAGAVSTGSSSPGTPQPAPQLPLNAAPPSSVPPVPPSEALPPPACPSAPAPRRSIISRLFGTSPATEAAPPPPEPVPAAQGPATVQSVEDFVPDDRLDRSFLEDTTPARDEKKVGAKAAQQDSDSDGEALGGNPMVAGFQDDVDLEDQPRGSPPLPAGPVPSQDITLSSEEEAEVAAPTKGPAPAPQQCSEPETKWSSIPASKPRRGTAPTRTAAPPWPGGVSVRTGPEKRSSTRPPAEMEPGKGEQASSSESDPEGPIAAQMLSFVMDDPDFESEGSDTQRRADDFPVRDDPSDVTDEDEGPAEPPPPPKLPLPAFRLKNDSDLFGLGLEEAGPKESSEEGKEGKTPSKEKKKKKKKGKEVLATPLPGRPGLGGMRSWDQGCGFLDSMAPHPCAPQEEEKAAKKKSKHKKSKDKEEGKEERRRRQQRPPRSRERTAADELEAFLGGGAPGGPPPWGWRLRGALGRRGQWPPWGGGRACHCLGRHLPLYHRLCRCPVAAVCASELEEAGHWWSPGWALQVLGLQAQCEPALQEGRGQLASARLGGHPGPLGAEPPVFLRDVTEAQEGPVRVCLQRLGRGRLAVGCALPRHLLALRAHLGPQHAYGSASGREP

SEQ ID NO: 876340 - protein, 856 aa, Homo sapiens
MFSALKKLVGSDQAPGRDKNIPAGLQSMNQALQRRFAKGVQYNMKIVIRGDRNTGKTALWHRLQGRPFVEEYIPTQEIQVTSIHWSYKTTDDIVKVEVWDVVDKGKCKKRGDGLKMENDPQEAESEMALDAEFLDVYKNCNGVVMMFDITKQWTFNYILRELPKVPTHVPVCVLGNYRDMGEHRVILPDDVRDFIDNLDRPPGSSYFRYAESSMKNSFGLKYLHKFFNIPFLQLQRETLLRQLETNQLDMDATLEELSVQQETEDQNYGIFLEMMEARSRGHASPLAANGQSPSPGSQSPVVPAGAVSTGSSSPGTPQPAPQLPLNAAPPSSVPPVPPSEALPPPACPSAPAPRRSIISRLFGTSPATEAAPPPPEPVPAAQGPATVQSVEDFVPDDRLDRSFLEDTTPARDEKKVGAKAAQQDSDSDGEALGGNPMVAGFQDDVDLEDQPRGSPPLPAGPVPSQDITLSSEEEAEVAAPTKGPAPAPQQCSEPETKWSSIPASKPRRGTAPTRTAAPPWPGGVSVRTGPEKRSSTRPPAEMEPGKGEQASSSESDPEGPIAAQMLSFVMDDPDFESEGSDTQRRADDFPVRDDPSDVTDEDEGPAEPPPPPKLPLPAFRLKNDSDLFGLGLEEAGPKESSEEGKEGKTPSKEKKKKKKKGKEEEEKAAKKKSKHKKSKDKEEGKEERRRRQQRPPRSRERTAADELEAFLGGGAPGGPPPWGWRLRGALGRRGQWPPWGGGRACHCLGRHLPLYHRLCRCPVAAVCASELEEAGHWWSPGWALQVLGLQAQCEPALQEGRGQLASARLGGHPGPLGAEPPVFLRDVRSVYRGWAGAAWLWGVRCPGTCLPAPPLR

SEQ ID NO: 876341 - protein, 520 aa, Homo sapiens
MFSALKKLVGSDQAPGRDKNIPAGLQSMNQALQRRFAKGVQYNMKIVIRGDRNTGKTALWHRLQGRPFVEEYIPTQEIQVTSIHWSYKTTDDIVKVEVWDVVDKGKCKKRGDGLKMENDPQEAESEMALDAEFLDVYKNCNGVVMMFDITKQWTFNYILRELPKVPTHVPVCVLGNYRDMGEHRVILPDDVRDFIDNLDRPPGSSYFRYAESSMKNSFGLKYLHKFFNIPFLQLQRETLLRQLETNQLDMDATLEELSVQQETEDQNYGIFLEMMEARSRGHASPLAANGQSPSPGSQSPVVPAGAVSTGSSSPGTPQPAPQLPLNAAPPSSVPPVPPSEALPPPACPSAPAPRRSIISRPPPWGWRLRGALGRRGQWPPWGGGRACHCLGRHLPLYHRLCRCPVAAVCASELEEAGHWWSPGWALQVLGLQAQCEPALQEGRGQLASARLGGHPGPLGAEPPVFLRDVTEAQEGPVRVCLQRLGRGRLAVGCALPRHLLALRAHLGPQHAYGSASGREP

SEQ ID NO: 876342 - protein, 744 aa, Homo sapiens
RGSRITRVWWSYVEITKQWTFNYILRELPKVPTHVPVCVLGNYRDMGEHRVILPDDVRDFIDNLDRPPGSSYFRYAESSMKNSFGLKYLHKFFNIPFLQLQRETLLRQLETNQLDMDATLEELSVQQETEDQNYGIFLEMMEARSRGHASPLAANGQSPSPGSQSPVVPAGAVSTGSSSPGTPQPAPQLPLNAAPPSSVPPVPPSEALPPPACPSAPAPRRSIISRLFGTSPATEAAPPPPEPVPAAQGPATVQSVEDFVPDDRLDRSFLEDTTPARDEKKVGAKAAQQDSDSDGEALGGNPMVAGFQDDVDLEDQPRGSPPLPAGPVPSQDITLSSEEEAEVAAPTKGPAPAPQQCSEPETKWSSIPASKPRRGTAPTRTAAPPWPGGVSVRTGPEKRSSTRPPAEMEPGKGEQASSSESDPEGPIAAQMLSFVMDDPDFESEGSDTQRRADDFPVRDDPSDVTDEDEGPAEPPPPPKLPLPAFRLKNDSDLFGLGLEEAGPKESSEEGKEGKTPSKEKKKKKKKGKEEEEKAAKKKSKHKKSKDKEEGKEERRRRQQRPPRSRERTAADELEAFLGGGAPGGPPPWGWRLRGALGRRGQWPPWGGGRACHCLGRHLPLYHRLCRCPVAAVCASELEEAGHWWSPGWALQVLGLQAQCEPALQEGRGQLASARLGGHPGPLGAEPPVFLRDVTEAQEGPVRVCLQRLGRGRLAVGCALPRHLLALRAHLGPQHAYGSASGREP

SEQ ID NO: 876343 - protein, 497 aa, Homo sapiens
MFSALKKLVGSDQAPGRDKNIPAGLQSMNQALQRRFAKGVQYNMKIVIRGDRNTGKTALWHRLQGRPFVEEYIPTQEIQVTSIHWSYKTTDDIVKVEVWDVVDKGKCKKRGDGLKMENDPQEAESEMALDAEFLDVYKNCNGVVMMFDITKQWTFNYILRELPKVPTHVPVCVLGNYRDMGEHRVILPDDVRDFIDNLDRPPGSSYFRYAESSMKNSFGLKYLHKFFNIPFLQLQRETLLRQLETNQLDMDATLEELSVQQETEDQNYGIFLEMMEARSRGHASPLAANGQSPSPGSQSPVVPAGAVSTGSSSPGTPQPAPQLPLNAAPPSSVPPVPPSEALPPPACPSAPAPRRSIISRLFGTSPATEAAPPPPEPVPAAQGPATVQSVEDFVPDDRLDRSFLEDTTPARDEKKVGAKAAQQDSDSDGEALGGNPMVAGFQDDVDLEDQPRGSPPLPAGPVPSQDITLSSEEEAEVAAPTKGPAPAPQQCSEPETK

SEQ ID NO: 876344 - protein, 257 aa, Homo sapiens
MFSALKKLVGSDQAPGRDKNIPAGLQSMNQALQRRFAKGVQYNMKIVIRGDRNTGKTALWHRLQGRPFVEEYIPTQEIQVTSIHWSYKTTDDIVKVEVWDVVDKGKCKKRGDGLKMENDPQEAESEMALDAEFLDVYKNCNGVVMMFDITKQWTFNYILRELPKVPTHVPVCVLGNYRDMGEHRVILPDDVRDFIDNLDRPPGSSYFRYAESSMKNSFGLKYLHKFFNIPFLQLQVSTHHVGWSGCWSLTSFQVSPV

SEQ ID NO: 876345 - protein, 478 aa, Homo sapiens
MFSALKKLVGSDQAPGRDKNIPAGLQSMNQALQRRFAKGVQYNMKIVIRGDRNTGKTALWHRLQGRPFVEEYIPTQEIQVTSIHWSYKTTDDIVKVEVWDVVDKGKCKKRGDGLKMENDPQEAESEMALDAEFLDVYKNCNGVVMMFDITKQWTFNYILRELPKVPTHVPVCVLGNYRDMGEHRVILPDDVRDFIDNLDRPPGSSYFRYAESSMKNSFGLKYLHKFFNIPFLQLQRETLLRQLETNQLDMDATLEELSVQQETEDQNYGIFLEMMEARSRGHASPLAANGQSPSPGSQSPVVPAGAVSTGSSSPGTPQPEGDPKVTTEMWIYCESVSQEYCWMREPNEIGKGGVHFLGHTGERLTSPLAGPEVWHLLRTGSLQLCGEAASLQDVRAGQQKERFPTQHQRLSLGCRCWTRCSAVVCPGGITERGGRSRQGRPRWACSFLLVCRVPGKTEAGGGARYICRETRFRKALEE

SEQ ID NO: 876346 - protein, 314 aa, Homo sapiens
MFSALKKLVGSDQAPGRDKNIPAGLQSMNQALQRRFAKGVQYNMKIVIRGDRNTGKTALWHRLQGRPFVEEYIPTQEIQVTSIHWSYKTTDDIVKVEVWDVVDKGKCKKRGDGLKMENDPQEAESEMALDAEFLDVYKNCNGVVMMFDITKQWTFNYILRELPKVPTHVPVCVLGNYRDMGEHRVILPDDVRDFIDNLDRPPGSSYFRYAESSMKNSFGLKYLHKFFNIPFLQLQKDVRLAQERGCAVVLVSEEVRMPAGWDCCWGRLGWKEGGSQTCPVPALLGRPLLPAEPSPHHWVDYSLESSPLLSCSIP

SEQ ID NO: 876347 - protein, 257 aa, Homo sapiens; identical to SEQ ID NO: 876344

SEQ ID NO: 876348 - protein, 139 aa, Homo sapiens
  misc_feature (126)..(126): Xaa can be any naturally occurring amino acid
  misc_feature (136)..(136): Xaa can be any naturally occurring amino acid
  misc_feature (138)..(138): Xaa can be any naturally occurring amino acid
MFSALKKLVGSDQAPGRDKNIPAGLQSMNQALQRRFAKGVQYNMKIVIRGDRNTGKTALWHRLQGRPFVEEYIPTQEIQVTSIHWSYKTTDDIVKVEVWDVVDKGKCKKRGDGLKMENDPQEAESXMALGPVPSLXLXP

SEQ ID NO: 876349 - protein, 125 aa, Homo sapiens
PEEHEAKGGVLHRGAPGKGEPAQPAEEADRQDPHEGDQREVPPGKPQARAWLAAHPHDSWVDTGSGPPLRAHSLPRMSHPFPAPTSHQGQMDLDFPSNLMSTETLKCKRSAPHLPPARVPRRGWH

SEQ ID NO: 876350 - protein, 118 aa, Homo sapiens
  misc_feature (1)..(1): Xaa can be any naturally occurring amino acid
  misc_feature (10)..(10): Xaa can be any naturally occurring amino acid
XKGPKLSSTXCRRSSRADPRAQDFATRCQPGAGGVPVTAWGGICLCTIAFAAAPWLPCALLSWKRPGIGGPQAGPCRCWAFRPSVSLLCKKGGDSWLQPGSVDTLALSGQSRQCFSGM

SEQ ID NO: 876351 - protein, 878 aa, Homo sapiens; identical to SEQ ID NO: 876336

SEQ ID NO: 876352 - protein, 878 aa, Homo sapiens; identical to SEQ ID NO: 876336

SEQ ID NO: 876353 - protein, 1423 aa, Homo sapiens
MGKEGRELRGHGHKWFRKRVWPLAGDAVPKSSKVSMANRPLALLPLGALLRQLPNPVPTRMSPEEHEQREASFIEERRARENRLNQQKKLIDKIHTKETSEKYRRGQMDLDFPSNLMSTETLKLRRKETSTAEMEYQSGVTAVVEKVKSAVRCSHVWDITSRFLAQRNTEENLELQMEDCEEWRVQLKALVKQLELEEAVLKFRQKPSSISFKSVEKKMTDMLKEEEERLQLAHSNMTKGQELLLTIQMGIDNLYVRLMGINLPATQREVVLSNTLDLNSKLAYCEGKLTYLADRVQMVSRTEEGDTKVRDTLESSTLMEKYNTRISFENREEDMIDTFQFPDMDHSYVPSRAEIKRQAQRLIEGKLKAAKKKKKYAPPPRSLLCYTNKHFSRTAADAGATGVSERSTGHAGSGEVLRKEAARARNCAPEPRAHAPTARAAPPRPSRRPVAAHPSLSRRAGAKMAALTPGERSRRSRGGRSGAAAAEVPESPLGAALRRRDPGLWPRRLRPPGGPGPPGHGASRTPSPPPLSSPAAPGLGRPSGKMFSALKKLVGSDQAPGRDKNIPAGLQSMNQALQRRFAKGVQYNMKIVIRGDRNTGKTALWHRLQGRPFVEEYIPTQEIQVTSIHWSYKTTDDIVKVEVWDVVDKGKCKKRGDGLKMENDPQEAESEMALDAEFLDVYKNCNGVVMMFDITKQWTFNYILRELPKVPTHVPVCVLGNYRDMGEHRVILPDDVRDFIDNLDRPPGSSYFRYAESSMKNSFGLKYLHKFFNIPFLQLQRETLLRQLETNQLDMDATLEELSVQQETEDQNYGIFLEMMEARSRGHASPLAANGQSPSPGSQSPVVPAGAVSTGSSSPGTPQPAPQLPLNAAPPSSVPPVPPSEALPPPACPSAPAPRRSIISRLFGTSPATEAAPPPPEPVPAAQGPATVQSVEDFVPDDRLDRSFLEDTTPARDEKKVGAKAAQQDSDSDGEALGGNPMVAGFQDDVDLEDQPRGSPPLPAGPVPSQDITLSSEEEAEVAAPTKGPAPAPQQCSEPETKWSSIPASKPRRGTAPTRTAAPPWPGGVSVRTGPEKRSSTRPPAEMEPGKGEQASSSESDPEGPIAAQMLSFVMDDPDFESEGSDTQRRADDFPVRDDPSDVTDEDEGPAEPPPPPKLPLPAFRLKNDSDLFGLGLEEAGPKESSEEGKEGKTPSKEKKKKKKKGKEEEEKAAKKKSKHKKSKDKEEGKEERRRRQQRPPRSRERTAADELEAFLGGGAPGGPPPWGWRLRGALGRRGQWPPWGGGRACHCLGRHLPLYHRLCRCPVAAVCASELEEAGHWWSPGWALQVLGLQAQCEPALQEGRGQLASARLGGHPGPLGAEPPVFLRDVTEAQEGPVRVCLQRLGRGRLAVGCALPRHLLALRAHLGPQHAYGSASGREP

SEQ ID NO: 876354 - protein, 878 aa, Homo sapiens; identical to SEQ ID NO: 876336

SEQ ID NO: 876355 - protein, 878 aa, Homo sapiens
MFSALKKLVGSDQAPGRDKNIPAGLQSMNQALQRRFAKGVQYNMKIVIRGDRNTGKTALWHRLQGRPFVEEYIPTQEIQVTSIHWSYKTTDDIVKVEVWDVVDKGKCKKRGDGLKMENDPQEAESEMALDAEFLDVYKNCNGVVMMFDITKQWTFNYILRELPKVPTHVPVCVLGNYRDMGEHRVILPDDVRDFIDNLDRPPGSSYFRYAESSMKNSFGLKYLHKFFNIPFLQLQRETLLRQLETNQLDMDATLEELSVQQETEDQNYGIFLEMMEARSRGHASPLAANGQSPSPGSQSPVVPAGAVSTGSSSPGTPQPAPQLPLNAAPPSSVPPVPPSEALPPPACPSAPAPRRSIISRLFGTSPATEAAPPPPEPVPAAQGPATVQSVEDFVPDDRLDRSFLEDTTPARDEKKVGAKAAQQDSDSDGEALGGNPMVAGFQDDVDLEDQPRGSPPLPAGPVPSQDITLSSEEEAEVAAPTKGPAPAPQQCSEPETKWSSIPASKPRRGTAPTRTAAPPWPGGVSVRTGPEKRSSTRPPAEMEPGKGEQASSSESDPEGPIAAQMLSFVMDDPDFESEGSDTQRRADDFPVRDDPSDVTDEDEGPAEPPPPPKLPLPAFRLKNDSDLFGLGLEEAGPKESSEEGKEGKTPSKEKKKKKKKGKEEEEKAAKKKSKHKKSKDKEEGKEERRRRQQRPPRSRERTAADELEAFLGGGAPGGPPPWGWRLRGALGRRGQWPPWGGGRACHCLGRHLPLYHRLCRCPVAAVCASELEEAGHWWSPGWALQVLGLQAQCEPALQEGRGQLASARLGGHPGPLGAEPPVFLRDVRSVYRGWAGAAWLWGVRCPGTCLPSALIWGRSMPMVPLPAGSPEHGCADSP

SEQ ID NO: 876356 - protein, 880 aa, Homo sapiens
MFSALKKLVGSDQAPGRDKNIPAGLQSMNQALQRRFAKGVQYNMKIVIRGDRNTGKTALWHRLQGRPFVEEYIPTQEIQVTSIHWSYKTTDDIVKVEVWDVVDKGKCKKRGDGLKMENDPQEAESEMALDAEFLDVYKNCNGVVMMFDITKQWTFNYILRELPKVPTHVPVCVLGNYRDMGEHRVILPDDVRDFIDNLDRPPGSSYFRYAESSMKNSFGLKYLHKFFNIPFLQLQRETLLRQLETNQLDMDATLEELSVQQETEDQNYGIFLEMMEARSRGHASPLAANGQSPSPGSQSPVVPAGAVSTGSSSPGTPQPAPQLPLNAAPPSSVPPVPPSEALPPPACPSAPAPRRSIISRLFGTSPATEAAPPPPEPVPAAQGPATVQSVEDFVPDDRLDRSFLEDTTPARDEKKVGAKAAQQDSDSDGEALGGNPMVAGFQDDVDLEDQPRGSPPLPAGPVPSQDITLSSEEEAEVAAPTKGPAPAPQQCSEPETKWSSIPASKPRRGTAPTRTAAPPWPGGVSVRTGPEKRSSTRPPAEMEPGKGEQASSSESDPEGPIAAQMLSFVMDDPDFESEGSDTQRRADDFPVRDDPSDVTDEDEGPAEPPPPPKLPLPAFRLKNDSDLFGLGLEHPTPPLSHNKNQGKEGKTPSKEKKKKKKKGKEEEEKAAKKKSKHKKSKDKEEGKEERRRRQQRPPRSRERTAADELEAFLGGGAPGGPPPWGWRLRGALGRRGQWPPWGGGRACHCLGRHLPLYHRLCRCPVAAVCASELEEAGHWWSPGWALQVLGLQAQCEPALQEGRGQLASARLGGHPGPLGAEPPVFLRDVTEAQEGPVRVCLQRLGRGRLAVGCALPRHLLALRAHLGPQHAYGSASGREP

SEQ ID NO: 876357 - protein, 832 aa, Homo sapiens
MFSALKKLVGSDQAPGRDKNIPAGLQSMNQALQRRFAKGVQYNMKIVIRGDRNTGKTALWHRLQGRPFVEEYIPTQEIQVTSIHWSYKTTDDIVKVEVWDVVDKGKCKKRGDGLKMENDPQEAESEMALDAEFLDVYKNCNGVVMMFDITKQWTFNYILRELPKVPTHVPVCVLGNYRDMGEHRVILPDRETLLRQLETNQLDMDATLEELSVQQETEDQNYGIFLEMMEARSRGHASPLAANGQSPSPGSQSPVVPAGAVSTGSSSPGTPQPAPQLPLNAAPPSSVPPVPPSEALPPPACPSAPAPRRSIISRLFGTSPATEAAPPPPEPVPAAQGPATVQSVEDFVPDDRLDRSFLEDTTPARDEKKVGAKAAQQDSDSDGEALGGNPMVAGFQDDVDLEDQPRGSPPLPAGPVPSQDITLSSEEEAEVAAPTKGPAPAPQQCSEPETKWSSIPASKPRRGTAPTRTAAPPWPGGVSVRTGPEKRSSTRPPAEMEPGKGEQASSSESDPEGPIAAQMLSFVMDDPDFESEGSDTQRRADDFPVRDDPSDVTDEDEGPAEPPPPPKLPLPAFRLKNDSDLFGLGLEEAGPKESSEEGKEGKTPSKEKKKKKKKGKEEEEKAAKKKSKHKKSKDKEEGKEERRRRQQRPPRSRERTAADELEAFLGGGAPGGPPPWGWRLRGALGRRGQWPPWGGGRACHCLGRHLPLYHRLCRCPVAAVCASELEEAGHWWSPGWALQVLGLQAQCEPALQEGRGQLASARLGGHPGPLGAEPPVFLRDVTEAQEGPVRVCLQRLGRGRLAVGCALPRHLLALRAHLGPQHAYGSASGREP

SEQ ID NO: 876358 - protein, 658 aa, Homo sapiens [sequence omitted]

SEQ ID NO: 876359 - protein, 327 aa, Homo sapiens
MFSALKKLVGSDQAPGRDKNIPAGLQSMNQALQRRFAKGVQYNMKIVIRGDRNTGKTALWHRLQGRPFVEEYIPTQEIQVTSIHWSYKTTDDIVKVEVWDVVDKGKCKKRGDGLKMENDPQEAESEMALDAEFLDVYKNCNGVVMMFDITKQWTFNYILRELPKVPTHVPVCVLGNYRDMGEHRVILPDDVRDFIDNLDRPPGSSYFRYAESSMKNSFGLKYLHKFFNIPFLQLQRETLLRQLETNQLDMDATLEELSVQQETEDQNYGIFLEMMEARSRGHASPLAANGQSPSPGSQSPVVPAGAVSTGSSSPGTPQPRVERDPLD

SEQ ID NO: 876360 - protein, 257 aa, Homo sapiens; identical to SEQ ID NO: 876344

SEQ ID NO: 876361 - protein, 198 aa, Homo sapiens
MFSALKKLVGSDQAPGRDKNIPAGLQSMNQALQRRFAKGVQYNMKIVIRGDRNTGKTALWHRLQGRPFVEEYIPTQEIQVTSIHWSYKTTDDIVKVEVWDVVDKGKCKKRGDGLKMENDPQEAESEMALDAEFLDVYKNCNGVVMMFDITKQWTFNYILRELPKVPTHVPVCVLGNYRDMGEHRVILPDSPLHWDPVV

SEQ ID NO: 876362 - protein, 142 aa, Homo sapiens
MFSALKKLVGSDQAPGRDKNIPAGLQSMNQALQRRFAKGVQYNMKIVIRGDRNTGKTALWHRLQGRPFVEEYIPTQEIQVTSIHWSYKTTDDIVKVEVWDVVDKGKCKKRGDGLKMENDPQEAESETAWMCRRVQNCTGVSP

SEQ ID NO: 876363 - protein, 213 aa, Homo sapiens
MSRVLVPCHVKGSVALQVGDVRTSQGRPGVLVIDVTFPSVAPFELQEITFKNYYTAFLSIRVRQYTSAHTPAKWVTCLRDYCLMPDPHSEEGAQEYVSLFKHQMLCDMARISELRLILRQPSPLWLSFTVEELQIYQQGPKSPSVTFPKWLSHPVPCEQPALLREGLPDPSRVSSEVQQMWALTEMIRASHTSARIGRFDVDGCYDLNLLSYT

SEQ ID NO: 876364 - protein, 192 aa, Homo sapiens
MSRVLVPCHVKGSVALQVGDVRTSQGRPGVLVIDVTFPSVAPFELQEITFKNYYTAFLSIRVRQYTSAHTPAKWVTCLRDYCLMPDPHSEEGAQEYVSLFKHQMLCDMARISELRLILRQPSPLWLSFTVEELQIYQQGPKSPSVTFPKWLSHPVPCEQPALLREGILRGAADVGTDRDDPGQSHLRKDRPL

SEQ ID NO: 876365 - protein, 171 aa, Homo sapiens
MSRVLVPCHVKGSVALQVGDVRTSQGRPGVLVIDVTFPSVAPFELQEITFKNYYTAFLSIRVRQYTSAHTPAKWVTCLRDYCLMPDPHSEEGAQEYVSLFKHQMLCDMARISELRLILRQPSPLWLSFTVEELQIYQQGPKSPSVTFPKWLSHPVPCEQPALLREVSPHPR

SEQ ID NO: 876366 - protein, 175 aa, Homo sapiens
MSRVLVPCHVKGSVALQVGDVRTSQGRPGVLVIDVTFPSVAPFELQEITFKNYYTAFLSIRVRQYTSAHTPAKWVTCLRDYCLMPDPHSEEGAQEYVSLFKHQSPSVTFPKWLSHPVPCEQPALLREGLPDPSRVSSEVQQMWALTEMIRASHTSARIGRFDVDGCYDLNLLSYT

SEQ ID NO: 876367 - protein, 213 aa, Homo sapiens; identical to SEQ ID NO: 876363

SEQ ID NO: 876368 - protein, 213 aa, Homo sapiens; identical to SEQ ID NO: 876363

SEQ ID NO: 876369 - protein, 204 aa, Homo sapiens
MSRVLVPCHVKGSVALQVGDVRTSQGRPGVLVIDVTFPSVAPFELQEITFKNYYTAFLSIRVRQYTSAHTPAKWVTCLRDYCLMPDPHSEEGAQEYVSLFKHQMLCDMARISELRLILRQPSPLWLSFTVEELQIYQQGPKSPSVTFPKWLSHPVPCEQPALLREGLPDPSRVSSEVQQMWALTEMIRASHTSARIGRFDVDVA

SEQ ID NO: 876370 - protein, 213 aa, Homo sapiens; identical to SEQ ID NO: 876363

SEQ ID NO: 876371 - protein, 169 aa, Homo sapiens
MSRVLVPCHVKGSVALQVGDVRTSQGRPGVLVIDVTFPSVAPFELQEITFKNYYTAFLSIRVRQYTSAHTPAKWVTCLRDYCLMPDPHSEEGAQEYVSLFKHQMLCDMARISELRLILRQPSPLWLSFTVEELQIYQQGPKSPSVTFPKWLSHPVPCEQPALLRELEGP

SEQ ID NO: 876372 - protein, 213 aa, Homo sapiens; identical to SEQ ID NO: 876363

SEQ ID NO: 876373 - protein, 171 aa, Homo sapiens; identical to SEQ ID NO: 876365

SEQ ID NO: 876374 - protein, 174 aa, Homo sapiens
GRLLWSKEAQQGAPGGGIGGCKGPGVRRAVRGGWGKGSAQALGAWVAGKDLLWCPEGHRRDPVEAKAEAAQGFLFPSRASVAAVTLTFRFWGTQGQRLQHCARLRRGPSSLPHTFRESLLFQNPTDDLLLSELLLLLKGPAWSRFSDECKRSPASTLPQTALPGCLLHARPAPG

SEQ ID NO: 876375 - protein, 145 aa, Homo sapiens
VQKCRHSRQAKHLLLPSPPWQNPQSGSTESPRLQLCAKQPRGTEHGLASCPQVWRRDAHRGLPGGAAMTPGDTWASFNPRAGHSKSQGEGQESSGASRQDRHPVSRWVERQREAWGAPRSSSAGGVKVAATTEREPEFKIKTGKA

SEQ ID NO: 876376 - protein, 198 aa, Homo sapiens
MAQKPKVDPHVGRLGYLQALVTEFQETQSQDAKEQVLANLANFAYDPSNYEYLRQLQVLDLFLDSLSEENETLVEFAIGGLCNLCPDRANKEHILHAGGVPLIINCLSSPNEETVLSAITTLMHLSPPGRSFLPELTATPVVQCMLRFSLSASARLRNLAQIFLEDFCSPRQVAEARSRQAHSALGIPLPRSVAPRQR

SEQ ID NO: 876377 - protein, 159 aa, Homo sapiens
MLVRGWVDSNYEYLRQLQVLDLFLDSLSEENETLVEFAIGGLCNLCPDRANKEHILHAGGVPLIINCLSSPNEETVLSAITTLMHLSPPGRSFLPELTATPVVQCMLRFSLSASARLRNLAQIFLEDFCSPRQVAEARSRQAHSALGIPLPRSVAPRQR

SEQ ID NO: 876378 - protein, 140 aa, Homo sapiens
QGRWEEARGYSIQTLPCSPTGGLCNLCPDRANKEHILHAGGVPLIINCLSSPNEETVLSAITTLMHLSPPGRSFLPELTATPVVQCMLRFSLSASARLRNLAQIFLEDFCSPRQVAEARSRQAHSALGIPLPRSVAPRQR

SEQ ID NO: 876379 - protein, 198 aa, Homo sapiens; identical to SEQ ID NO: 876376

SEQ ID NO: 876380 - protein, 151 aa, Homo sapiens
MAQKPKVDPHVGRLGYLQALVTEFQETQSQDAKEQVLANLANFAYDPSNYEYLRQLQVLDLFLDSLSEENETLVEFAIAAAVLNGDGGPCRSMWLNLHQGAIELLQIKLLPLEKNWRKSQSSPHQKCLPSGVFPAGVSSGSGSNFPRTGAP

SEQ ID NO: 876381 - protein, 949 aa, Homo sapiens
DADKLKKKTAEDRTQAFHLRQNLSALDKMHEEQELFTEKMRGELRACRQRRDLIDKQQEAVAAEIATEEEAGNMAAVGRLQAVSRRLFAELENERDLQSRTEAVLKESENTMWHIEIQEGRLEAFRTADREEVEATGRRLQVRAAEQLCREQEALGKVERNRLLRIRKSLNTQKELGLRHQKLLEDARKNHKVAVRFLKASLGRIREQEKKEEMECHEYMRRRMDAVVALKGSISANRDTLRKFQAWDRAKAELAEQRVQAEKKAILAQGRDAFRHLVHQRRRQELEAQKRAFEEEQKLRKQEIISRILKEEAEEEKRKKQHPPTSARHRLTLRDKTWNYISDFCKKTTVPTNTYTLDYEAAAGPGPSRLLEVVSSELIQGDPGASSEEETLAEPEISGLWNEDYKPYQVPKEDVDRKPVGGTKMDKDILERTVERLRSRVVHKQVVWGREFQGRPFNSKPELLHFQDFDIGKVYKKKITLVNTTYTINYCKLVGVEEHLRDFIHVDFDPPGPLSAGMSCEVLVTFKPMINKDLEGNISFLAQTGEFSVPLKCSTKKCSLSLDKELIDFGSYVVGETTSRTITLTNVGGLGTTFKFLPASEPCEMDDSQSALKLSSLLTYEDKSLYDKAATSFSEQQLEGTESSQADMQSRKELEKLDKEQEEEQPAGEPGCQAKPGWAGGEGLRAAFQGAEGPRGGLESREFSQAFDVKGRLSKKIFLCATEVLFLEWTKMYIHVDANRRLEGTSSIGPAGPARAEPHRAGKRLCGAPWRGRAAGGFCLALQLWLLLDAHQRGEVPRNGRALPSPCLLPCSPPPSGIACVSSLLLLIVFPHTHRDPETSVLLLSVFSVVRVPHALQLSAELGRFSTACVSLTSGVSRTSGVSRTSCPHHCVAFPFLREPRVLDPSFCQCALGSVRGTHCCEGRSALPLGLCVSSHRAPGWGSCLHHRA

SEQ ID NO: 876382 - protein, 468 aa, Homo sapiens
TVLWVVRRASALRSTNPRVLWVTPCSFDPPGPLSAGMSCEVLVTFKPMINKDLEGNISFLAQTGEFSVPLKCSTKKCSLSLDKELIDFGSYVVGETTSRTITLTNVGGLGTTFKFLPASEPCEMDDSQSALKLSSLLTYEDKSLYDKAATSFSEQQLEGTESSQADMQSRKELEKLDKEQEEEQPAGEPGCQAKPGWAGGEGLRAAFQGAEGPRGGLESREFSQAFDVKGRLSKKIFLCATEVLFLEWTKMYIHVDANRRLEGTSSIGPAGPARAEPHRAGKRLCGAPWRGRAAGGFCLALQLWLLLDAHQRGEVPRNGRALPSPCLLPCSPPPSGIACVSSLLLLIVFPHTHRDPETSVLLLSVFSVVRVPHALQLSAELGRFSTACVSLTSGVSRTSGVSRTSCPHHCVAFPFLREPRVLDPSFCQCALGSVRGTHCCEGRSALPLGLCVSSHRAPGWGSCLHHRA

SEQ ID NO: 876383 - protein, 110 aa, Homo sapiens
MHGLFWPFPTETRASIKNGTLSSVSLPAFKRLRCFSLRQGLTSVSRAFLRYNFPCLLLSKLELFISSLGNVDPLSHTYGNIIKHAVRYVVFIFINSLINTDAARFFFSHY

SEQ ID NO: 876384 - protein, 102 aa, Homo sapiens
MHGLFWPFPTETRASIKNGTLSSVSLPAFKRLRCFSLRQGLTSVSRAFLRYNFPCLLLSKLELFISSLGNVDPLSHTYGNIIKHAVRYVVFIFINSLINKRV

SEQ ID NO: 876385 - protein, 111 aa, Homo sapiens
MGMWPQAVSISGCWLCSKPSVLVHIAPCPGLLRVGHLSLLLTVWLSSPLQAWGWCDAAICQTRAPESQRYNQRQKNKNHEQSRCLYYFPRTIALFLQWAWGRSNSHRSSST

SEQ ID NO: 876386 - protein, 109 aa, Homo sapiens
PPAKPPSGPRRPTRPRRHSNAEGFDSQGALRLLSQEGREDLTEAGEGRTPARLPQTHTLGSLSFPICTTTRLTQRSGFTVAITRPTLCLTSPTFQHTPPSRISPASCPA

SEQ ID NO: 876387 - protein, 275 aa, Homo sapiens
GGAAPSTPAAAGFRGGRRADPRRRLRDPTHPTRTHDLQNEDTDHSSTNTDRDSYTDGQRELQQGLWEVTRRDRKDVGSQKGTSDNMGGTTRDDGTARDSGHDRGDTPGTRSKEQRRTPIPTRIPEDGKERKTEAHTREHKATVRKGHRQGAQGIGNGMLATFYERQVDHNHEAHNMNLDTWRGGTHEETAKRPGQRKPKGRHSCRPIEEDTRVSNREQCGPPGECTRDQPEGTNDNRAKSTRQRTHRSEEHGTTWRRNRGKQWENRVRGKDADTP

SEQ ID NO: 876388 - protein, 387 aa, Homo sapiens [sequence omitted]

SEQ ID NO: 876389 - protein, 317 aa, Homo sapiens
MAAAALTSLSTSPLLLGAPVAAFSPEPGLEPWKEALVRPPGSYSSSSNSGDWGWDLASDQSSPSTPSPPLPPEAAHFLFGEPTLRKRKSPAQVMFQCLWKSCGKVLSTASAMQRHIRLVHLGCGGAWGAAGPAGWLGLGGPARPPLQLPLAGCVSRRRQAEPDQSDGEEDFYYTELDVGVDTLTDGLSSLTPVSPTASMPPAFPRLELPELLEPPALPSPLRPPAPPLPPPPVLSTVANPQSCHSDRVYQGCLTPARLEPQPTEVGACPPALSSRIGVTLRKPRGDAKKCRKVYGMERRDLWCTACRWKKACQRFLD

SEQ ID NO: 876390 - protein, 269 aa, Homo sapiens
GWEWGAWCARVPRPARGPTRGGAQSSGWVTRTPPPSPPEPPQEKPGWTRSWLPLPLQACPPALSFWGPQLQPSAQSPAQVMFQCLWKSCGKVLSTASAMQRHIRLVHLGRQAEPDQSDGEEDFYYTELDVGVDTLTDGLSSLTPVSPTASMPPAFPRLELPELLEPPALPSPLRPPAPPLPPPPVLSTVANPQSCHSDRVYQGCLTPARLEPQPTEVGACPPALSSRIGVTLRKPRGDAKKCRKVYGMERRDLWCTACRWKKACQRFLD

SEQ ID NO: 876391 - protein, 245 aa, Homo sapiens
MAAAALTSLSTSPLLLGAPVAAFSPEPGLEPWKEALVRPPGSYSSSSNSGDWGWDLASDQSSPSTPSPPLPPEAAHFLFGEPTLRKRKSPAQVMFQCLWKSCGKVLSTASAMQRHIRLVHLGRQAEPDQSDGEEDFYYTELDVGVDTLTDGLSSLTPVSPTASMPPAFPRLELPELLEPPALPSPLRPPAPPLPPPPVLSTVANPQSCHSDRVYQVGEATGGSWGGSQGSLEGSEALAVSPCRAA

SEQ ID NO: 876392 - protein, 206 aa, Homo sapiens
MAAAALTSLSTSPLLLGAPVAAFSPEPGLEPWKEALVRPPGSYSSSSNSGDWGWDLASDQSSPSTPSPPLPPEAAHFLFGEPTLRKRKSPAQVMFQCLWKSCGKVLSTASAMQRHIRLVHLGRQAEPDQSDGLPDARPPGAAAHGGRSLPTRLVLQDRSHPEEAPRRREEVPEGVWHGAPGPLVHSLPLEESLPAVPGLSPARSRT

SEQ ID NO: 876393 - protein, 206 aa, Homo sapiens; identical to SEQ ID NO: 876392

SEQ ID NO: 876394 - protein, 253 aa, Homo sapiens
GGAAPSTPAAAGFRGGRRADPRRRLRDPPPPATASAESAPSPSAGLFRGRRLRGLGVRAAAGVGAAGLGPGGPPDVDGGGGGAPDSVGAHPRPSAEVSGRPGASGLGVRRGGGWGAETPAPTEARSGPQVCNYQPPPSSSALEELSRNIDDWESLHLPPPQFLGARAQNPERVAVRLCAEEAARSAWGDCPGIPGAPDRHLPTPARPDTSVWLPGQGRALAWLAGAWGAARASSPVSPWLLPAAGHSHLPGLA

SEQ ID NO: 876395 - protein, 387 aa, Homo sapiens [sequence omitted]

SEQ ID NO: 876396 - protein, 282 aa, Homo sapiens [sequence omitted]

SEQ ID NO: 876397 - protein, 282 aa, Homo sapiens [sequence omitted]

SEQ ID NO: 876398 - protein, 258 aa, Homo sapiens
MAAAALTSLSTSPLLLGAPVAAFSPEPGLEPWKEALVRPPGSYSSSSNSGDWGWDLASDQSSPSTPSPPLPPEAAHFLFGEPTLRKRKSPAQVMFQCLWKSCGKVLSTASAMQRHIRLVHLGRQAEPDQSDGEEDFYYTELDVGVDTLTDGLSSLTPVSPTASMPPAFPRLELPELLEPPALPSPLRPPAPPLPPPPVLSTVANPQSCHSDRVYQGCLTPARLEPQPTEVGACPPAFPPLALNSTALGPWGCFYHVCF

SEQ ID NO: 876399 - protein, 102 aa, Homo sapiens
RPHDFILRGRAIPIKQGMLLKRSGKWLKTWKKKYVTLCSNGVLTYYSSLGDYMKNIHKKEIDLRTSTIKVPGKWPSLATSACAPISSSKSNGLSKDMRHRAG

SEQ ID NO: 876400 - protein, 185 aa, Homo sapiens
TSQEDLYFSVPPTANTPTPICKQSMGWSNLFTSEKGSDPDKGRKALESHADTIGSGRAIPIKQGMLLKRSGKWLKTWKKKYVTLCSNGVLTYYSSLGDYMKNIHKKEIDLRTSTIKVPGKWPSLATSACAPISSSKSNGLSKDMEALHMSANSDIGLGDSICFSPSISSTTSPKLNLPPSPHANK

SEQ ID NO: 876401 - protein, 164 aa, Homo sapiens
TSQEDLYFSVPPTANTPTPICKQSMGWSNLFTSEKGSDPDKGRKALESHADTIGSGRAIPIKQGMLLKRSGKWLKTWKKKYVTLCSNGVLTYYSSLGDYMKNIHKKEIDLRTSTIKVPGKWPSLATSACAPISSSKSNGLSKDMEALHMSANSHFALRACPVFQ

SEQ ID NO: 876402 - protein, 199 aa, Homo sapiens
MPNYKLTYFNMRGRAEIIRYIFAYLDIQYEDHRIEQADWPEIKSTLPFGKIPILEVDGLTLHQSLAIARYLTKNTDLAGNTEMEQCHVDAIVDTLDDFMSCFPWAEKKQDVKEQMFNELLTYNAPHLMQDLDTYLGGREWLIGNSVTWADFYWEICSTTLLVFKPDLLDNHPRLVTLRKKVQAIPAVANWIKRRPQTKL

SEQ ID NO: 876403 - protein, 102 aa, Homo sapiens
FFTIIIFFICYQSRTEQMFNELLTYNAPHLMQDLDTYLGGREWLIGNSVTWADFYWEICSTTLLVFKPDLLDNHPRLVTLRKKVQAIPAVANWIKRRPQTKL

SEQ ID NO: 876404 - protein, 170 aa, Homo sapiens
MAREHAPSIIFMDEIDSIGSSRLEGGSGGDSEVQRTMLELLNQLDGFEATKNIKVIMATNRIDILDSALLRPGRIDRKIEFPPPNEEARLDILKIHSRKMNLTRGINLRKIAELMPGASGAEVKGVCTEAGMYALRERRVHVTQEDFEMAVAKVMQKDSEKNMSIKKLWK

SEQ ID NO: 876405 - protein, 103 aa, Homo sapiens
SWRATPAAPPPPYPNEKENLSADGLLFIHSRKMNLTRGINLRKIAELMPGASGAEVKGVCTEAGMYALRERRVHVTQEDFEMAVAKVMQKDSEKNMSIKKLWK

SEQ ID NO: 876406 - protein, 267 aa, Homo sapiens
MALDGPEQMELEEGKAGSGLRQYYLSKIEELQLIVNDKSQNLRRLQAQRNELNAKVRLLREELQLLQEQGSYVGEVVRAMDKKKVLVKVHPEGKFVVDVDKNIDINDVTPNCRVALRNDSYTLHKILPNKVDPLVSLMMVEKVPDSTYEMIGGLDKQIKEIKEVIELPVKHPELFEALGIAQPKGVLLYGPPGTGKTLLARAVAHHTDCTFIRVSGSELVQKFIGEGGKNGEGAVCHGTGTCSIYHLHGRNRLHRLLAAGGGFWRGQ

SEQ ID NO: 876407 - protein, 267 aa, Homo sapiens; identical to SEQ ID NO: 876406

SEQ ID NO: 876408 - protein, 259 aa, Homo sapiens
MELEEGKAGSGLRQYYLSKIEELQLIVNDKSQNLRRLQAQRNELNAKVRLLREELQLLQEQGSYVGEVVRAMDKKKVLVKVHPEGKFVVDVDKNIDINDVTPNCRVALRNDSYTLHKILPNKVDPLVSLMMVEKVPDSTYEMIGGLDKQIKEIKEVIELPVKHPELFEALGIAQPKGVLLYGPPGTGKTLLARAVAHHTDCTFIRVSGSELVQKFIGEGGKNGEGAVCHGTGTCSIYHLHGRNRLHRLLAAGGGFWRGQ

SEQ ID NO: 876409 - protein, 259 aa, Homo sapiens; identical to SEQ ID NO: 876408

SEQ ID NO: 876410 - protein, 244 aa, Homo sapiens
MEFVSCLPQLIVNDKSQNLRRLQAQRNELNAKVRLLREELQLLQEQGSYVGEVVRAMDKKKVLVKVHPEGKFVVDVDKNIDINDVTPNCRVALRNDSYTLHKILPNKVDPLVSLMMVEKVPDSTYEMIGGLDKQIKEIKEVIELPVKHPELFEALGIAQPKGVLLYGPPGTGKTLLARAVAHHTDCTFIRVSGSELVQKFIGEGGKNGEGAVCHGTGTCSIYHLHGRNRLHRLLAAGGGFWRGQ

SEQ ID NO: 876411 - protein, 170 aa, Homo sapiens; identical to SEQ ID NO: 876404

SEQ ID NO: 876412 - protein, 240 aa, Homo sapiens
MELEEGKAGSGLRQYYLSKIEELQLIVNDKSQNLRRLQAQRNELNAKVRLLREELQLLQEQGSYVGEVVRAMDKKKVLVKVTPNCRVALRNDSYTLHKILPNKVDPLVSLMMVEKVPDSTYEMIGGLDKQIKEIKEVIELPVKHPELFEALGIAQPKGVLLYGPPGTGKTLLARAVAHHTDCTFIRVSGSELVQKFIGEGGKNGEGAVCHGTGTCSIYHLHGRNRLHRLLAAGGGFWRGQ

SEQ ID NO: 876413 - protein, 170 aa, Homo sapiens; identical to SEQ ID NO: 876404

SEQ ID NO: 876414 - protein, 170 aa, Homo sapiens; identical to SEQ ID NO: 876404

SEQ ID NO: 876415 - protein, 170 aa, Homo sapiens; identical to SEQ ID NO: 876404

SEQ ID NO: 876416 - protein, 167 aa, Homo sapiens
MALDGPEQMELEEGKAGSGLRQYYLSKIEELQLIVNDKSQNLRRLQAQRNELNAKVRLLREELQLLQEQGSYVGEVVRAMDKKKVLVKVHPEGKFVVDVDKNIDINDVTPNCRVALRNDSYTLHKILPNKVDPLVSLMMVEKVPDSTYEMIGGLDKQIKEIKGYHGY

SEQ ID NO: 876417 - protein, 187 aa, Homo sapiens
  misc_feature (73)..(74): Xaa can be any naturally occurring amino acid
DICGSGLGGLTDKLTQAQIFDYACNPQLFPEVQRTMLELLNQLDGFEATKNIKVIMATNRIDILDSALLRPGXXAQPKGVLLYGPPGTGKTLLARAVAHHTDCTFIRVSGSELVQKFIGEGGKNGEGAVCHGTGTCSIYHLHGRNRLHRLLAAGGGFWRGQACAQKLACMPCENGESMSLRRTLRWQ

SEQ ID NO: 876418 - protein, 267 aa, Homo sapiens; identical to SEQ ID NO: 876406

SEQ ID NO: 876419 - protein, 267 aa, Homo sapiens; identical to SEQ ID NO: 876406

SEQ ID NO: 876420 - protein, 267 aa, Homo sapiens; identical to SEQ ID NO: 876406

SEQ ID NO: 876421 - protein, 267 aa, Homo sapiens; identical to SEQ ID NO: 876406

SEQ ID NO: 876422 - protein, 259 aa, Homo sapiens; identical to SEQ ID NO: 876408

SEQ ID NO: 876423 - protein, 271 aa, Homo sapiens
TLQDLGPLGREQMELEEGKAGSGLRQYYLSKIEELQLIVNDKSQNLRRLQAQRNELNAKVRLLREELQLLQEQGSYVGEVVRAMDKKKVLVKVHPEGKFVVDVDKNIDINDVTPNCRVALRNDSYTLHKILPNKVDPLVSLMMVEKVPDSTYEMIGGLDKQIKEIKEVIELPVKHPELFEALGIAQPKGVLLYGPPGTGKTLLARAVAHHTDCTFIRVSGSELVQKFIGEGGKNGEGAVCHGTGTCSIYHLHGRNRLHRLLAAGGGFWRGQ

SEQ ID NO: 876424 - protein, 256 aa, Homo sapiens
APRPRTTPAHNIICPRLNELQLIVNDKSQNLRRLQAQRNELNAKVRLLREELQLLQEQGSYVGEVVRAMDKKKVLVKVHPEGKFVVDVDKNIDINDVTPNCRVALRNDSYTLHKILPNKVDPLVSLMMVEKVPDSTYEMIGGLDKQIKEIKEVIELPVKHPELFEALGIAQPKGVLLYGPPGTGKTLLARAVAHHTDCTFIRVSGSELVQKFIGEGGKNGEGAVCHGTGTCSIYHLHGRNRLHRLLAAGGGFWRGQ

SEQ ID NO: 876425 - protein, 290 aa, Homo sapiens
LIHTLNNETDIRKIGGLLKTIPLTSTSLTIGSLALAGIPFLTGFYSKDHIIETQTYHTQTPEATSTWLQAQRNELNAKVRLLREELQLLQEQGSYVGEVVRAMDKKKVLVKVHPEGKFVVDVDKNIDINDVTPNCRVALRNDSYTLHKILPNKVDPLVSLMMVEKVPDSTYEMIGGLDKQIKEIKEVIELPVKHPELFEALGIAQPKGVLLYGPPGTGKTLLARAVAHHTDCTFIRVSGSELVQKFIGEGGKNGEGAVCHGTGTCSIYHLHGRNRLHRLLAAGGGFWRGQ

SEQ ID NO: 876426 - protein, 248 aa, Homo sapiens
MALDGPEQMELEEGKAGSGLRQYYLSKIEELQLIVNDKSQNLRRLQAQRNELNAKVRLLREELQLLQEQGSYVGEVVRAMDKKKVLVKVTPNCRVALRNDSYTLHKILPNKVDPLVSLMMVEKVPDSTYEMIGGLDKQIKEIKEVIELPVKHPELFEALGIAQPKGVLLYGPPGTGKTLLARAVAHHTDCTFIRVSGSELVQKFIGEGGKNGEGAVCHGTGTCSIYHLHGRNRLHRLLAAGGGFWRGQ

SEQ ID NO: 876427 - protein, 240 aa, Homo sapiens; identical to SEQ ID NO: 876412

SEQ ID NO: 876428 - protein, 170 aa, Homo sapiens; identical to SEQ ID NO: 876404

SEQ ID NO: 876429 - protein, 187 aa, Homo sapiens; identical to SEQ ID NO: 876417
  misc_feature (73)..(74): Xaa can be any naturally occurring amino acid

SEQ ID NO: 876430 - protein, 128 aa, Homo sapiens
MASTVLWTVFLGKVWQNSRWPGEVSFKVSRLLLHPYHEEDSHDYDVALLQLDHPVVRSAAVRPVCLPARSHFFEPGLHCWITGWGALREGGPISNALQKVDVQLIPQDLCSEVYRYQVTPRMLCAGYR

SEQ ID NO: 876431 - protein, 242 aa, Homo sapiens
MDHHQPGTGRYQVLLNEEDNSESSAIEQPPTSNPAPQIVQAASSAPALETDSSPPPYSSITVEVPTTSDTEVYGEFYPVPPPYSVATSLPTYDEAEKAKAAAMAAAAAETSQRIQEEECPPRDDFSDADQLRVGNDGIFMLAFFMAFIFNWLGFCLSFCITNTIAGRYGAICGFGLSLIKWILIVRFSDYFTGYFNGQYWLWWIFLVLGLLLFFRGFVNYLKVRNMSESMAAAHRTRYFFLL

SEQ ID NO: 876432 - protein, 229 aa, Homo sapiens
MDHHQPGTGRYQVLLNEEDNSESSAIEQPPTSNPAPQIVQAASSAPALETDSSPPPYSSITVEVPTTSDTEVYGEFYPVPPPYSVATSLPTYDEAEKAKAAAMAAAAAETSQRIQEEECPPRDDFSDADQLRVGNDGIFMLAFFMAFIFNWLGFCLSFCITNTIAGRYGAICGFGLSLIKWILIVRFSDYFTGYFNGQYWLWWIFLVLGKFILNAFSLTWIFPKTVRCK

SEQ ID NO: 876433 - protein, 242 aa, Homo sapiens; identical to SEQ ID NO: 876431

SEQ ID NO: 876434 - protein, 248 aa, Homo sapiens
ISIFHLSDAFHIPNATPTKLLNEEDNSESSAIEQPPTSNPAPQIVQAASSAPALETDSSPPPYSSITVEVPTTSDTEVYGEFYPVPPPYSVATSLPTYDEAEKAKAAAMAAAAAETSQRIQEEECPPRDDFSDADQLRVGNDGIFMLAFFMAFIFNWLGFCLSFCITNTIAGRYGAICGFGLSLIKWILIVRFSDYFTGYFNGQYWLWWIFLVLGLLLFFRGFVNYLKVRNMSESMAAAHRTRYFFLL

SEQ ID NO: 876435 - protein, 242 aa, Homo sapiens; identical to SEQ ID NO: 876431

SEQ ID NO: 876436 - protein, 146 aa, Homo sapiens
MDHHQPGTGRYQVLLNEEDNSESSAIEQPPTSNPAPQIVQAASSAPALETDSSPPPYSSITVEVPTTSDTEVYGEFYPVPPPYSVATSLPTYDEAEKAKAAAMAAAAAETSQRIQEEECPPRDDFSDADQLRVGNDGIFMLAFFIF

SEQ ID NO: 876437 - protein, 140 aa, Homo sapiens
MAAAAAETSQRIQEEECPPRDDFSDADQLRVGNDGIFMLAFFMAFIFNWLGFCLSFCITNTIAGRYGAICGFGLSLIKWILIVRFSDYFTGYFNGQYWLWWIFLVLGLLLFFRGFVNYLKVRNMSESMAAAHRTRYFFLL

SEQ ID NO: 876438 - protein, 798 aa, Homo sapiens
CPSPLRDKNKMQRANSVTVDGQGLQVTPVPGTHPLLVFVNPTKWWKTRRTTIDFEGFKLFMKTFLEAELPDDFTAHLFMSFSNKFPHSSPMVKSKPALLSGGLRMNKGAITPPRTTSPANTCSPEVIHLKDIVCYLSLLERGRPEDKLEFMFRLYDTDGNGFLDSSELENIISQMMHVAEYLEWDVTELNPILHEMMEEIDYDHDGTVSLEEWIQGGMTTIPLLVLLGLENNVKDDGQHVWRLKHFNKPAYCNLCLNMLIGVGKQGLCCSFCKYTVHERCVARAPPSCIKTYVKSKRNTDVMHHYWVEGNCPTKCDKCHKTVKCYQGLTGLHCVWCQITLHNKCASHLKPECDCGPLKDHILPPTTICPVVLQTLPTSGVSVPEERQSTVKKEKSGSQQPNKVIDKNKMQRANSVTVDGQGLQVTPVPGTHPLLVFVNPKSGGKQGERIYRKFQYLLNPRQVYSLSGNGPMPGLNFFRDVPDFRVLACGGDGTVGWVLDCIEKANVGKHPPVAILPLGTGNDLARCLRWGGGYEGENLMKILKDIENSTEIMLDRWKFEVIPNDKDEKGDPVPYSIINNYFSIGVDASIAHRFHIMREKHPEKFNSRMKNKFWYFEFGTSETFSATCKKLHESVEIECDGVQIDLINISLEGIAILNIPSMHGGSNLWGESKKRRSHRRIEKKGSDKRTTVTDAKELKFASQDLSDQLLEVVGLEGAMEMGQIYTGLKSAGRRLAQCSCVVIRTSKSLPMQIDGEPWMQTPCTIKITHKNQAPMLMGPPPKTGLFCSLVKRTRNRSKE

SEQ ID NO: 876439 - protein, 798 aa, Homo sapiens; identical to SEQ ID NO: 876438

SEQ ID NO: 876440 - protein, 75 aa, Homo sapiens
MVIVSRCGTGGSVTEHANEVVMKLEALQRPGGLPLSILLVLAGLTKRGASDLRHPIAEDRQSLSCATVQPSLQDV

SEQ ID NO: 876441 - protein, 86 aa, Homo sapiens
SMGAGVVSLSAESSASPSCSQSPTVDVCSYRWTEFPSFCRRSVRPCDLRSSEGGRSGIHHIQAQAMKLPVASSTLLLFSLLLVRHG

SEQ ID NO: 876442 - protein, 131 aa, Homo sapiens
LERFSQVLNVALAGVQCLQSWLTAASASCVLCNSHASASRVAGTTGMHHHAWLIFCILVETVFHYVAQGGLELLSSGNPPASAFQNVRITGVSHETWPQIQQLSDTTESLQLNAGGLSISLRQWEIIMENF

SEQ ID NO: 876443 - protein, 86 aa, Homo sapiens
KAEGAHVAQVHAEHAANLLQGAHPLRLVPAWGLQEAVAVREPQAGVGAGRGAGGTGYVMIATLLPAHTTQRGTGVMGESFKPTHQA

SEQ ID NO: 876444 - protein, 1083 aa, Homo sapiens
MSQTQDYECRSHNVDLPESRIPGSNTRLEWVEIIEPRTRERMYANLVTGECVWDPPAGVRIKRTSENQWWELFDPNTSRFYYYNASTQRTVWHRPQGCDIIPLAKLQTLKQNTESPRASAESSPGRGSSVSREGSTSSSLEPEPDTEKAQELPARAGRPAAFGTVKEDSGSSSPPGVFLEKDYEIYRDYSADGQLLHYRTSSLRWNSGAKERMLIKVADREPSFLAAQGNGYAPDGPPGVRSRRPSGSQHSPSLQTFAPEADGTIFFPERRPSPFLKRAELPGSSSPLLAQPRKPSGDSQPSSPRYGYEPPLYEEPPVEYQAPIYDEPPMDVQFEAGGGYQAGSPQRSPGRKPRPFLQPNKQGPPSPCQQLVLTKQKCPERFLSLEYSPAGKEYVRQLVYVEQAGSSPKLRAGPRHKYAPNPGGGSYSLQPSPCLLRDQRLGVKSGDYSTMEGPELRHSQPPTPLPQAQEDAMSWSSQQDTLSSTGYSPGTRKRKSRKPSLCQATSATPTEGPGDLLVEQPLAEEQPPCGTSLAPVKRAEGEAEGARGAAEPFLAQARLAWEAQQAHFHMKQRSSWDSQQDGSGYESDGALPLPMPGPVVRAFSEDEALAQQENRHWRRGTFEKLGFPQILLEKSVSVQTNLASPEPYLHPSQSEDLAACAQFESSRQSRSGVPSSSCVFPTFTLRKPSSETDIENWASKHFNKHTQGLFRRKVSIANMLAWSSESIKKPMIVTSDRHVKKEACELFKLIQMYMGDRRAKADPLHVALEVATKGWSVQGLRDELYIQLCRQTTENFRLESLARGWELMAICLAFFPPTPKFHSYLEGYIYRHMDPVNDTKGVAISTYAKYCYHKLQKAALTGAKKGLKKPNVEEIRHAKNAVFSPSMFGSALQEVMGMQRERYPERQLPWVQTRLSEEVLALNGDQTEGIFRVPGDIDEVNALKLQVDQWKVPTGLEDPHVPASLLKLWYRELEEPLIPHEFYEQCIAHYDSPEAAVAVVHALPRINRMVLCYLIRFLQVFVQPANVAVTKMDVSNLAMVMAPNCLRCQSDDPRVIFENTRKEMSFLRVLIQHLDTSFMEGVL

SEQ ID NO: 876445 - protein, 113 aa, Homo sapiens
MSQTQDYECRSHNVDLPESRIPGSNTRCSPLIQRCLRPPSTCSSRWRQDQSAPPREDVGLWTGGVGRCGCWCRVSWDLMRWLLHRVELPPHVLTEQTHLLLASPCCCEPSLQP

SEQ ID NO: 876446 - protein, 165 aa, Homo sapiens
MTPPGAPAHSLKAREGPEAEKSQIPGQLPGSGPGEGAVGSRGPQTQVLPFLFLRGRRRAGGAARRFLPSLSLCRWGSAPWASALKDTAWESVRTRCAGQGVTGARPAQPPRALEGAVSAHPSPGPTPTHPHQADQAPFLSRGGDKHVCQVLLPQATEGSPDRGQE

SEQ ID NO: 876447 - protein, 249 aa, Homo sapiens
DPERVMRVAISTYAKYCYHKLQKAALTGAKKGLKKPNVEEIRHAKNAVFSPSMFGSALQEVMGMQRERYPERQLPWVQTRLSEEVLALNGDQTEGIFRVPGDIDEVNALKLQVDQWKVPTGLEDPHVPASLLKLWYRELEEPLIPHEFYEQCIAHYDSPEAAVAVVHALPRINRMVLCYLIRFLQVFVQPANVAVTKMDVSNLAMVMAPNCLRCQSDDPRVIFENTRKEMSFLRVLIQHLDTSFMEGVL

SEQ ID NO: 876448 - protein, 307 aa, Homo sapiens
LVVLAAAVQAAGNGRWGAGGAGPASAWPAPQSARAAPAAANCPERLLRPRETSGPAPGGSLPRWPRGGGVAMATASPLLPLLSPGLGWARVGGNTPGIGAFQLITEPSASPAAGLGIFEVRRVLDASGCSMLAPLQTGAARFSSYLLSRARKVLGSHLFSPCGVPEFCSISTRKLAAHGFGASMAAMVSFPPQRYHYFLVLDFEATCDKPQIHPQEIIEFPILKLNGRTMEIESTFHMYVQPVVHPQLTPFCTELTGIIQAMVDGQPSLQQVLERVDEWMAKEGLLDPNVKSIFVTCGRLGLKSSCS

SEQ ID NO: 876449 - protein, 221 aa, Homo sapiens
MGPSWGQHPGHWGFPALTEPSASPAAGLGIFEVRRVLDASGCSMLAPLQTGAARFSSYLLSRARKVLGSHLFSPCGVPEFCSISTRKLAAHGFGASMAAMVSFPPQRYHYFLVLDFEATCDKPQIHPQEIIEFPILKLNGRTMEIESTFHMYVQPVVHPQLTPFCTELTGIIQAMVDGQPSLQQVLERVDEWMAKEGLLDPNVKSIFVTCGRLGLKSSCSQ

SEQ ID NO: 876450 - protein, 294 aa, Homo sapiens
LVVLAAAVQAAGNGRWGAGGAGPASAWPAPQSARAAPAAANCPERLLRPRETSGPAPGGSLPRWPLPLLSPGLGWARVGGNTPGIGAFQLITEPSASPAAGLGIFEVRRVLDASGCSMLAPLQTGAARFSSYLLSRARKVLGSHLFSPCGVPEFCSISTRKLAAHGFGASMAAMVSFPPQRYHYFLVLDFEATCDKPQIHPQEIIEFPILKLNGRTMEIESTFHMYVQPVVHPQLTPFCTELTGIIQAMVDGQPSLQQVLERVDEWMAKEGLLDPNVKSIFVTCGRLGLKSSCS

SEQ ID NO: 876451 - protein, 144 aa, Homo sapiens
QRLWLLRMEGPLMVALPSPRQICIFVGETLLFSNWAITADILMYVVIPTRRATAVALQSFTSHLLGDAGSPYLIGFISDLIRQSTKDSPLWEFLSLGYALMLCPFVVVLGGMFFLATALFFVSDRARAEQQVNQLAMPPASVKV

SEQ ID NO: 876452 - protein, 146 aa, Homo sapiens
MCQSSARARPPLMHHPDPRPSLPQGEPAGDAARICESLRWCHWDNEEPTLPPRLGGVLQRPGPAGLPQSFLCDPRLGTHPLWPRPAEWPWHQEEAVSSVTLEGCVCWSHTVGQVPSPRFGPQGPGAKEEDSPKWVSGESLACHQLM

SEQ ID NO: 876453 - protein, 198 aa, Homo sapiens
QRLWLLRMEGPLMVALPSPRQICIFVGETLLFSNWAITADILMYVVIPTRRATAVALQSFTSHLLGDAGSPYLIGFGEPAGDAARICESLRWCHWDNEEPTLPPRLGGVLQRPGPAGLPQSFLCDPRLGTHPLWPRPAEWPWHQEEAVSSVTLEGCVCWSHTVGQVPSPRFGPQGPGAKEEDSPKWVSGESLACHQLM

SEQ ID NO: 876454 - protein, 144 aa, Homo sapiens; identical to SEQ ID NO: 876451

SEQ ID NO: 876455 - protein, 273 aa, Homo sapiens
ALGMWIPLYLHRAQVVQKTAETCNSPPCGAKDSLIFGAITCFTGFLGVVTGAGATRWCRLKTQRADPLVCAVGMLGSAIFICLIFVAAKSSIVGAYICIFVGETLLFSNWAITADILMYVVIPTRRATAVALQSFTSHLLGDAGSPYLIGFGEPAGDAARICESLRWCHWDNEEPTLPPRLGGVLQRPGPAGLPQSFLCDPRLGTHPLWPRPAEWPWHQEEAVSSVTLEGCVCWSHTVGQVPSPRFGPQGPGAKEEDSPKWVSGESLACHQLM

SEQ ID NO: 876456 - protein, 248 aa, Homo sapiens
ALGMWIPLYLHRAQVVQKTAETCNSPPCGAKDSLIFGAITCFTGFLGVVTGAGATRWCRLKTQRADPLVCAVGMLGSAIFICLIFVAAKSSIVGAYICIFVGETLLFSNWAITADILMYVVIPTRRATAVALQSFTSHLLGDAGSPYLIGFVSSPGVGLAGEAGGLQEGSALTSTPKSSQISDLIRQSTKDSPLWEFLSLGYALMLCPFVVVLGGMFFLATALFFVSDRARAEQQVNQLAMPPASVKV

SEQ ID NO: 876457 - protein, 175 aa, Homo sapiens
  misc_feature (4)..(4): Xaa can be any naturally occurring amino acid
  misc_feature (6)..(6): Xaa can be any naturally occurring amino acid
  misc_feature (168)..(168): Xaa can be any naturally occurring amino acid
  misc_feature (171)..(171): Xaa can be any naturally occurring amino acid
  misc_feature (173)..(173): Xaa can be any naturally occurring amino acid
NTFXGXLIPLNLSPPSADDNINTPAERLRGPLPPSADDNLKTPSERQLTPLPPSAPPSADDNIKTPAERLRGPLPPSADDNLKTPSERQLTPLPPSAPPSADDNIKTPAFHPQRMISRHLPSVSSLPFHPQLHPQQMIISRYLLSVCGFRYPSGILYEGTTGMQAGTXVSXSXCR

SEQ ID NO: 876458 - protein, 428 aa, Homo sapiens
MWKHKVRAKIRKRKVTTKINHHDKINGKRKSARKQKMFQRAQELRRRAEDYHKCKIPPSARKALCNWVRMAAAEHRHSSGLPYWPYLTAETLKNRMGHQPPPPTQQHSITDNSLSLKTPPECLLTPLPPSADDNLKTPPECVLTPLPPSADDNLKTPPECVLTPLPPSADDNLKTPPECLLTPLPPSADDNLKTPPECLLTPLPPSALPSAPPSADDNLKTRAECLLHPLPPSADDNLKTPSERQLTPLPPSAPPSADDNIKTPAFHPQRMIISRHLPSVSSLPFHPQLHPQQMIISRHLPSVCGGRFHPQRMIISRHLPSVSSLPFHPQQMIISIHLPSVCGGRFHPQRMIISRHLPSVSSLPFHPQLHPQQMIISRHLPSVCGGRFHPQRMIISRHLPSVSSLPFHPQLHPQQMIISRHLPSTLSG

SEQ ID NO: 876459 - protein, 320 aa, Homo sapiens
MWKHKVRAKIRKRKVTTKINHHDKINGKRKSARKQKMFQRAQELRRRAEDYHKCKIPPSARKALCNWVRMAAAEHRHSSGLPYWPYLTAETLKNRMGHQPPPPTQQHSITDNSLSLKTPPECLLTPLPPSADDNLKTPPECVLTPLPPSADDNLKTPPECVLTPLPPSADDNLKTPPECLLTPLPPSADDNLKTPPECLLTPLPPSALPSAPPSADDNLKTRAECLLHPLPPSADDNLKTPSERQLTPLPPSAPPSADDNIKTPAERLRGPLPPSADDNLKTPSERQLTPLPPSAPPSADDNIKTPAERLRGPLPPSADE

SEQ ID NO: 876460 - protein, 296 aa, Homo sapiens
  misc_feature (22)..(22): Xaa can be any naturally occurring amino acid
  misc_feature (32)..(32): Xaa can be any naturally occurring amino acid
EDPSRSQKVCGRRITFETLCLXLRPTRLPQAXSKPSADDNLKTPPECLLTPLPPSADDNLKTPPECLLTPLPPSALPSAPPSADDNLKTRAECLLHPLPPSADDNLKTPSERQLTPLPPSAPPSADDNIKTPAFHPQRMIISRHLPSVSSLPFHPQLHPQQMIISRHLPSVCGGRFHPQRMIISRHLPSVSSLPFHPQQMIISIHLPSVCGGRFHPQRMIISRHLPSVSSLPFHPQLHPQQMIISRHLPSVCGGRFHPQRMIISRHLPSVSSLPFHPQLHPQQMIISRHLPSTLSG

SEQ ID NO: 876461 - protein, 390 aa, Homo sapiens
MWKHKVRAKIRKRKVTTKINHHDKINGKRKSARKQKMFQRAQELRRRAEDYHKCKIPPSARKALCNWVRMAAAEHRHSSGLPYWPYLTAETLKNRMGHQPPPPTQQHSITDNSLSLKTPPECLLTPLPPSADDNLKTPPECVLTPLPPSADDNLKTPPECLLTPLPPSALPSAPPSADDNLKTRAECLLHPLPPSADDNLKTPSERQLTPLPPSAPPSADDNIKTPAFHPQRMIISRHLPSVSSLPFHPQLHPQQMIISRHLPSVCGGRFHPQRMIISRHLPSVSSLPFHPQQMIISIHLPSVCGGRFHPQRMIISRHLPSVSSLPFHPQLHPQQMIISRHLPSVCGGRFHPQRMIISRHLPSVSSLPFHPQLHPQQMIISRHLPSTLSG

SEQ ID NO: 876462 - protein, 263 aa, Homo sapiens
MWKHKVRAKIRKRKVTTKINHHDKINGKRKSARKQKMFQRAQELRRRAEDYHKCKIPPSARKALCNWVRMAAAEHRHSSGLPYWPYLTAETLKNRMGHQPPPPTQQHSITDNSLSLKTPPECLLTPLPPSADDNLKTPPECVLTPLPPSADDNLKTPPECVLTPLPPSADDNLKTPPECLLTPLPPSADDNLKTPPECLLTPLPPSALPSAPPSADDNLKTRAECLLHPLPPSADDNLKTPSERQLTPLRSGCRIRSSCRTIV

SEQ ID NO: 876463 - protein, 709 aa, Homo sapiens
MATAGGGSGADPGSRGLLRLLSFCVLLAGLCRGNSVERKIYIPLNKTAPCVRLLNATHQIGCQSSISGDTGVIHVVEKEEDLQWVLTDGPNPPYMVLLESKHFTRDLMEKLKGRTSRIAGLAVSLTKPSPASGFSPSVQCPNDGFGVYSNSYGPEFAHCREIQWNSLGNGLAYEDFSFPIFLLEDENETKVIKQCYQDHNLSQNGSAPTFPLCAMQLFSHMHAVISTATCMRRSSIQSTFSINPEIVCDPLSDYNVWSMLKPINTTGTLKPDDRVVVAATRLDSRSFFWNVAPGAESAVASFVTQLAAAEALQKAPDVTTLPRNVMFVFFQGETFDYIGSSRMVYDMEKGKFPVQLENVDSFVELGQVALRTSLELWMHTDPVSQKNESVRNQVEDLLATLEKSGAGVPAVILRRPNQSQPLPPSSLQRFLRARNISGVVLADHSGAFHNKYYQSIYDTAENINVSYPEWLSPEEDLNFVTDTAKALADVATVLGRALYELAGGTNFSDTVQADPQTVTRLLYGFLIKANNSWFQSILRQDLRSYLGDGPLQHYIAVSSPTNTTYVVQYALANLTGTVVNLTREQCQDPSKVPSENKDLYEYSWVQGPLHSNETDRLPRCVRSTARLARALSPAFELSQWSSTEYSTWTESRWKDIRARIFLIASKELELITLTVGFGILIFSLIVTYCINAKADVLFIAPREPGAVSY

SEQ ID NO: 876464 - protein, 183 aa, Homo sapiens
  misc_feature (156)..(156): Xaa can be any naturally occurring amino acid
  misc_feature (158)..(158): Xaa can be any naturally occurring amino acid
SIVKLTLEDKPTQRILSTFSINPEIVCDPLSDYNVWSMLKPINTTGTLKPDDRVVVAATRLDSRSFFWNVAPGAESAVASFVTQLAAAEALQKAPDVTTLPRNVMFVFFQGETFDYIGSSRMVYDMEKGKFPVQLENVDSFVELGQVALRTSLELXTXLGSWHCSRVRLTTVPVKIAKHTVQT

SEQ ID NO: 876465 - protein, 82 aa, Homo sapiens
IDMEIAQSVLRCSVENSLTSVDRARGQVALRTSLELWMHTDPVSQKNESVRNQGGSPGTGNEKERFFSLQGYSICTFIFQIS

SEQ ID NO: 876466 - protein, 709 aa, Homo sapiens; identical to SEQ ID NO: 876463

SEQ ID NO: 876467 - protein, 615 aa, Homo sapiens [sequence omitted]

SEQ ID NO: 876468 - protein, 642 aa, Homo sapiens
MALLFLYYVDKEEDLQWVLTDGPNPPYMVLLESKHFTRDLMEKLKGRTSRIAGLAVSLTKPSPASGFSPSVQCPNDGFGVYSNSYGPEFAHCREIQWNSLGNGLAYEDFSFPIFLLEDENETKVIKQCYQDHNLSQNGSAPTFPLCAMQLFSHMHAVISTATCMRRSSIQSTFSINPEIVCDPLSDYNVWSMLKPINTTGTLKPDDRVVVAATRLDSRSFFWNVAPGAESAVASFVTQLAAAEALQKAPDVTTLPRNVMFVFFQGETFDYIGSSRMVYDMEKGKFPVQLENVDSFVELGQVALRTSLELWMHTDPVSQKNESVRNQVEDLLATLEKSGAGVPAVILRRPNQSQPLPPSSLQRFLRARNISGVVLADHSGAFHNKYYQSIYDTAENINVSYPEWLSPEEDLNFVTDTAKALADVATVLGRALYELAGGTNFSDTVQADPQTVTRLLYGFLIKANNSWFQSILRQDLRSYLGDGPLQHYIAVSSPTNTTYVVQYALANLTGTVVNLTREQCQDPSKVPSENKDLYEYSWVQGPLHSNETDRLPRCVRSTARLARALSPAFELSQWSSTEYSTWTESRWKDIRARIFLIASKELELITLTVGFGILIFSLIVTYCINAKADVLFIAPREPGAVSY

SEQ ID NO: 876469 - protein, 615 aa, Homo sapiens [sequence omitted]

SEQ ID NO: 876470 - protein, 689 aa, Homo sapiens
MDFNLILESLCRGNSVERKIYIPLNKTAPCVRLLNATHQIGCQSSISGDTGVIHVVEKEEDLQWVLTDGPNPPYMVLLESKHFTRDLMEKLKGRTSRIAGLAVSLTKPSPASGFSPSVQCPNDGFGVYSNSYGPEFAHCREIQWNSLGNGLAYEDFSFPIFLLEDENETKVIKQCYQDHNLSQNGSAPTFPLCAMQLFSHMHAVISTATCMRRSSIQSTFSINPEIVCDPLSDYNVWSMLKPINTTGTLKPDDRVVVAATRLDSRSFFWNVAPGAESAVASFVTQLAAAEALQKAPDVTTLPRNVMFVFFQGETFDYIGSSRMVYDMEKGKFPVQLENVDSFVELGQVALRTSLELWMHTDPVSQKNESVRNQVEDLLATLEKSGAGVPAVILRRPNQSQPLPPSSLQRFLRARNISGVVLADHSGAFHNKYYQSIYDTAENINVSYPEWLSPEEDLNFVTDTAKALADVATVLGRALYELAGGTNFSDTVQADPQTVTRLLYGFLIKANNSWFQSILRQDLRSYLGDGPLQHYIAVSSPTNTTYVVQYALANLTGTVVNLTREQCQDPSKVPSENKDLYEYSWVQGPLHSNETDRLPRCVRSTARLARALSPAFELSQWSSTEYSTWTESRWKDIRARIFLIASKELELITLTVGFGILIFSLIVTYCINAKADVLFIAPREPGAVSY

SEQ ID NO: 876471 - protein, 730 aa, Homo sapiens
MATAGGGSGADPGSRGLLRLLSFCVLLAGLCRGNSVERKIYIPLNKTAPCVRLLNATHQIGCQSSISGDTGVIHVVEKEEDLQWVLTDGPNPPYMVLLESKHFTRQNVRLSDTFLCSFMEFLSYSRDLMEKLKGRTSRIAGLAVSLTKPSPASGFSPSVQCPNDGFGVYSNSYGPEFAHCREIQWNSLGNGLAYEDFSFPIFLLEDENETKVIKQCYQDHNLSQNGSAPTFPLCAMQLFSHMHAVISTATCMRRSSIQSTFSINPEIVCDPLSDYNVWSMLKPINTTGTLKPDDRVVVAATRLDSRSFFWNVAPGAESAVASFVTQLAAAEALQKAPDVTTLPRNVMFVFFQGETFDYIGSSRMVYDMEKGKFPVQLENVDSFVELGQVALRTSLELWMHTDPVSQKNESVRNQVEDLLATLEKSGAGVPAVILRRPNQSQPLPPSSLQRFLRARNISGVVLADHSGAFHNKYYQSIYDTAENINVSYPEWLSPEEDLNFVTDTAKALADVATVLGRALYELAGGTNFSDTVQADPQTVTRLLYGFLIKANNSWFQSILRQDLRSYLGDGPLQHYIAVSSPTNTTYVVQYALANLTGTVVNLTREQCQDPSKVPSENKDLYEYSWVQGPLHSNETDRLPRCVRSTARLARALSPAFELSQWSSTEYSTWTESRWKDIRARIFLIASKELELITLTVGFGILIFSLIVTYCINAKADVLFIAPREPGAVSY

SEQ ID NO: 876472 - protein, 709 aa, Homo sapiens; identical to SEQ ID NO: 876463

SEQ ID NO: 876473 - protein, 709 aa, Homo sapiens; identical to SEQ ID NO: 876463

SEQ ID NO: 876474 - protein, 456 aa, Homo sapiens
DPLETQLIQSTSTSTEIVCDPLSDYNVWSMLKPINTTGTLKPDDRVVVAATRLAAAEALQKAPDVTTLPRNVMFVFFQGETFDYIGSSRMVYDMEKGKFPVQLENVDSFVELGQVALRTSLELWMHTDPVSQKNESVRNQVEDLLATLEKSGAGVPAVILRRPNQSQPLPPSSLQRFLRARNISGVVLADHSGAFHNKYYQSIYDTAENINVSYPEWLSPEEDLNFVTDTAKALADVATVLGRALYELAGGTNFSDTVQADPQTVTRLLYGFLIKANNSWFQSILRQDLRSYLGDGPLQHYIAVSSPTNTTYVVQYALANLTGTVVNLTREQCQDPSKVPSENKDLYEYSWVQGPLHSNETDRLPRCVRSTARLARALSPAFELSQWSSTEYSTWTESRWKDIRARIFLIASKELELITLTVGFGILIFSLIVTYCINAKADVLFIAPREPGAVSY

SEQ ID NO: 876475 - protein, 620 aa, Homo sapiens
MATAGGGSGADPGSRGLLRLLSFCVLLAGLCRGNSVERKIYIPLNKTAPCVRLLNATHQIGCQSSISGDTGVIHVVEKEEDLQWVLTDGPNPPYMVLLESKHFTRDLMEKLKGRTSRIAGLAVSLTKPSPASGFSPSVQCPNDGFGVYSNSYGPEFAHCREIQWNSLGNGLAYEDFSFPIFLLEDENETKVIKQCYQDHNLSQNGSAPTFPLCAMQLFSHMHAVISTATCMRRSSIQSTFSINPEIVCDPLSDYNVWSMLKPINTTGTLKPDDRVVVAATRLDSRSFFWNVAPGAESAVASFVTQLAAAEALQKAPDVTTLPRNVMFVFFQGETFDYIGSSRMVYDMEKGKFPVQLENVDSFVELGQVALRTSLELWMHTDPVSQKNESVRNQVEDLLATLEKSGAGVPAVILRRPNQSQPLPPSSLQRFLRARNISGVVLADHSGAFHNKYYQSIYDTAENINVSYPEWLSPEEDLNFVTDTAKALADVATVLGRALYELAGGTNFSDTVQADPQTVTRLLYGFLIKANNSWFQSILRQDLRSYLGDGPLQHYIAVSSPTNTTYVVQYALANLTGTVVNLTREQCQDPSKVPSENKDVSGGGCWKCPGAPFPWESWRFF

SEQ ID NO: 876476 - protein, 709 aa, Homo sapiens; identical to SEQ ID NO: 876463

SEQ ID NO: 876477 - protein, 236 aa, Homo sapiens
PRVRNFVTDTAKALADVATVLGRALYELAGGTNFSDTVQADPQTVTRLLYGFLIKANNSWFQSILRQDLRSYLGDGPLQHYIAVSSPTNTTYVVQYALANLTGTVVNLTREQCQDPSKVPSENKDLYEYSWVQGPLHSNETDRLPRCVRSTARLARALSPAFELSQWSSTEYSTWTESRWKDIRARIFLIASKELELITLTVGFGILIFSLIVTYCINAKADVLFIAPREPGAVSY

SEQ ID NO: 876478 - protein, 406 aa, Homo sapiens
MATAGGGSGADPGSRGLLRLLSFCVLLAGLCRGNSVERKIYIPLNKTAPCVRLLNATHQIGCQSSISGDTGVIHVVEKEEDLQWVLTDGPNPPYMVLLESKHFTRDLMEKLKGRTSRIAGLAVSLTKPSPASGFSPSVQCPNDGFGVYSNSYGPEFAHCREIQWNSLGNGLAYEDFSFPIFLLEDENETKVIKQCYQDHNLSQNGSAPTFPLCAMQLFSHMHAVISTATCMRRSSIQSTFSINPEIVCDPLSDYNVWSMLKPINTTGTLKPDDRVVVAATRLDSRSFFWNVAPGAESAVASFVTQLAAAEALQKAPDVTTLPRNVMFVFFQGETFDYIGSSRMVYDMEKGKFPVQLENVDSFVELGQVALRTSLELWMHTDPVSQKNESVRNQLEPPWACLRLGLT

SEQ ID NO: 876479 - protein, 144 aa, Homo sapiens
VVCIDLHMVGWYVVNLTREQCQDPSKVPSENKDLYEYSWVQGPLHSNETDRLPRCVRSTARLARALSPAFELSQWSSTEYSTWTESRWKDIRARIFLIASKELELITLTVGFGILIFSLIVTYCINAKADVLFIAPREPGAVSY

SEQ ID NO: 876480 - protein, 709 aa, Homo sapiens; identical to SEQ ID NO: 876463

SEQ ID NO: 876481 - protein, 106 aa, Homo sapiens
DGYGGGGSDETDRLPRCVRSTARLARALSPAFELSQWSSTEYSTWTESRWKDIRARIFLIASKELELITLTVGFGILIFSLIVTYCINAKADVLFIAPREPGAVSY

SEQ ID NO: 876482 - protein, 106 aa, Homo sapiens
LISVHFLEHLCPRGTQPLICHWNLLGLSQIGINIKEWSSTEYSTWTESRWKDIRARIFLIASKELELITLTVGFGILIFSLIVTYCINAKADVLFIAPREPGAVSY

SEQ ID NO: 876483 - protein, 403 aa, Homo sapiens
MATAGGGSGADPGSRGLLRLLSFCVLLAGLCRGNSVERKIYIPLNKTAPCVRLLNATHQIGCQSSISGDTGVIHVVEKEEDLQWVLTDGPNPPYMVLLESKHFTRDLMEKLKGRTSRIAGLAVSLTKPSPASGFSPSVQCPNDGFGVYSNSYGPEFAHCREIQWNSLGNGLAYEDFSFPIFLLEDENETKVIKQCYQDHNLSQNGSAPTFPLCAMQLFSHMHAVISTATCMRRSSIQSTFSINPEIVCDPLSDYNVWSMLKPINTTGTLKPDDRVVVAATRLDSRSFFWNVAPGAESAVASFVTQLAAAEALQKAPDVTTLPRNVMFVFFQGETFDYIGSSRMVYDMEKGKFPVQLENVDSFVELGQVALRTSLELWMHTDPVSQKNESVRNQLRWCGYRARL

SEQ ID NO: 876484 - protein, 395 aa, Homo sapiens
MATAGGGSGADPGSRGLLRLLSFCVLLAGLCRGNSVERKIYIPLNKTAPCVRLLNATHQIGCQSSISGDTGVIHVVEKEEDLQWVLTDGPNPPYMVLLESKHFTRDLMEKLKGRTSRIAGLAVSLTKPSPASGFSPSVQCPNDGFGVYSNSYGPEFAHCREIQWNSLGNGLAYEDFSFPIFLLEDENETKVIKQCYQDHNLSQNGSAPTFPLCAMQLFSHMHAVISTATCMRRSSIQSTFSINPEIVCDPLSDYNVWSMLKPINTTGTLKPDDRVVVAATRLDSRSFFWNVAPGAESAVASFVTQLAAAEALQKAPDVTTLPRNVMFVFFQGETFDYIGSSRMVYDMEKGKFPVQLENVDSFVELGQVALRTSLELWMHTDPVSQKNESVRNQGL

SEQ ID NO: 876485 - protein, 261 aa, Homo sapiens
MATAGGGSGADPGSRGLLRLLSFCVLLAGLCRGNSVERKIYIPLNKTAPCVRLLNATHQIGCQSSISGDTGVIHVVEKEEDLQWVLTDGPNPPYMVLLESKHFTRDLMEKLKGRTSRIAGLAVSLTKPSPASGFSPSVQCPNDGFGVYSNSYGPEFAHCREIQWNSLGNGLAYEDFSFPIFLLEDENETKVIKQCYQDHNLSQNGSAPTFPLCAMQLFSHMHAVISTATSKVHTIMVTKEHCLHLATSEKRFTVHTHLSQL

SEQ ID NO: 876486 - protein, 129 aa, Homo sapiens
FHCPSFWLLPILGFSYFTHHPPTKSSLPFGLHSGDGPLQHYIAVSSPTNTTYVVQYALANLTGTVVNLTREQCQDPSKVPSENKDLYEYSWVQGPLHSNETDRLPRCVRSTARLARALSPPPSPPAAGQ

SEQ ID NO: 876487 - protein, 769 aa, Homo sapiens
MATAGGGSGADPGSRGLLRLLSFCVLLAGLCRGNSVERKIYIPLNKTAPCVRLLNATHQIGCQSSISGDTGVIHVVEKEEDLQWVLTDGPNPPYMVLLESKHFTRDLMEKLKGRTSRIAGLAVSLTKPSPASGFSPSVQCPNDGFGVYSNSYGPEFAHCREIQWNSLGNGLAYEDFSFPIFLLEDENETKVIKQCYQDHNLSQNGSAPTFPLCAMQLFSHMHAVISTATCMRRSSIQSTFSINPEIVCDPLSDYNVWSMLKPINTTGTLKPDDRVVVAATRLDSRSFFWNVAPGAESAVASFVTQLAAAEALQKAPDVTTLPRNVMFVFFQGETFDYIGSSRMVYDMEKGKFPVQLENVDSFVELGQVALRTSLELWMHTDPVSQKNESVRNQGLGDRVRDRIGLGVGQRMNTTAVVAAGKNQELSDIPLVPWTGYFSDHLLPSRLPLPIKDMVEDLLATLEKSGAGVPAVILRRPNQSQPLPPSSLQRFLRARNISGVVLADHSGAFHNKYYQSIYDTAENINVSYPEWLSPEEDLNFVTDTAKALADVATVLGRALYELAGGTNFSDTVQADPQTVTRLLYGFLIKANNSWFQSILRQDLRSYLGDGPLQHYIAVSSPTNTTYVVQYALANLTGTVVNLTREQCQDPSKVPSENKDLYEYSWVQGPLHSNETDRLPRCVRSTARLARALSPAFELSQWSSTEYSTWTESRWKDIRARIFLIASKELELITLTVGFGILIFSLIVTYCINAKADVLFIAPREPGAVSY

SEQ ID NO: 876488 - protein, 620 aa, Homo sapiens; identical to SEQ ID NO: 876475

SEQ ID NO: 876489 - protein, 742 aa, Homo sapiens
MATAGGGSGADPGSRGLLRLLSFCVLLAGLFLDFEPDPLPLCPDVSFFPQPQPPTPQSKGTGLCRGNSVERKIYIPLNKTAPCVRLLNATHQIGCQSSISGDTGVIHVVEKEEDLQWVLTDGPNPPYMVLLESKHFTRDLMEKLKGRTSRIAGLAVSLTKPSPASGFSPSVQCPNDGFGVYSNSYGPEFAHCREIQWNSLGNGLAYEDFSFPIFLLEDENETKVIKQCYQDHNLSQNGSAPTFPLCAMQLFSHMHAVISTATCMRRSSIQSTFSINPEIVCDPLSDYNVWSMLKPINTTGTLKPDDRVVVAATRLDSRSFFWNVAPGAESAVASFVTQLAAAEALQKAPDVTTLPRNVMFVFFQGETFDYIGSSRMVYDMEKGKFPVQLENVDSFVELGQVALRTSLELWMHTDPVSQKNESVRNQVEDLLATLEKSGAGVPAVILRRPNQSQPLPPSSLQRFLRARNISGVVLADHSGAFHNKYYQSIYDTAENINVSYPEWLSPEEDLNFVTDTAKALADVATVLGRALYELAGGTNFSDTVQADPQTVTRLLYGFLIKANNSWFQSILRQDLRSYLGDGPLQHYIAVSSPTNTTYVVQYALANLTGTVVNLTREQCQDPSKVPSENKDLYEYSWVQGPLHSNETDRLPRCVRSTARLARALSPAFELSQWSSTEYSTWTESRWKDIRARIFLIASKELELITLTVGFGILIFSLIVTYCINAKADVLFIAPREPGAVSY

SEQ ID NO: 876490 - protein, 689 aa, Homo sapiens; identical to SEQ ID NO: 876470

SEQ ID NO: 876491 - protein, 727 aa, Homo sapiens
SPAARRVASLPSLGLFLDFEPDPLPLCPDVSFFPQPQPPTPQSKGTGLCRGNSVERKIYIPLNKTAPCVRLLNATHQIGCQSSISGDTGVIHVVEKEEDLQWVLTDGPNPPYMVLLESKHFTRDLMEKLKGRTSRIAGLAVSLTKPSPASGFSPSVQCPNDGFGVYSNSYGPEFAHCREIQWNSLGNGLAYEDFSFPIFLLEDENETKVIKQCYQDHNLSQNGSAPTFPLCAMQLFSHMHAVISTATCMRRSSIQSTFSINPEIVCDPLSDYNVWSMLKPINTTGTLKPDDRVVVAATRLDSRSFFWNVAPGAESAVASFVTQLAAAEALQKAPDVTTLPRNVMFVFFQGETFDYIGSSRMVYDMEKGKFPVQLENVDSFVELGQVALRTSLELWMHTDPVSQKNESVRNQVEDLLATLEKSGAGVPAVILRRPNQSQPLPPSSLQRFLRARNISGVVLADHSGAFHNKYYQSIYDTAENINVSYPEWLSPEEDLNFVTDTAKALADVATVLGRALYELAGGTNFSDTVQADPQTVTRLLYGFLIKANNSWFQSILRQDLRSYLGDGPLQHYIAVSSPTNTTYVVQYALANLTGTVVNLTREQCQDPSKVPSENKDLYEYSWVQGPLHSNETDRLPRCVRSTARLARALSPAFELSQWSSTEYSTWTESRWKDIRARIFLIASKELELITLTVGFGILIFSLIVTYCINAKADVLFIAPREPGAVSY

SEQ ID NO: 876492 - protein, 638 aa, Homo sapiens
MATAGGGSGADPGSRGLLRLLSFCVLLAGLCRGNSVERKIYIPLNKTAPCVRLLNATHQIGCQSSISGDTGVIHVVEKEEDLQWVLTDGPNPPYMVLLESKHFTRDLMEKLKGRTSRIAGLAVSLTKPSPASGFSPSVQCPNDGFGVYSNSYGPEFAHCREIQWNSLGNGLAYEDFSFPIFLLEDENETKVIKQCYQDHNLSQNGSAPTFPLCAMQLFSHMHAVISTATCMRRSSIQSTFSINPEIVCDPLSDYNVWSMLKPINTTGTLKPDDRVVVAATRLDSRSFFWNVAPGAESAVASFVTQLAAAEALQKAPDVTTLPRNVMFVFFQGETFDYIGSSRMVYDMEKGKFPVQLENVDSFVELGQVALRTSLELWMHTDPVSQKNESVRNQVEDLLATLEKSGAGVPAVILRRPNQSQPLPPSSLQRFLRARNISGVVLADHSGAFHNKYYQSIYDTAENINVSYPEWLSPEEDLNFVTDTAKALADVATVLGRALYELAGGTNFSDTVQADPQTVTRLLYGFLIKANNSWFQSILRQDLRSYLGDGPLQHYIAVSSPTNTTYVVQYALANLTGTVVNLTREQCQDPSKVPSENKDLITLTVGFGILIFSLIVTYCINAKADVLFIAPREPGAVSY

SEQ ID NO: 876493 - protein, 571 aa, Homo sapiens
MATAGGGSGADPGSRGLLRLLSFCVLLAGLCRGNSVERKIYIPLNKTAPCVRLLNATHQIGCQSSISGDTGVIHVVEKEEDLQWVLTDGPNPPYMVLLESKHFTRDLMEKLKGRTSRIAGLAVSLTKPSPASGFSPSVQCPNDGFGVYSNSYGPEFAHCREIQWNSLGNGLAYEDFSFPIFLLEDENETKVIKQETFDYIGSSRMVYDMEKGKFPVQLENVDSFVELGQVALRTSLELWMHTDPVSQKNESVRNQVEDLLATLEKSGAGVPAVILRRPNQSQPLPPSSLQRFLRARNISGVVLADHSGAFHNKYYQSIYDTAENINVSYPEWLSPEEDLNFVTDTAKALADVATVLGRALYELAGGTNFSDTVQADPQTVTRLLYGFLIKANNSWFQSILRQDLRSYLGDGPLQHYIAVSSPTNTTYVVQYALANLTGTVVNLTREQCQDPSKVPSENKDLYEYSWVQGPLHSNETDRLPRCVRSTARLARALSPAFELSQWSSTEYSTWTESRWKDIRARIFLIASKELELITLTVGFGILIFSLIVTYCINAKADVLFIAPREPGAVSY

SEQ ID NO: 876494 - protein, 709 aa, Homo sapiens; identical to SEQ ID NO: 876463

SEQ ID NO: 876495 - protein, 709 aa, Homo sapiens; identical to SEQ ID NO: 876463

SEQ ID NO: 876496 - protein, 709 aa, Homo sapiens; identical to SEQ ID NO: 876463

SEQ ID NO: 876497 - protein, 196 aa, Homo sapiens
FHCPSFWLLPILGFSYFTHHPPTKSSLPFGLHSGDGPLQHYIAVSSPTNTTYVVQYALANLTGTVVNLTREQCQDPSKVPSENKDLYEYSWVQGPLHSNETDRLPRCVRSTARLARALSPAFELSQWSSTEYSTWTESRWKDIRARIFLIASKELELITLTVGFGILIFSLIVTYCINAKADVLFIAPREPGAVSY

SEQ ID NO: 876498 - protein, 132 aa, Homo sapiens
TIELVPSSIDITVCCGASSVQLYEYSWVQGPLHSNETDRLPRCVRSTARLARALSPAFELSQWSSTEYSTWTESRWKDIRARIFLIASKELELITLTVGFGILIFSLIVTYCINAKADVLFIAPREPGAVSY

SEQ ID NO: 876499 - protein, 107 aa, Homo sapiens
SSSATLNLQDETDRLPRCVRSTARLARALSPAFELSQWSSTEYSTWTESRWKDIRARIFLIASKELELITLTVGFGILIFSLIVTYCINAKADVLFIAPREPGAVSY

SEQ ID NO: 876500 - protein, 622 aa, Homo sapiens
MATAGGGSGADPGSRGLLRLLSFCVLLAGLCRGNSVERKIYIPLNKTAPCVRLLNATHQIGCQSSISGDTGVIHVVEKEEDLQWVLTDGPNPPYMVLLESKHFTRDLMEKLKGRTSRIAGLAVSLTKPSPASGFSPSVQCPNDGFGVYSNSYGPEFAHCREIQWNSLGNGLAYEDFSFPIFLLEDENETKVIKQCYQDHNLSQNGSAPTFPLCAMQLFSHMHAVISTATCMRRSSIQSTFSINPEIVCDPLSDYNVWSMLKPINTTGTLKPDDRVVVAATRLDSRSFFWNVAPGAESAVASFVTQLAAAEALQKAPDVTTLPRNVMFVFFQGETFDYIGSSRMVYDMEKGKFPVQLENVDSFVELGQVALRTSLELWMHTDPVSQKNESVRNQVEDLLATLEKSGAGVPAVILRRPNQSQPLPPSSLQRFLRARNISGVVLADHSGAFHNKYYQSIYDTAENINVSYPEWLSPEEDLNFVTDTAKALADVATVLGRALYELAGGTNFSDTVQADPQTVTRLLYGFLIKANNSWFQSILRQDLRSYLGDGPLQHYIAVSSPTNTTYVVQYALANLTGTVVNLTREQCQDPSKVPSENKDLYEYSQVQGRGPVDAAANLVVVVD

SEQ ID NO: 876501 - protein, 404 aa, Homo sapiens
  misc_feature (377)..(377): Xaa can be any naturally occurring amino acid
  misc_feature (379)..(379): Xaa can be any naturally occurring amino acid
MATAGGGSGADPGSRGLLRLLSFCVLLAGLCRGNSVERKIYIPLNKTAPCVRLLNATHQIGCQSSISGDTGVIHVVEKEEDLQWVLTDGPNPPYMVLLESKHFTRDLMEKLKGRTSRIAGLAVSLTKPSPASGFSPSVQCPNDGFGVYSNSYGPEFAHCREIQWNSLGNGLAYEDFSFPIFLLEDENETKVIKQCYQDHNLSQNGSAPTFPLCAMQLFSHMHAVISTATCMRRSSIQSTFSINPEIVCDPLSDYNVWSMLKPINTTGTLKPDDRVVVAATRLDSRSFFWNVAPGAESAVASFVTQLAAAEALQKAPDVTTLPRNVMFVFFQGETFDYIGSSRMVYDMEKGKFPVQLENVDSFVELGQVALRTSLELXTXLGSWHCSRVRLTTVPVKIAKHTVQT

SEQ ID NO: 876502 - protein, 89 aa, Homo sapiens
QLKDSSAVTWFLSTWCPSNQSPYSPSFPSGVYSNSYGPEFAHCREIQWNSLGNGLAYEDFSFPIFLLEDENETKVIKQVMTLPAPSNSS

SEQ ID NO: 876503 - protein, 90 aa, Homo sapiens
QKPVASRTLIQHTASAAWNKQQKPNTQWKIPEPFSLSAAQPDPRHAGNETSFLQEVKRLIPSYRTSKPLANSDVNQINQTDKRKASLGEM

SEQ ID NO: 876504 - protein, 77 aa, Homo sapiens
AAALPPPLSRPLVRSLSPLTARDWFRALLSSLALPSSFSLSLLFLFFSLSALFFVFFCSFFFFFFFFFFLQGYLYFV

SEQ ID NO: 876505 - protein, 1306 aa, Homo sapiens
QAEPSGAGTELYLFAVLFDLLVSESSLDHLMAMGDDKSFDDEESVDGNRPSSAASAFKVPAPKTSGNPANSARKPGSAGGPKVGGASKEGGAGAVDEDDFIKAFTDVPSIQIYSSRELEETLNKIREILSDDKHDWDQRANALKKIRSLLVAGAAQYDCFFQHLRLLDGALKLSAKDLRSQVVREACITVAHLSTVLGNKFDHGAEAIVPTLFNLVPNSAKVMATSGCAAIRFIIRHTHVPRLIPLITSNCTSKSVPVRRRSFEFLDLLLQEWQTHSLERHAAVLVETIKKGIHDADAEARVEARKTYMGLRNHFPGEAETLYNSLEPSYQKSLQTYLKSSGSVASLPQSDRSSSSSQESLNRPFSSKWSTANPSTVAGRVSAGSSKASSLPGSLQRSRSDIDVNAAAGAKAHHAAGQSVRRGRLGAGALNAGSYASLEDTSDKLDGTASEDGRVRAKLSAPLAGMGNAKADSRGRSRTKMVSQSQPGSRSGSPGRVLTTTALSTVSSGVQRVLVNSASAQKRSKIPRSQGCSREASPSRLSVARSSRIPRPSVSQGCSREASRESSRDTSPVRSFQPLASRHHSRSTGALYAPEVYGASGPGYGISQSSRLSSSVSAMRVLNTGSDVEEAVADALKKPARRRYESYGMHSDDDANSDASSACSERSYSSRNGSIPTYMRQTEDVAEVLNRCASSNWSERKEGLLGLQNLLKNQRTLSRVELKRLCEIFTRMFADPHGKRVFSMFLETLVDFIQVHKDDLQDWLFVLLTQLLKKMGADLLGSVQAFNILMRFTVDQTQTPSLKVKVAILKYIETLAKQMDPGDFINSSETRLAVSRVITWTTEPKSSDVRKAAQSVLISLFELNTPEFTMLLGALPKTFQDGATKLLHNHLRNTGNGTQSSMGSPLTRPTPRSPANWSSPLTSPTNTSQNTLSPSAFDYDTENMNSEDIYSSLRGVTEAIQNFSFRSQEDMNEPLKRDSKKDDGDSMCGGPGMSDPRAGGDATDSSQTALDNKASLLHSMPTHSSPRSRDYNPYNYSDSISPFNKSALKEAMFDDDADQFPDDLSLDHSDLVAELLKELSNHNERVEERKIALYELMKLTQEESFSVWDEHFKTILLLLLETLGDKEPTIRALALKVLREILRHQPARFKNYAELTVMKTLEAHKDPHKEVVRSAEEAASVLATSISPEQCIKVLCPIIQTADYPINLAAIKMQTKVIERVSKETLNLLLPEIMPGLIQGYDNSESSVRKACVFCLVAVHAVIGDELKPHLSQLTGSKMKLLNLYIKRAQTGSGGADPTTDVSGQS

SEQ ID NO: 876506 - protein, 1174 aa, Homo sapiens
QAEPSGAGTELYLFAVLFDLLVSESSLDHLMAMGDDKSFDDEESVDGNRPSSAASAFKVPAPKTSGNPANSARKPGSAGGPKVGGASKEGGAGAVDEDDFIKAFTDVPSIQIYSSRELEETLNKIREILSDDKHDWDQRANALKKIRSLLVAGAAQYDCFFQHLRLLDGALKLSAKDLRSQVVREACITVAHLSTVLGNKFDHGAEAIVPTLFNLVPNSAKVMATSGCAAIRFIIRHTHVPRLIPLITSNCTSKSVPVRRRSFEFLDLLLQEWQTHSLERHAAVLVETIKKGIHDADAEARVEARKTYMGLRNHFPGEAETLYNSLEPSYQKSLQTYLKSSGSVASLPQSDRSSSSSQESLNRPFSSKWSTANPSTVAGRVSAGSSKASSLPGSLQRSRSDIDVNAAAGAKAHHAAGQSVRRGRLGAGALNAGSYASLEDTSDKLDGTASEDGRVRAKLSAPLAGMGNAKADSRGRSRTKMVSQSQPGSRSGSPGRVLTTTALSTVSSGVQRVLVNSASAQKRSKIPRSQGCSREASPSRLSVARSSRIPRPSVSQGCSREASRESSRDTSPVRSFQPLASRHHSRSTGALYAPEVYGASGPGYGISQSSRLSSSVSAMRVLNTGSDVEEAVADALKKPARRRYESYGMHSDDDANSDASSACSERSYSSRNGSIPTYMRQTEDVAEVLNRCASSNWSERKEGLLGLQNLLKNQRTLSRVELKRLCEIFTRMFADPHGKRVFSMFLETLVDFIQVHKDDLQDWLFVLLTQLLKKMGADLLGSVQAFNILMRFTVDQTQTPSLKVKVAILKYIETLAKQMDPGDFINSSETRLAVSRVITWTTEPKSSDVRKAAQSVLISLFELNTPEFTMLLGALPKTFQDGATKLLHNHLRNTGNGTQSSMGSPLTRPTPRSPANWSSPLTSPTNTSQNTLSPSAFDYDTENMNSEDIYSSLRGVTEAIQNFSFRSQEDMNEPLKRDSKKDDGDSMCGGPGMSDPRAGGDATDSSQTALDNKASLLHSMPTHSSPRSRDYNPYNYSDSISPFNKSALKEAMFDDDADQFPDDLSLDHSDLVAELLKELSNHNERVEERKIALYELMKLTQEESFSVWDEHFKTILLLLLETLGDKEPTIRALALKVLREILRHQPARFKNYAELTVMKTLEAHKDPHKEVDTQ

SEQ ID NO: 876507 - protein, 1306 aa, Homo sapiens; identical to SEQ ID NO: 876505

SEQ ID NO: 876508 - protein, 1324 aa, Homo sapiens
QAEPSGAGTELYLFAVLFDLLVSESSLDHLMAMGDDKSFDDEESVDGNRPSSAASAFKVPAPKTSGNPANSARKPGSAGGPKVGGASKEGGAGAVDEDDFIKAFTDVPSIQIYSSRELEETLNKIREILSDDKHDWDQRANALKKIRSLLVAGAAQYDCFFQHLRLLDGALKLSAKDLRSQVVREACITVAHLSTVLGNKFDHGAEAIVPTLFNLVPNSAKVMATSGCAAIRFIIRHTHVPRLIPLITSNCTSKSVPVRRRSFEFLDLLLQEWQTHSLERHAAVLVETIKKGIHDADAEARVEARKTYMGLRNHFPGEAETLYNSLEPSYQKSLQTYLKSSGSVASLPQSDRSSSSSQESLNRPFSSKWSTANPSTVAGRVSAGSSKASSLPGSLQRSRSDIDVNAAAGAKAHHAAGQSVRRGRLGAGALNAGSYASLEDTSDKLDGTASEDGRVRAKLSAPLAGMGNAKADSRGRSRTKMVSQSQPGSRSGSPGRVLTTTALSTVSSGVQRVLVNSASAQKRSKIPRSQGCSREASPSRLSVARSSRIPRPSVSQGCSREASRESSRDTSPVRSFQPLASRHHSRSTGALYAPEVYGASGPGYGISQSSRLSSSVSAMRVLNTGSDVEEAVADALKKPARRRYESYGMHSDDDANSDASSACSERSYSSRNGSIPTYMRQTEDVAEVLNRCASSNWSERKEGLLGLQNLLKNQRTLSRVELKRLCEIFTRMFADPHGKRVFSMFLETLVDFIQVHKDDLQDWLFVLLTQLLKKMGADLLGSVQAKVQKALDVTRESFPNDLQFNILMRFTVDQTQTPSLKVKVAILKYIETLAKQMDPGDFINSSETRLAVSRVITWTTEPKSSDVRKAAQSVLISLFELNTPEFTMLLGALPKTFQDGATKLLHNHLRNTGNGTQSSMGSPLTRPTPRSPANWSSPLTSPTNTSQNTLSPSAFDYDTENMNSEDIYSSLRGVTEAIQNFSFRSQEDMNEPLKRDSKKDDGDSMCGGPGMSDPRAGGDATDSSQTALDNKASLLHSMPTHSSPRSRDYNPYNYSDSISPFNKSALKEAMFDDDADQFPDDLSLDHSDLVAELLKELSNHNERVEERKIALYELMKLTQEESFSVWDEHFKTILLLLLETLGDKEPTIRALALKVLREILRHQPARFKNYAELTVMKTLEAHKDPHKEVVRSAEEAASVLATSISPEQCIKVLCPIIQTADYPINLAAIKMQTKVIERVSKETLNLLLPEIMPGLIQGYDNSESSVRKACVFCLVAVHAVIGDELKPHLSQLTGSKMKLLNLYIKRAQTGSGGADPTTDVSGQS

SEQ ID NO: 876509 - protein, 1303 aa, Homo sapiens
QAEPSGAGTELYLFAVLFDLLVSESSLDHLMAMGDDKSFDDEESVDGNRPSSAASAFKVPAPKTSGNPANSARKPGSAGGPKVGGASKEGGAGAVDEDDFIKAFTDVPSIQIYSSRELEETLNKIREILSDDKHDWDQRANALKKIRSLLVAGAAQYDCFFQHLRLLDGALKLSAKDLRSQVVREACITVAHLSTVLGNKFDHGAEAIVPTLFNLVPNSAKVMATSGCAAIRFIIRHTHVPRLIPLITSNCTSKSVPVRRRSFEFLDLLLQEWQTHSLERHAAVLVETIKKGIHDADAEARVEARKTYMGLRNHFPGEAETLYNSLEPSYQKSLQTYLKSSGSVASLPQSDRSSSSSQESLNRPFSSKWSTANPSTVAGRVSAGSSKASSLPGSLQRSRSDIDVNAAAGAKAHHAAGQSVRRGRLGAGALNAGSYASLEDTSDKLDGTASEDGRVRAKLSAPLAGMGNAKADSRGRSRTKMVSQSQPGSRSGSPGRVLTTTALSTVSSGVQRVLVNSASAQKRSKIPRSQGCSREASPSRLSVARSSRIPRPSVSQGCSREASRESSRDTSPVRSFQPLGPGYGISQSSRLSSSVSAMRVLNTGSDVEEAVADALKKPARRRYESYGMHSDDDANSDASSACSERSYSSRNGSIPTYMRQTEDVAEVLNRCASSNWSERKEGLLGLQNLLKNQRTLSRVELKRLCEIFTRMFADPHGKRVFSMFLETLVDFIQVHKDDLQDWLFVLLTQLLKKMGADLLGSVQAKVQKALDVTRESFPNDLQFNILMRFTVDQTQTPSLKVKVAILKYIETLAKQMDPGDFINSSETRLAVSRVITWTTEPKSSDVRKAAQSVLISLFELNTPEFTMLLGALPKTFQDGATKLLHNHLRNTGNGTQSSMGSPLTRPTPRSPANWSSPLTSPTNTSQNTLSPSAFDYDTENMNSEDIYSSLRGVTEAIQNFSFRSQEDMNEPLKRDSKKDDGDSMCGGPGMSDPRAGGDATDSSQTALDNKASLLHSMPTHSSPRSRDYNPYNYSDSISPFNKSALKEAMFDDDADQFPDDLSLDHSDLVAELLKELSNHNERVEERKIALYELMKLTQEESFSVWDEHFKTILLLLLETLGDKEPTIRALALKVLREILRHQPARFKNYAELTVMKTLEAHKDPHKEVVRSAEEAASVLATSISPEQCIKVLCPIIQTADYPINLAAIKMQTKVIERVSKETLNLLLPEIMPGLIQGYDNSESSVRKACVFCLVAVHAVIGDELKPHLSQLTGSKMKLLNLYIKRAQTGSGGADPTTDVSGQS

SEQ ID NO: 876510 - protein, 139 aa, Homo sapiens
QAEPSGAGTELYLFAVLFDLLVSESSLDHLMAMGDDKSFDDEESVDGNRPSSAASAFKVPAPKTSGNPANSARKPGSAGGPKVGGASKEGGAGAVDEDDFIKAFTDVPSIQIYSSRELEETLNKIREILSYHSNCRLPN

SEQ ID NO: 876511 - protein, 112 aa, Homo sapiens
ALFWGPYGVPVVFPREYRGQLLAGLIPTSVAGQCPAHTKFILCVECSGVIDRVSEELRPRDLLAPIWALPFLVAMSLPSLCLTFISQVTQQYLWHLSKYWWWSHRTHTRSYL

SEQ ID NO: 876512 - protein, 142 aa, Homo sapiens
MGDNITSITEFLLLGFPVGPRIQMLLFGLFSLFYVFTLLGNGTILGLISLDSRLHAPMYFFLSHLAVVDIAYACNTVPRMLVNLLHPAKPISFAGRMMQTFLFSTFAVTECLLLVVMSYDLYVAICHPLRYLGHHDLESLHH

SEQ ID NO: 876513 - protein, 783 aa, Homo sapiens
WPPATARSTESFTSTSRSKSEVSPGMAFSNMTNFLCPSSPTTPWTPELQGPTSKDEAGVSEHPEAPAREPLRRTTPQQGASGPGRSPVGQARQPEKPSHLHLEKASSWPHRRDSGRPPGDSSGQAVAPSEGANKHKGWSRQGLRRPSILPEGSSDSRGPAVEKHPGPSDTVVFREKKPKEVMGGFSRRCSKLINSSQLLYQEYSDVVLNKEIQSQQRLESLSETPGPSSPRQPRKALVSSESYLQRLSMASSGSLWQEIPVVRNSTVLLSMTHEDQKLQEVKFELIVSEASYLRSLNIAVDHFQLSTSLRATLSNQEHQWLFSRLQDVRDVSATFLSDLEENFENNIFSFQVCDVVLNHAPDFRRVYLPYVTNQTYQERTFQSLMNSNSNFREVLEKLESDPVCQRLSLKSFLILPFQRITRLKLLLQNILKRTQPGSSEEAEATKAHHALEQLIRDCNNNVQSMRRTEELIYLSQKIEFECKIFPLISQSRWLVKSGELTALEFSASPGLRRKLNTRPVHLHLFNDCLLLSRPREGSRFLVFDHAPFSSIRGEKCEMKLHGPHKNLFRLFLRQNTQGAQAEFLFRTETQSEKLRWISALAMPREELDLLECYNSPQVQGLRAYKPRENDEMALEKADVVMVTQQSSDGWLEGVKVSDGERGWFPVQQVEFISNPEVRGQNLKEAHRVKTAKLQLVEQQAKVFSEEEFRELKNKLLMARAGPRTLQERPSVDGELGLLKAQGQNPANPVPRPRLLSCLCLVRGDSTDFALDSGTFHHHTGDLG

SEQ ID NO: 876514 - protein, 757 aa, Homo sapiens
WPPATARSTESFTSTSRSKSEVSPGMAFSNMTNFLCPSSPTTPWTPELQGPTSKDEAGVSEHPEAPAREPLRRTTPQQGASGPGRSPVGQARQPEKPSHLHLEKASSWPHRRDSGRPPGDSSGQAVAPSEGANKHKGWSRQGLRRPSILPEGSSDSRGPAVEKHPGPSDTVVFREKKPKEVMGGFSRRCSKLINSSQLLYQEYSDVVLNKEIQSQQRLESLSETPGPSSPRQPRKALVSSESYLQRLSMASSGSLWQEIPVVRNSTVLLSMTHEDQKLQEVKFELIVSEASYLRSLNIAVDHFQLSTSLRATLSNQEHQWLFSRLQDVRDVSATFLSDLEENFENNIFSFQVCDVVLNHAPDFRRVYLPYVTNQTYQERTFQSLMNSNSNFREVLEKLESDPVCQRLSLKSFLILPFQRITRLKLLLQNILKRTQPGSSEEAEATKAHHALEQLIRDCNNNVQSMRRTEELIYLSQKIEFECKIFPLISQSRWLVKSGELTALEFSASPGLRRKLNTRPVHLHLFNDCLLLSRPREGSRFLVFDHAPFSSIRGEKCEMKLHGPHKNLFRLFLRQNTQGAQAEFLFRTETQSEKLRWISALAMPREELDLLECYMDMGDNITSITEFLLLGFPVGPRIQMLLFGLFSLFYVFTLLGNGTILGLISLDSRLHAPMYFFLSHLAVVDIAYACNTVPRMLVNLLHPAKPISFAGRMMQTFLFSTFAVTECLLLVVMSYDLYVAICHPLRYLGHHDLESLHH

SEQ ID NO: 876515 - protein, 590 aa, Homo sapiens
WPPATARSTESFTSTSRSKSEVSPGMAFSNMTNFLCPSSPTTPWTPELQGPTSKDEAGVSEHPEAPAREPLRRTTPQQGASGPGRSPVGQARQPEKPSHLHLEKASSWPHRRDSGRPPGDSSGQAVAPSEGANKHKGWSRQGLRRPSILPEGSSDSRGPAVEKHPGPSDTVVFREKKPKEVMGGFSRRCSKLINSSQLLYQEYSDVVLNKEIQSQQRLESLSETPGPSSPRQPRKALVSSESYLQRLSMASSGSLWQEIPVVRNSTVLLSMTHEDQKLQEVKFELIVSEASYLRSLNIAVDHFQLSTSLRATLSNQEHQWLFSRLQDVRDVSATFLSDLEENFENNIFSFQVCDVVLNHAPDFRRVYLPYVTNQTYQERTFQSLMNSNSNFREVLEKLESDPVCQRLSLKSFLILPFQRITRLKLLLQNILKRTQPGSSEEAEATKAHHALEQLIRDCNNNVQSMRRTEELIYLSQKIEFECKIFPLISQSRWLVKSGELTALEFSASPGLRRKLNTRPVHLHLFNDCLLLSRPREGSRFLVFDHAPFSSIRGEKCEMKLHGPHKNLFRLFLRQNTQGAQAEFLFRTETQ

SEQ ID NO: 876516 - protein, 563 aa, Homo sapiens
WPPATARSTESFTSTSRSKSEVSPGMAFSNMTNFLCPSSPTTPWTPELQGPTSKDEAGVSEHPEAPAREPLRRTTPQQGASGPGRSPVGQARQPEKPSHLHLEKASSWPHRRDSGRPPGDSSGQAVAPSEGANKHKGWSRQGLRRPSILPEGSSDSRGPAVEKHPGPSDTVVFREKKPKEVMGGFSRRCSKLINSSQLLYQEYSDVVLNKEIQSQQRLESLSETPGPSSPRQPRKALVSSESYLQRLSMASSGSLWQEIPVVRNSTVLLSMTHEDQKLQEVKFELIVSEASYLRSLNIAVDHFQLSTSLRATLSNQEHQWLFSRLQDVRDVSATFLSDLEENFENNIFSFQVCDVVLNHAPDFRRVYLPYVTNQTYQERTFQSLMNSNSNFREVLEKLESDPVCQRLSLKSFLILPFQRITRLKLLLQNILKRTQPGSSEEAEATKAHHALEQLIRDCNNNVQSMRRTEELIYLSQKIEFECKIFPLISQSRWLVKSGELTALEFSASPGLRRKLNTRPVHLHLFNDCLLLSRPRESVTGVAGQGTRGEGDEERGGSEREREG

SEQ ID NO: 876517 - protein, 213 aa, Homo sapiens
ARDPLCSKEDSGLSLRTPGAWMTTATPGAHPFPTTPASLQPRTPASPTPRIRCVSAWPGRRGRRARGPTARPHLLFSTIQTFSYSWWGRGTLLRGRQCGLPGLALRRGGGAEYEPAEVGPAEGGSGGDAITKPVRLGAGRTAPLWTAEALHCAGRGRVPLQPLKAAAPAGRTGECGHLDEALAPKLGPPESHVPFTRQAFRGKTKRSPPNPQT

SEQ ID NO: 876518 - protein, 213 aa, Homo sapiens; identical to SEQ ID NO: 876517

SEQ ID NO: 876519 - protein, 213 aa, Homo sapiens; identical to SEQ ID NO: 876517

SEQ ID NO: 876520 - protein, 213 aa, Homo sapiens; identical to SEQ ID NO: 876517

SEQ ID NO: 876521 - protein, 193 aa, Homo sapiens
  misc_feature (34)..(34): Xaa can be any naturally occurring amino acid
  misc_feature (41)..(41): Xaa can be any naturally occurring amino acid
SGRRSNPFRPVLAQGLHCTWYMCMVTSTSEHPLXTDRRRMXVCSTVTPETDQKAPNELSVVCLPENQVQYSQVVSAQVYCHPIYWRRSAREARIDLTWKREAMRDPVSSQYSSFLFWRMPIPELDLSELEGLGLSDTATYKVKDSSVGKMIGQATAADQEKNPEGDGLLEYSTFNFWESSHVPASTPSNWTVL

SEQ ID NO: 876522 - protein, 213 aa, Homo sapiens; identical to SEQ ID NO: 876517

SEQ ID NO: 876523 - protein, 213 aa, Homo sapiens; identical to SEQ ID NO: 876517

SEQ ID NO: 876524 - protein, 213 aa, Homo sapiens; identical to SEQ ID NO: 876517

SEQ ID NO: 876525 - protein, 146 aa, Homo sapiens
AGYLGTGPRIDTERSDREHVTVVHCYCRYCSRRVCTSPALIIGTCRRLGSDRQEAMRDPVSSQYSSFLFWRMPIPELDLSELEGLGLSDTATYKVKDSSVGKMIGQATAADQEKNPEGDGLLEYSTFNFWESSHVPASTPSNWTVL

SEQ ID NO: 876526 - protein, 213 aa, Homo sapiens; identical to SEQ ID NO: 876517

SEQ ID NO: 876527 - protein, 237 aa, Homo sapiens
MRPWVAVLSLFPSRGWAGAALGPKVAPGQQPSQQHSLYGAEEEQQQQDGEVVNWGRQGTGRCSGASPCVSGAQRAEHQWVTGEKQGRLGKGAGLTEQWVAGGGAGQGLHQGGVEDEVTQQQCHLVAYALNGPEGQQPPAHVSQQQCLCRHQESDDGLERRVLQPQLEGEKSGPSRRGGRRWASGAWGLASGRASSLPPASSSPLSASSRLDSPSPGSRAPAAGVGLGSSDHKLRIPS

SEQ ID NO: 876528 - protein, 237 aa, Homo sapiens; identical to SEQ ID NO: 876527

SEQ ID NO: 876529 - protein, 152 aa, Homo sapiens
MILGMGLWIDPPRDEKAGRICQQRHGADPARCPRAVPSAQRGAVHHPGYWNPLPRIFFSPSTTAENQSARPSPVRCLHSGTSALTSCKPNLTFTGSKISISGSQWSDPTSPPSQGQATEEWSYLVFLHFPAKGKMVLPAKLSLQPGGASIKV

SEQ ID NO: 876530 - protein, 341 aa, Homo sapiens
MAHQLRPGVLLASEREQSVCTSLGRLQSRVCTWRARMCASPRAFVSHRRVCTSCALYACLPARSVVPSRGTPHPPGKGRISESLALPAGASLRSLHGARGAARLPGPAEDKRCVQSRAPGRPGRVRRERLRPQRWSPGCVGALWSLRLATGCGRESPESSQVTRRAAFWDGGRSSLEADGGAGCPGGGGSGTQALLQTTSAELGEAQAKLMEQERALRELLTHGLAEAGRDREDVSTELYRALEAVRLQNSEGSCEPCPTSWLPFGGSCYYFSVPKTTWAEAQGHCADASAHLADVGGLGEQDFLSRDTSAREYWIGRRAVQHLRKVQGYSWVDGVPLSFR

SEQ ID NO: 876531 - protein, 113 aa, Homo sapiens [sequence omitted]

SEQ ID NO: 876532 - protein, 81 aa, Homo sapiens
NFKGIIKRHLYFQVDSLSILTPLPSPQVHGSDFSLHFLLGHTSLYREQYRWLSVSPSSTSLDSTNYGSKIFEKNTKNNTTT

SEQ ID NO: 876533 - protein, 67 aa, Homo sapiens
KIPSKHERPGETPGTDAPSQPSEGTNSADTWISDFQPLKLRDNAFLLCMPLDLWDSVMAAPANEYTK

SEQ ID NO: 876534 - protein, 198 aa, Homo sapiens
GPGAGAEPRGPGHGAACPSPAVPPDPLPSAGTWPEAPPAARDPSPTLPPDPRPRTAGSLPGPAARPGENRPGGQGGGGPREAWPGSGEKGAAQPEFPTFYPGPDAAGADGTLALCLLLLLHGAMRLGGGSREKLACGRAGRAARTGRGEGGRQAEEEGRRRRRRRRRPGRTRGIPRAAGGLSRAGTRVLRYPSSHRRQ

SEQ ID NO: 876535 - protein, 198 aa, Homo sapiens; identical to SEQ ID NO: 876534

SEQ ID NO: 876536 - protein, 112 aa, Homo sapiens
WQADPPQQAINIGILHAHTQALASHLHPLPGLSFTLRLQFPSFCHIYISSQALPLSQVFISSCPLEAHRLLKVTLSTVSSSVQTRHMSQRASRPPETGPWTPPSPDHPLYPG

SEQ ID NO: 876537 - protein, 102 aa, Homo sapiens
MKTFELWDGSGQSLCGLCLPGIGPHPCHLQETWGDALDCCSLLSAHQLKTSVIPYYGGKQPVPVGLLWIQQAAFVSPNSETLQKATEWAGDCFLGREPQVLN

SEQ ID NO: 876538 - protein, 358 aa, Homo sapiens
GVLEASGRVRGRSLPAAEPGSERAQRAAGLGSMRPGGERPVEGGACNGRSELELLKLRSAECIDEAAERLGALSRAIWSQPELAYEEHHAHRVLTHFFEREPPAASWAVQPHYQLPTAFRAEWEPPEARAPSATPRPLHLGFLCEYDGCCPASATPAATTSSLRSGLAAALGVRGALEGLPRPPPPVKVVVLGTPAEEDGGGKIDLIEAGAFTNLDVVFMAHPSQENAAYLPDMAEHDVTVKYYGKASHSASYPWEGLNALDAAVLAYNNLSVFRQQMKPTWRVHGIIKNGGVKPNIIPSYSELIYYFRAPSMKELQVLTKKAEDCFRAAALASGCTVGNFKVGAPLFIYHGSFPNYK

SEQ ID NO: 876539 - protein, 469 aa, Homo sapiens
GVLEASGRVRGRSLPAAEPGSERAQRAAGLGSMRPGGERPVEGGACNGRSELELLKLRSAECIDEAAERLGALSRAIWSQPELAYEEHHAHRVLTHFFEREPPAASWAVQPHYQLPTAFRAEWEPPEARAPSATPRPLHLGFLCEYDGCCPASATPAATTSSLRSGLAAALGVRGALEGLPRPPPPVKVVVLGTPAEEDGGGKIDLIEAGAFTNLDVVFMAHPSQENAAYLPDMAEHDVTVKYYGKASHSASYPWEGLNALDAAVLAYNNLSVFRQQMKPTWRVHGIIKNGGVKPNIIPSYSELIYYFRAPSMKELQVLTKKAEDCFRAAALASGCTVEIKGGAHDYYNVLPNKSLWKAYMENGRKLGIEFISEDTMLNGPSGSTDFGNVSFVVPGIHPYFHIGSNALNHTEQYTEAAGSQEAQFYTLRTAKALAMTALDVIFKPELLEGIREDFKLKLQEEQFVNAVE

SEQ ID NO: 876540 - protein, 469 aa, Homo sapiens; identical to SEQ ID NO: 876539

SEQ ID NO: 876541 - protein, 469 aa, Homo sapiens; identical to SEQ ID NO: 876539

SEQ ID NO: 876542 - protein, 469 aa, Homo sapiens; identical to SEQ ID NO: 876539

SEQ ID NO: 876543 - protein, 469 aa, Homo sapiens; identical to SEQ ID NO: 876539

SEQ ID NO: 876544 - protein, 469 aa, Homo sapiens; identical to SEQ ID NO: 876539

SEQ ID NO: 876545 - protein, 469 aa, Homo sapiens; identical to SEQ ID NO: 876539

SEQ ID NO: 876546 - protein, 209 aa, Homo sapiens
GVLEASGRVRGRSLPAAEPGSERAQRAAGLGSMRPGGERPVEGGACNGRSELELLKLRSAECIDEAAERLGALSRAIWSQPELAYEEHHAHRVLTHFFEREPPAASWAVQPHYQLPTAFRAEWEPPEARAPSATPRPLHLGFLCEYDGCCPASATPAATTSSLRSGLAAALGVRGALEGLPRPPPPVKVVVLGTPAEEDGGKFSRDLFI

SEQ ID NO: 876547 - protein, 255 aa, Homo sapiens
MEVPPPAPRSFLCRALCLFPRVFAAEAVTADSEVLEERQKRLPYVPEPYYPESGWDRLRELFGKDEQQRISKDLANICKTAATAGIIGWVYGGIPAFIHAKQQYIEQSQAEIYHNRFDAVQSAHRAATRGFIRYGWRWGWRTAVFVTIFNTVNTSLNVYRNKDALSHFVIAGAVTGSLFRINVGLRGLVAGGIIGALLGTPVGGLLMAFQKYSGETVQERTRVKGLTNGGGGLDEVRNGGVEDGIEKGLQVKEEG

SEQ ID NO: 876548 - protein, 350 aa, Homo sapiens
MEVPPPAPRSFLCRALCLFPRVFAAEAVTADSEVLEERQKRLPYVPEPYYPESGWDRLRELFGKDEQQRISKDLANICKTAATAGIIGWVYGGIPAFIHAKQQYIEQSQAEIYHNRFDAVQSAHRAATRGFIRYGWRWGWRTAVFVTIFNTVNTSLNVYRNKDALSHFVIAGAVTGSLFRINVGLRGLVAGGIIGALLGTPVGGLLMAFQKYSGETVQERKQKDRKALHELKLEEWKGRLQVTEHLPEKNESSLQEDEPENDAKKIEPGKLPETFYGYQTRAECRLEPGTKDCQFDRIAKRPLGPRRNIAGRGEKDRIASTQGADTKHQNHVKTKMNYPREIRKNSIALL

SEQ ID NO: 876549 - protein, 65 aa, Homo sapiens
MGQQAQAFGAPLFCHHGKAKPLHRGQGLQDALVSGSQERVCLHGREALRKADRTLTGDSPGLRGS

SEQ ID NO: 876550 - protein, 540 aa, Homo sapiens
MNSTGHLQDAPNATSLHVPHSQEGNSTSLQEGLQDLIHTATLVTCTFLLAVIFCLGSYGNFIVFLSFFDPAFRKFRTNFDFMILNLSFCDLFICGVTAPMFTFVLFFSSASSIPDAFCFTFHLTSSGFIIMSLKTVAVIALHRLRMVLGKQPNRTASFPCTVLLTLLLWATSFTLATLATLKTSKSHLCLPMSSLIAGKGKAILSLYVVDFTFCVAVVSVSYIMIAQTLRKNAQVRKCPPVITVDASRPQPFMGVPVQGGGDPIQCAMPALYRNQNYNKLQHVQTRGYTKSPNQLVTPAASRLQLVSAINLSTAKDSKAVVTCVIIVLSVLVCCLPLGISLVQVVLSSNGSFILYQFELFGFTLIFFKSGLNPFIYSRNSAGLRRKVLWCLQYIGLGFFCCKQKTRLRAMGKGNLEVNRNKSSHHETNSAYMLSPKPQKKFVDQACGPSHSKESMVSPKISAGHQHCGQSSSTPINTRIEPYYSIYNSSPSQEESSPCNLQPVNSFGFANSYIAMHYHTTNDLVQEYDSTSAKQIPVPSV

SEQ ID NO: 876551 - protein, 166 aa, Homo sapiens
MNSTGHLQDAPNATSLHVPHSQEGNSTSLQEGLQDLIHTATLVTCTFLLAVIFCLGSYGNFIVFLSFFDPAFRKFRTNFDFMILNLSFCDLFICGVTAPMFTFVLFFSSASSIPDAFCFTFHLTSSGFIIMSLKTVAVIALHRLRMVLGKQPNRTASFPCTVLLTL

SEQ ID NO: 876552 - protein, 236 aa, Homo sapiens
RRVEAGPAAAVSVSVSRPLQRPAAAAGGAETVGCVPFGAAPAEKAPKKQRGGLCPARTRRAACAPPPRSLAARPRPGPSRAHRGPTERPRRPERAHLSPRAGAMAEQESLEFGKADFVLMDTVSMPEFMANLRLRFEKGRIYTFIGEVVVSVNPYKLLNIYGRDTIEQYKGRELYERPPHLFAIADAAYKAMKRRSKDTCIVISGESGAGKTEASKYIMQYIAAITNPSQRAEVER

SEQ ID NO: 876553 - protein, 187 aa, Homo sapiens
PRGLPVAASRPLSSAASPLPRAKPIWSAEQAGAIGSGGSSHPSRIWAMAEPGEGLPEEVLALIFRHLSLRDRAAAARVCRAWAAAATCSAVWHDTKIRRPTRSVLDTLPPSLASTPLRTLQLRGPGAGRGRARARAGPQGTCPAHTRSRTGDFSCRTKKEIEGPRGVGLEPKSPTHLTPPHPTPPHP

SEQ ID NO: 876554 - protein, 355 aa, Homo sapiens [sequence omitted]

SEQ ID NO: 876555 - protein, 421 aa, Homo sapiens
PRGLPVAASRPLSSAASPLPRAKPIWSAEQAGAIGSGGSSHPSRIWAMAEPGEGLPEEVLALIFRHLSLRDRAAAARVCRAWAAAATCSAVWHDTKISCECELEGMLPPYLSACLDHIHNLRLEFEPSRKPSRRAAIELLMVLAGRAPGLRGLRLECRGEKPLFDAGRDVLEAVHAVCGAASQLRHLDLRRLSFTLDDALVLQAARSCPELHSLFLDNSTLVGSVGPGSVLELLEACPRLRALGLHLASLSHAILEALAAPDRAPFALLALRCACPEDARASPLPNEAWVALRRRHPGLAVELELEPALPAESVTRVLQPAVPVAALRLNLSGDTVGPVRFAAHHYAATLCALEVRAAASAELNAALEELAARCAALREVHCFCVVSHSVLDAFRAHCPRLRTYTLKLTREPHPWRPTLVA

SEQ ID NO: 876556 - protein, 421 aa, Homo sapiens; identical to SEQ ID NO: 876555

SEQ ID NO: 876557 - protein, 421 aa, Homo sapiens; identical to SEQ ID NO: 876555

SEQ ID NO: 876558 - protein, 108 aa, Homo sapiens
PLPRAKPIWSAEQVRHQRPRLDGRKTRLWGFAILTRRGARKSYSCQTSVNQGGAPWRPEFSGTPGDPASRSLLPVGTQNGVPMGPRYKPGRTYLKPQETRGTNSGRNC

SEQ ID NO: 876559 - protein, 334 aa, Homo sapiens
FVTGFGAGRLRAGCRSSLRRTCPQEPRRRLRLGRPSGPRTMSPRGTGCSAGLLMTVGWLLLAGLQSARGTNVTAAVQDAGLAHEGEGEEETENNDSETAENYAPPETEDVSNRNVVKEVEFGMCTVTCGIGVREVILTNGCPGGESKCVVRVEECRGPTDCGWGKPISESLESVRLACIHTSPLNRFKYMWKLLRQDQQSIILVNDSAILEVRKESHPLAFECDTLDNNEIVATIKFTVYTSSELQMRRSSLPATDAALIFVLTIGVIICVFIIFLLIFIIINWAAVKAFWGAKASTPEVQSEQSSVRYKDSTSLDQLPTEMPGEDDALSEWNE

SEQ ID NO: 876560 - protein, 219 aa, Homo sapiens
RLRCSRGARRSRSPAPPPRRRLRLGRPSGPRTMSPRGTGCSAGLLMTVGWLLLAGLQSARGTNVTAAVQDAGLAHEGEGEEETENNDSETAENYAPPETEDVSHTECRQKTRTNFGTVQPVKHVVLRVRRSYYYTTWHALVVESKVVVRYGVRSNASGPTTTWMRLAVLTPPSISPTKILGEACVTHFAAMLIYTHISSPLRLRVSTHSAAPNLLTNKN

SEQ ID NO: 876561 - protein, 261 aa, Homo sapiens
FVTGFGAGRLRAGCRSSLRRTCPQEPRRRLRLGRPSGPRTMSPRGTGCSAGLLMTVGWLLLAGLQSARGTNVTAAVQDAGLAHEGEGEEETENNDSETAENYAPPETEDVSNRNVVKEVEFGMCTVTCGIGVREVILTNGCPGGESKCVVRVEECRGPTDCGWGKPISESLESVRLACIHTSPLNRFKYMWKLLRQDQQSIILVNDSAILEVRKESHPLAFECDTLDNNEIVATIKFTVYTSSGLCVFSRIADEKIKPTSH

SEQ ID NO: 876562 - protein, 268 aa, Homo sapiens
FVTGFGAGRLRAGCRSSLRRTCPQEPRRRLRLGRPSGPRTMSPRGTGCSAGLLMTVGWLLLAGLQSARGTNVTAAVQDAGLAHEGEGEEETENNDSETAENYAPPETEDVSNRNVVKEVEFGMCTVTCGIGVREVILTNGCPGGESKCVVRVEECRGPTDCGWGKPISESLESVRLACIHTSPLNRFKYMWKLLRQDQQSIILVNDSAILEVRKESHPLAFECDTLDNNEIVATIKFTVYTSSVNCKALSVMSPTCCLETVHRLSLLL

SEQ ID NO: 876563 - protein, 102 aa, Homo sapiens
MDRLKSHLTVCFLPSVPFLILVSTLATAKSVTNSTLNGTNVVLGSVPVIIARTDHIIVKEGNSALINCSVYGIPDPQFKWYNSIGKLLKEEEDEKERGGGRL

SEQ ID NO: 876564 - protein, 409 aa, Homo sapiens
MDRLKSHLTVCFLPSVPFLILVSTLATAKSVTNSTLNGTNVVLGSVPVIIARTDHIIVKEGNSALINCSVYGIPDPQFKWYNSIGKLLKEEEDEKERGGGKWQMHDSGLLNITKVSFSDRGKYTCVASNIYGTVNNTVTLRVIFTSGDMGVYYMVVCLVAFTIVMVLNITRLCMMSSHLKKTEKAINEFFRTEGAEKLQKAFEIAKRIPIITSAKTLELAKVTQFKTMEFARYIEELARSVPLPPLIMNCRTIMEEIMEVVGLEEQGQNFVRHTPEGQEAADRDEVYTIPNSLKRSDSPAADSDASSLHEQPQQIAIKVSVHPQSKKEHADDQEGGQFEVKDVEETELSAEHSPETAEPSTDVTSTELTSEEPTPVEVPDKVLPPAYLEATEPAVTHDKNTCIIYESHV

SEQ ID NO: 876565 - protein, 409 aa, Homo sapiens; identical to SEQ ID NO: 876564

SEQ ID NO: 876566 - protein, 306 aa, Homo sapiens
MHDSGLLNITKVSFSDRGKYTCVASNIYGTVNNTVTLRVIFTSGDMGVYYMVVCLVAFTIVMVLNITRLCMMSSHLKKTEKAINEFFRTEGAEKLQKAFEIAKRIPIITSAKTLELAKVTQFKTMEFARYIEELARSVPLPPLIMNCRTIMEEIMEVVGLEEQGQNFVRHTPEGQEAADRDEVYTIPNSLKRSDSPAADSDASSLHEQPQQIAIKVSVHPQSKKEHADDQEGGQFEVKDVEETELSAEHSPETAEPSTDVTSTELTSEEPTPVEVPDKVLPPAYLEATEPAVTHDKNTCIIYESHV

SEQ ID NO: 876567 - protein, 306 aa, Homo sapiens; identical to SEQ ID NO: 876566

SEQ ID NO: 876568 - protein, 409 aa, Homo sapiens; identical to SEQ ID NO: 876564

SEQ ID NO: 876569 - protein, 306 aa, Homo sapiens; identical to SEQ ID NO: 876566

SEQ ID NO: 876570 - protein, 409 aa, Homo sapiens; identical to SEQ ID NO: 876564

SEQ ID NO: 876571 - protein, 306 aa, Homo sapiens; identical to SEQ ID NO: 876566

SEQ ID NO: 876572 - protein, 102 aa, Homo sapiens; identical to SEQ ID NO: 876563

SEQ ID NO: 876573 - protein, 99 aa, Homo sapiens
QGVLSALTPGFCCQGLEAWRWPLSQQESSKSSVCPGEGSWVGEVPRAAAAQTIPCQCQALTDPGVPGGGVLTARKGPVFEEQWNVLGTLCRHSSALLGL

SEQ ID NO: 876574 - protein, 69 aa, Homo sapiens
AWLCTVWPDPMLTHPLLLHIWFTHGRHGIQASSTSRAQPARPSGWNKHSEPEQHLGKGTTGHRGFQLEK

SEQ ID NO: 876575 - protein, 66 aa, Homo sapiens
ECERSRRHLERVDPRKSGESSSLACPGPSQLSLLESQPCDSSPPGPCFLNPTSDRWPEGECRRPLL

SEQ ID NO: 876576 - protein, 301 aa, Homo sapiens
GWGRGVSRGLARAPSGPAAWSHLAMVRLPLQCVLWGCLLTAVHPEPPTACREKQYLINSQCCSLCQPGQKLVSDCTEFTETECLPCGESEFLDTWNRETHCHQHKYCDPNLGLRVQQKGTSETDTICTCEEGWHCTSEACESCVLHRSCSPGFGVKQIATGVSDTICEPCPVGFFSNVSSAFEKCHPWTSCETKDLVVQQAGTNKTDVVCGPQDRLRALVVIPIIFGILFAILLVLVFIKKVAKKPTNKAPHPKQEPQEINFPDDLPGSNTAAPVQETLHGCQPVTQEDGKESRISVQERQ

SEQ ID NO: 876577 - protein, 301 aa, Homo sapiens; identical to SEQ ID NO: 876576

SEQ ID NO: 876578 - protein, 301 aa, Homo sapiens; identical to SEQ ID NO: 876576

SEQ ID NO: 876579 - protein, 227 aa, Homo sapiens
GWGRGVSRGLARAPSGPAAWSHLAMVRLPLQCVLWGCLLTAVHPEPPTACREKQYLINSQCCSLCQPGQKLVSDCTEFTETECLPCGESEFLDTWNRETHCHQHKYCDPNLGLRVQQKGTSETDTICTCEEGWHCTSEACESCVLHRSCSPGFGVKQIATGVSDTICEPCPVGFFSNVSSAFEKCHPWTRSPGSAESPGGDPHHLRDPVCHPLGAGLYQKGGQEANQ

SEQ ID NO: 876580 - protein, 215 aa, Homo sapiens
GWGRGVSRGLARAPSGPAAWSHLAMVRLPLQCVLWGCLLTAVHPEPPTACREKQYLINSQCCSLCQPGQKLVSDCTEFTETECLPCGESEFLDTWNRETHCHQHKYCDPNLGLRVQQKGTSETDTICTCEEGWHCTSEACESCVLHRSCSPGFGVKQIATGVSDTICEPCPVGFFSNVSSAFEKCHPWTSCETKDLVVQQAGTNKTDVVCGLGLE

SEQ ID NO: 876581 - protein, 261 aa, Homo sapiens
GWGRGVSRGLARAPSGPAAWSHLAMVRLPLQCVLWGCLLTAVHPEPPTACREKQYLINSQCCSLCQPGQKLVSDCTEFTETECLPCGESEFLDTWNRETHCHQHKYCDPNLGLRVQQKGTSETDTICTCEEGWHCTSEACESCVLHRSCSPGFGVKQIATGVSDTICEPCPVGFFSNVSSAFEKCHPWTSCETKDLVVQQAGTNKTDVVCGESWTMGPGESLGRSPGSAESPGGDPHHLRDPVCHPLGAGLYQKGGQEANQ

SEQ ID NO: 876582 - protein, 122 aa, Homo sapiens
MLARLWGQADCCETKDLVVQQAGTNKTDVVCGPQDRLRALVVIPIIFGILFAILLVLVFIKKVAKKPTNKAPHPKQEPQEINFPDDLPGSNTAAPVQETLHGCQPVTQEDGKESRISVQERQ

SEQ ID NO: 876583 - protein, 268 aa, Homo sapiens
GWGRGVSRGLARAPSGPAAWSHLAMVRLPLQCVLWGCLLTAVHPEPPTACREKQYLINSQCCSLCQPGQKLVSDCTEFTETECLPCGESEFLDTWNRETHCHQHKYCDPNLGLRVQQKGTSETDTICTCEEGWHCTSEACESCVLHRSCSPGFGVKQIATGVSDTICEPCPVGFFSNVSSAFEKCHPWTSCETKDLVVQQAGTNKTDVVCGESWTMGPGESLGRWELKGEMRHTGTLDGKKGRGGSLGVWYHSSATYLGSLGKSLPLS

SEQ ID NO: 876584 - protein, 301 aa, Homo sapiens; identical to SEQ ID NO: 876576

SEQ ID NO: 876585 - protein, 301 aa, Homo sapiens; identical to SEQ ID NO: 876576

SEQ ID NO: 876586 - protein, 309 aa, Homo sapiens
MVRLPLQCVLWGCLLTAFAASVLDDFYLSAEEVATEISRSLQIAQFCFEVHPEPPTACREKQYLINSQCCSLCQPGQKLVSDCTEFTETECLPCGESEFLDTWNRETHCHQHKYCDPNLGLRVQQKGTSETDTICTCEEGWHCTSEACESCVLHRSCSPGFGVKQIATGVSDTICEPCPVGFFSNVSSAFEKCHPWTSCETKDLVVQQAGTNKTDVVCGPQDRLRALVVIPIIFGILFAILLVLVFIKKVAKKPTNKAPHPKQEPQEINFPDDLPGSNTAAPVQETLHGCQPVTQEDGKESRISVQERQ

SEQ ID NO: 876587 - protein, 301 aa, Homo sapiens; identical to SEQ ID NO: 876576

SEQ ID NO: 876588 - protein, 122 aa, Homo sapiens; identical to SEQ ID NO: 876582

SEQ ID NO: 876589 - protein, 339 aa, Homo sapiens
GWGRGVSRGLARAPSGPAAWSHLAMVRLPLQCVLWGCLLTAVHPEPPTACREKQYLINSQCCSLCQPGQKLVSDCTEFTETECLPCGESEFLDTWNRETHCHQHKYCDPNLGLRVQQKGTSETDTICTCEEGWHCTSEACESCVLHRSCSPGFGVKQIATGVSDTICEPCPVGFFSNVSSAFEKCHPWTSCETKDLVVQQAGTNKTDVVCGESWTMGPGESLGRSPGSAESPGGDPHHLRDPVCHPLGAGLYQPPTPSRNPRRSIFPTIFLAPTLLLQCRRLYMDANRSPRRMAKRVASQCRRDSEAAPTQECGHVGKQAVGQRAWCCCCCGVRVRGWH

SEQ ID NO: 876590 - protein, 175 aa, Homo sapiens
GWGRGVSRGLARAPSGPAAWSHLAMVRLPLQCVLWGCLLTAVHPEPPTACREKQYLINSQCCSLCQPGQKLVSDCTEFTETECLPCGESEFLDTWNRETHCHQHKYCDPNLGLRVQQKGTSETDTICTCEEGWHCTSEACESCVLHRSCSPGFGVKQIDICQPHFPKDRGLNLLM

SEQ ID NO: 876591 - protein, 215 aa, Homo sapiens; identical to SEQ ID NO: 876580

SEQ ID NO: 876592 - protein, 46 aa, Homo sapiens
MASGALLEPGPEPLFLAVLAIGGQSRRGDLPWTTKNGWGWFNWRGS

SEQ ID NO: 876593 - protein, 1067 aa, Homo sapiens
MNSMDRHIQQTNDRLQCIKQHLQNPANFHNAATELLDWCGDPRAFQRPFEQSLMGCLTVVSRVAAQQGFDLDLGYRLLAVCAANRDKFTPKSAALLSSWCEELGRLLLLRHQKSRQSDPPGKLPMQPPLSSMSSMKPTLSHSDGSFPYDSVPWQQNTNQPPGSLSVVTTVWGVTNTSQSQVLGNPMANANNPMNPGGNPMASGMTTSNPGLNSPQFAGQQQQFSAKAGPAQPYIQQSMYGRPNYPGSGGFGASYPGGPNAPAGMGIPPHTRPPADFTQPAAAAAAAAVAAAAATATATATATVAALQETQNKDINQYGPMGPTQAYNSQFMNQPGPRGPASMGGSMNPASMAAGMTPSGMSGPPMGMNQPRPPGISPFGTHGQRMPQQTYPGPRPQSLPIQNIKRPYPGEPNYGNQQYGPNSQFPTQPGQYPAPNPPRPLTSPNYPGQRMPSQPSSGQYPPPTVNMGQYYKPEQFNGQNNTFSGSSYSNYSQGNVNRPPRPVPVANYPHSPVPGNPTPPMTPGSSIPPYLSPSQDVKPPFPPDIKPNMSALPPPPANHNDELRLTFPVRDGVVLEPFRLEHNLAVSNHVFHLRPTVHQTLMWRSDLELQFKCYHHEDRQMNTNWPASVQVSVNATPLTIERGDNKTSHKPLHLKHVCQPGRNTIQITVTACCCSHLFVLQLVHRPSVRSVLQGLLKKRLLPAEHCITKIKRNFSSVAASSGNTTLNGEDGVEQTAIKVSLKCPITFRRIQLPARGHDCKHVQCFDLESYLQLNCERGTWRCPVCNKTALLEGLEVDQYMWGILNAIQHSEFEEVTIDPTCSWRPVPIKSDLHIKDDPDGIPSKRFKTMSPSQMIMPNVMEMIAALGPGPSPYPLPPPPGGTNSNDYSSQGNNYQGHGNFDFPHGNPGGTSMNDFMHGPPQLSHPPDMPNNMAALEKPLSHPMQETMPHAGSSDQPHPSIQQGLHVPHPSSQSGPPLHHSGAPPPPPSQPPRQPPQAAPSSHPHSDLTFNPSSALEGQAGAQGASDMPEPSLDLLPELTNPDELLSYLDPPDLPSNSNDDLLSLFENN

SEQ ID NO: 876594 - protein, 997 aa, Homo sapiens
RPPPAGPQAPEGARAGSRPVQLLALLSSWCEELGRLLLLRHQKSRQSDPPGKLPMQPPLSSMSSMKPTLSHSDGSFPYDSVPWQQNTNQPPGSLSVVTTVWGVTNTSQSQVLGNPMANANNPMNPGGNPMASGMTTSNPGLNSPQFAGQQQQFSAKAGPAQPYIQQSMYGRPNYPGSGGFGASYPGGPNAPAGMGIPPHTRPPADFTQPAAAAAAAAVAAAAATATATATATVAALQETQNKDINQYGPMGPTQAYNSQFMNQPGPRGPASMGGSMNPASMAAGMTPSGMSGPPMGMNQPRPPGISPFGTHGQRMPQQTYPGPRPQSLPIQNIKRPYPGEPNYGNQQYGPNSQFPTQPGQYPAPNPPRPLTSPNYPGQRMPSQPSSGQYPPPTVNMGQYYKPEQFNGQNNTFSGSSYSNYSQGNVNRPPRPVPVANYPHSPVPGNPTPPMTPGSSIPPYLSPSQDVKPPFPPDIKPNMSALPPPPANHNDELRLTFPVRDGVVLEPFRLEHNLAVSNHVFHLRPTVHQTLMWRSDLELQFKCYHHEDRQMNTNWPASVQVSVNATPLTIERGDNKTSHKPLHLKHVCQPGRNTIQITVTACCCSHLFVLQLVHRPSVRSVLQGLLKKRLLPAEHCITKIKRNFSSVAASSGNTTLNGEDGVEQTAIKVSLKCPITFRRIQLPARGHDCKHVQCFDLESYLQLNCERGTWRCPVCNKTALLEGLEVDQYMWGILNAIQHSEFEEVTIDPTCSWRPVPIKSDLHIKDDPDGIPSKRFKTMSPSQMIMPNVMEMIAALGPGPSPYPLPPPPGGTNSNDYSSQGNNYQGHGNFDFPHGNPGGTSMNDFMHGPPQLSHPPDMPNNMAALEKPLSHPMQETMPHAGSSDQPHPSIQQGLHVPHPSSQSGPPLHHSGAPPPPPSQPPRQPPQAAPSSHPHSDLTFNPSSALEGQAGAQGASDMPEPSLDLLPELTNPDELLSYLDPPDLPSNSNDDLLSLFENN

SEQ ID NO: 876595 - protein, 980 aa, Homo sapiens
MNSMDRHIQQTNDRLQCIKQHLQNPANFHNAATELLDWCGDPRAFQRPFEQSLMGCLTVVSRVAAQQGFDLDLGYRLLAVCAANRDKFTPKSAALLSSWCEELGRLLLLRHQKSRQSDPPGKLPMQPPLSSMSSMKPTLSHSDGSFPYDSVPWQQNTNQPPGSLSVVTTVWGVTNTSQSQVLGNPMANANNPMNPGGNPMASGMTTSNPGLNSPQFAGQQQQFSAKAGPAQPYIQQSMYGRPNYPGSGGFGASYPGGPNAPAGMGIPPHTRPPADFTQPAAAAAAAAVAAAAATATATATATVAALQETQNKDINQYGPMGPTQAYNSQFMNQPGPRGPASMGGSMNPASMAAGMTPSGMSGPPMGMNQPRPPGISPFGTHGQRMPQQTYPGPRPQSLPIQNIKRPYPGEPNYGNQQYGPNSQFPTQPGQYPAPNPPRPLTSPNYPGQRMPSQPSSGQYPPPTVNMGQYYKPEQFNGQNNTFSGSSYSNYSQGNVNRPPRPVPVANYPHSPVPGNPTPPMTPGSSIPPYLSPSQDVKPPFPPDIKPNMSALPPPPANHNDELRLTFPVRDGVVLEPFRLEHNLAVSNHVFHLRPTVHQTLMWRSDLELQFKCYHHEDRQMNTNWPASVQVSVNATPLTIERGDNKTSHKPLHLKHVCQPGRNTIQITVTACCCSHLFVLQLVHRPSVRSVLQGLLKKRLLPAEHCITKIKRNFSSVAASSGNTTLNGEDGVEQTAIKVSLKCPITFRRIQLPARGHDCKHVQCFDLESYLQLNCERGTWRCPVCNKTALLEGLEVDQYMWGILNAIQHSEFEEVTIDPTCSWRPVPIKSDLHIKDDPDGIPSKRFKTMSPSQMIMPNVMEMIAALGPGPSPYPLPPPPGGTNSNDYSSQGNNYQGHGNFDFPHGNPGGTSMNDFMHGPPQLSHPPDMPNNMAALEKPLSHPMQETLLPELTNPDELLSYLDPPDLPSNSNDDLLSLFENN

SEQ ID NO: 876596 - protein, 1067 aa, Homo sapiens; identical to SEQ ID NO: 876593

SEQ ID NO: 876597 - protein, 134 aa, Homo sapiens
MARAVRGKAGEVQKPEPRAMVSVQPLPLSLCSKLPPAAAQAMDMCTSMYLQAWGGGGRVSGPAPDTALGCQPTLPALLHHHNLTQTPAHSSKSSLWPSLHRFAPSGLPLSRASWGACPVFTLFQAGLCPVSHMA

SEQ ID NO: 876598 - protein, 459 aa, Homo sapiens
MNSMDRHIQQTNDRLQCIKQHLQNPANFHNAATELLDWCGDPRAFQRPFEQSLMGCLTVVSRVAAQQGFDLDLGYRLLAVCAANRDKFTPKSAALLSSWCEELGRLLLLRHQKSRQSDPPGKLPMQPPLSSMSSMKPTLSHSDGSFPYDSVPWQQNTNQPPGSLSVVTTVWGVTNTSQSQVLGNPMANANNPMNPGGNPMASGMTTSNPGLNSPQFAGQQQQFSAKAGPAQPYIQQSMYGRPNYPGSGGFGASYPGGPNAPAGMGIPPHTRPPADFTQPAAAAAAAAVAAAAATATATATATVAALQETQNKDINQYGPVCSSFQMGPTQAYNSQFMNQPGPRGPASMGGSMNPASMAAGMTPSGMSGPPMGMNQPRPPGISPFGTHGQRMPQQTYPGPRPQSLPIQNIKRPYPGEVSAAVGAWEVGTGTPGLEDMGRGYGFGRGVAWTPAHLDKEAGA

SEQ ID NO: 876599 - protein, 135 aa, Homo sapiens
MNSMDRHIQQTNDRLQCIKQHLQNPANFHNAATELLDWCGDPRAFQRPFEQSLMGCLTVVSRVAAQQGFDLDLGYRLLAVCAANRDKFTPKSAGRCPWGTLRCHWEVGRGTDYKPCLFAAPAFWCLHLSRCSANP

SEQ ID NO: 876600 - protein, 45 aa, Homo sapiens
MANANNPMNPGGNPMASGMTTSNPGLNSPQFAGQQQQFSAKAGPA

SEQ ID NO: 876601 - protein, 1067 aa, Homo sapiens; identical to SEQ ID NO: 876593

SEQ ID NO: 876602 - protein, 1067 aa, Homo sapiens; identical to SEQ ID NO: 876593

SEQ ID NO: 876603 - protein, 1195 aa, Homo sapiens
IVPEIAPLHSSLGDKSKTPSQKKEKRRNVCTCMCSSLSPGGHACPVLTCATHGKHPEAFPALSPVGYPRCSPTGPSKGLWNLPVLWPEGSWEAAQGWQAWRDPVTTSPFSSRLDNVHGSRVEPSETARMNSMDRHIQQTNDRLQCIKQHLQNPANFHNAATELLDWCGDPRAFQRPFEQSLMGCLTVVSRVAAQQGFDLDLGYRLLAVCAANRDKFTPKSAALLSSWCEELGRLLLLRHQKSRQSDPPGKLPMQPPLSSMSSMKPTLSHSDGSFPYDSVPWQQNTNQPPGSLSVVTTVWGVTNTSQSQVLGNPMANANNPMNPGGNPMASGMTTSNPGLNSPQFAGQQQQFSAKAGPAQPYIQQSMYGRPNYPGSGGFGASYPGGPNAPAGMGIPPHTRPPADFTQPAAAAAAAAVAAAAATATATATATVAALQETQNKDINQYGPMGPTQAYNSQFMNQPGPRGPASMGGSMNPASMAAGMTPSGMSGPPMGMNQPRPPGISPFGTHGQRMPQQTYPGPRPQSLPIQNIKRPYPGEPNYGNQQYGPNSQFPTQPGQYPAPNPPRPLTSPNYPGQRMPSQPSSGQYPPPTVNMGQYYKPEQFNGQNNTFSGSSYSNYSQGNVNRPPRPVPVANYPHSPVPGNPTPPMTPGSSIPPYLSPSQDVKPPFPPDIKPNMSALPPPPANHNDELRLTFPVRDGVVLEPFRLEHNLAVSNHVFHLRPTVHQTLMWRSDLELQFKCYHHEDRQMNTNWPASVQVSVNATPLTIERGDNKTSHKPLHLKHVCQPGRNTIQITVTACCCSHLFVLQLVHRPSVRSVLQGLLKKRLLPAEHCITKIKRNFSSVAASSGNTTLNGEDGVEQTAIKVSLKCPITFRRIQLPARGHDCKHVQCFDLESYLQLNCERGTWRCPVCNKTALLEGLEVDQYMWGILNAIQHSEFEEVTIDPTCSWRPVPIKSDLHIKDDPDGIPSKRFKTMSPSQMIMPNVMEMIAALGPGPSPYPLPPPPGGTNSNDYSSQGNNYQGHGNFDFPHGNPGGTSMNDFMHGPPQLSHPPDMPNNMAALEKPLSHPMQETMPHAGSSDQPHPSIQQGLHVPHPSSQSGPPLHHSGAPPPPPSQPPRQPPQAAPSSHPHSDLTFNPSSALEGQAGAQGASDMPEPSLDLLPELTNPDELLSYLDPPDLPSNSNDDLLSLFENN

SEQ ID NO: 876604 - protein, 1067 aa, Homo sapiens; identical to SEQ ID NO: 876593

SEQ ID NO: 876605 - protein, 1067 aa, Homo sapiens; identical to SEQ ID NO: 876593

SEQ ID NO: 876606 - protein, 1067 aa, Homo sapiens; identical to SEQ ID NO: 876593

SEQ ID NO: 876607 - protein, 123 aa, Homo sapiens
IVPEIAPLHSSLGDKSKTPSQKKEKRRNVCTCMCSSLSPGGHACPVLTCATHGKHPEAFPALSPVGYPRCSPTGPSKGLWNLPVLWPEGSWEAAQGWQAWRDPVTTSPFSSQAGQRSWLSGRT

SEQ ID NO: 876608 - protein, 206 aa, Homo sapiens
MACSIVQFCYFQDLQAARDFLFPHLREEILSGALRRDPSKSTDWEDDGWGAWEENEPQEPEEEGNTCKTQKTSWLQDCVLSLSPTNDLMVIAREQKAVFLVPKWKYSDKGKEEMQFAVGWSGSLNVEEGECVTSALCIPLASQKRSSTGRPDWTCIVVGFTSGYVRFYTENGVLLLAQLLNEDPVLQLKCRTYEIPRHPGVTEQVV

SEQ ID NO: 876609 - protein, 1393 aa, Homo sapiens
MACSIVQFCYFQDLQAARDFLFPHLREEILSGALRRDPSKSTDWEDDGWGAWEENEPQEPEEEGNTCKTQKTSWLQDCVLSLSPTNDLMVIAREQKAVFLVPKWKYSDKGKEEMQFAVGWSGSLNVEEGECVTSALCIPLASQKRSSTGRPDWTCIVVGFTSGYVRFYTENGVLLLAQLLNEDPVLQLKCRTYEIPRHPGVTEQNEELSILYPAAIVTIDGFSLFQSLRACRNQVAKAAASGNENIQPPPLAYKKWGLQDIDTIIDHASVGIMTLSPFDQMKTASNIGGFNAAIKNSPPAMSQYITVGSNPFTGFFYALEGSTQPLLSHVALAVASKLTSALFNAASGWLGWKSKHEEEAVQKQKPKVEPATPLAVRFGLPDSRRHGESICLSPCNTLAAVTDDFGRVILLDVARGIAIRMWKGYRDAQIGWIQTVEDLHERVPEKADFSPFGNSQGPSRVAQFLVIYAPRRGILEVWSTQQGPRVGAFNVGKHCRLLYPGYKIMGLNNVTSQSWQPQTYQICLVDPVSGSVKTVNVPFHLALSDKKSERAKDMHLVKKLAALLKTKSPNLDLVETEIKELILDIKYPATKKQALESILASERLPFSCLRNITQTLMDTLKSQELESVDEGLLQFCANKLKLLQLYESVSQLNSLDFHLDTPFSDNDLALLLRLDEKELLKLQALLEKYKQENTRTNVRFSDDKDGVLPVKTFLEYLEYEKDVLNIKKISEEEYVALGSFFFWKCLHGESSTEDMCHTLESAGLSPQLLLSLLLSVWLSKEKDILDKPQSICCLHTMLSLLSKMKVAIDETWDSQSVSPWWQQMRTACIQSENNGAALLSAHVGHSVAAQISNNMTEKKFSQTVLGADSEALTDSWEALSLDTEYWKLLLKQLEDCLILQTLLHSKGNTQTSKVSSLQAEPLPRLSVKKLLEGGKGGIADSVAKWIFKQDFSPEVLKLANEERDAENPDEPKEGVNRSFLEVSEMEMDLGAIPDLLHLAYEQFPCSLELDVLHAHCCWEYVVQWNKDPEEARFFVRSIEHLKQIFNAHVQNGIALMMWNTFLVKRFSAATYLMDKVGKSPKDRLCRRDVGMSDTAMTSFLGSCLDLLQILMEADVSRDEIQVPVLDTEDAWLSVEGPISIVELALEQKHIHYPLVEHHSILCSILYAVMRFSLKTVKPLSLFDSKGKNAFFKDLTSIQLLPSGEMDPNFISVRQQFLLKVVSAAVQAQHSATKVKDPTEEATPTPFGKDQDWPALAVDLAHHLQVSEDVVRRHYVGELYNYGVDHLGEEAILQVHDKEVLASQLLVLTGQRLAHALLHTQTKEGMELLARLPPTLCTWLKAMDPQDLQNTEVPIATTAKLVNKVIELLPEKHGQYGLALHLIEAVEAISLPSL

SEQ ID NO: 876610 - protein, 1393 aa, Homo sapiens; identical to SEQ ID NO: 876609

SEQ ID NO: 876611 - protein, 1305 aa, Homo sapiens
MVIAREQKAVFLVPKWKYSDKGKEEMQFAVGWSGSLNVEEGECVTSALCIPLASQKRSSTGRPDWTCIVVGFTSGYVRFYTENGVLLLAQLLNEDPVLQLKCRTYEIPRHPGVTEQNEELSILYPAAIVTIDGFSLFQSLRACRNQVAKAAASGNENIQPPPLAYKKWGLQDIDTIIDHASVGIMTLSPFDQMKTASNIGGFNAAIKNSPPAMSQYITVGSNPFTGFFYALEGSTQPLLSHVALAVASKLTSALFNAASGWLGWKSKHEEEAVQKQKPKVEPATPLAVRFGLPDSRRHGESICLSPCNTLAAVTDDFGRVILLDVARGIAIRMWKGYRDAQIGWIQTVEDLHERVPEKADFSPFGNSQGPSRVAQFLVIYAPRRGILEVWSTQQGPRVGAFNVGKHCRLLYPGYKIMGLNNVTSQSWQPQTYQICLVDPVSGSVKTVNVPFHLALSDKKSERAKDMHLVKKLAALLKTKSPNLDLVETEIKELILDIKYPATKKQALESILASERLPFSCLRNITQTLMDTLKSQELESVDEGLLQFCANKLKLLQLYESVSQLNSLDFHLDTPFSDNDLALLLRLDEKELLKLQALLEKYKQENTRTNVRFSDDKDGVLPVKTFLEYLEYEKDVLNIKKISEEEYVALGSFFFWKCLHGESSTEDMCHTLESAGLSPQLLLSLLLSVWLSKEKDILDKPQSICCLHTMLSLLSKMKVAIDETWDSQSVSPWWQQMRTACIQSENNGAALLSAHVGHSVAAQISNNMTEKKFSQTVLGADSEALTDSWEALSLDTEYWKLLLKQLEDCLILQTLLHSKGNTQTSKVSSLQAEPLPRLSVKKLLEGGKGGIADSVAKWIFKQDFSPEVLKLANEERDAENPDEPKEGVNRSFLEVSEMEMDLGAIPDLLHLAYEQFPCSLELDVLHAHCCWEYVVQWNKDPEEARFFVRSIEHLKQIFNAHVQNGIALMMWNTFLVKRFSAATYLMDKVGKSPKDRLCRRDVGMSDTAMTSFLGSCLDLLQILMEADVSRDEIQVPVLDTEDAWLSVEGPISIVELALEQKHIHYPLVEHHSILCSILYAVMRFSLKTVKPLSLFDSKGKNAFFKDLTSIQLLPSGEMDPNFISVRQQFLLKVVSAAVQAQHSATKVKDPTEEATPTPFGKDQDWPALAVDLAHHLQVSEDVVRRHYVGELYNYGVDHLGEEAILQVHDKEVLASQLLVLTGQRLAHALLHTQTKEGMELLARLPPTLCTWLKAMDPQDLQNTEVPIATTAKLVNKVIELLPEKHGQYGLALHLIEAVEAISLPSL

SEQ ID NO: 876612 - protein, 1347 aa, Homo sapiens
  misc_feature (14)..(14): Xaa can be any naturally occurring amino acid
MSTNKHEPALGRTXEEEGNTCKTQKTSWLQDCVLSLSPTNDLMVIAREQKAVFLVPKWKYSDKGKEEMQFAVGWSGSLNVEEGECVTSALCIPLASQKRSSTGRPDWTCIVVGFTSGYVRFYTENGVLLLAQLLNEDPVLQLKCRTYEIPRHPGVTEQNEELSILYPAAIVTIDGFSLFQSLRACRNQVAKAAASGNENIQPPPLAYKKWGLQDIDTIIDHASVGIMTLSPFDQMKTASNIGGFNAAIKNSPPAMSQYITVGSNPFTGFFYALEGSTQPLLSHVALAVASKLTSALFNAASGWLGWKSKHEEEAVQKQKPKVEPATPLAVRFGLPDSRRHGESICLSPCNTLAAVTDDFGRVILLDVARGIAIRMWKGYRDAQIGWIQTVEDLHERVPEKADFSPFGNSQGPSRVAQFLVIYAPRRGILEVWSTQQGPRVGAFNVGKHCRLLYPGYKIMGLNNVTSQSWQPQTYQICLVDPVSGSVKTVNVPFHLALSDKKSERAKDMHLVKKLAALLKTKSPNLDLVETEIKELILDIKYPATKKQALESILASERLPFSCLRNITQTLMDTLKSQELESVDEGLLQFCANKLKLLQLYESVSQLNSLDFHLDTPFSDNDLALLLRLDEKELLKLQALLEKYKQENTRTNVRFSDDKDGVLPVKTFLEYLEYEKDVLNIKKISEEEYVALGSFFFWKCLHGESSTEDMCHTLESAGLSPQLLLSLLLSVWLSKEKDILDKPQSICCLHTMLSLLSKMKVAIDETWDSQSVSPWWQQMRTACIQSENNGAALLSAHVGHSVAAQISNNMTEKKFSQTVLGADSEALTDSWEALSLDTEYWKLLLKQLEDCLILQTLLHSKGNTQTSKVSSLQAEPLPRLSVKKLLEGGKGGIADSVAKWIFKQDFSPEVLKLANEERDAENPDEPKEGVNRSFLEVSEMEMDLGAIPDLLHLAYEQFPCSLELDVLHAHCCWEYVVQWNKDPEEARFFVRSIEHLKQIFNAHVQNGIALMMWNTFLVKRFSAATYLMDKVGKSPKDRLCRRDVGMSDTAMTSFLGSCLDLLQILMEADVSRDEIQVPVLDTEDAWLSVEGPISIVELALEQKHIHYPLVEHHSILCSILYAVMRFSLKTVKPLSLFDSKGKNAFFKDLTSIQLLPSGEMDPNFISVRQQFLLKVVSAAVQAQHSATKVKDPTEEATPTPFGKDQDWPALAVDLAHHLQVSEDVVRRHYVGELYNYGVDHLGEEAILQVHDKEVLASQLLVLTGQRLAHALLHTQTKEGMELLARLPPTLCTWLKAMDPQDLQNTEVPIATTAKLVNKVIELLPEKHGQYGLALHLIEAVEAISLPSL

SEQ ID NO: 876613 - protein, 1393 aa, Homo sapiens; identical to SEQ ID NO: 876609

SEQ ID NO: 876614 - protein, 409 aa, Homo sapiens [sequence omitted]

SEQ ID NO: 876615 - protein, 189 aa, Homo sapiens [sequence omitted]

SEQ ID NO: 876616 - protein, 154 aa, Homo sapiens [sequence omitted]

SEQ ID NO: 876617 - protein, 90 aa, Homo sapiens
AAAYYYYCSNSSFYRCTGICCHAPNPTLGCHLGVLDTERFLSQRFCCCHQRRMTVLEEEEWVQDHHIHQKGTLNRTLNLLYLPKLRIRDV

SEQ ID NO: 876618 - protein, 1053 aa, Homo sapiens
MACSIVQFCYFQDLQAARDFLFPHLREEILSGALRRDPSKSTDWEDDGWGAWEENEPQEPEEEGNTCKTQKTSWLQDCVLSLSPTNDLMVIAREQKAVFLVPKWKYSDKGKEEMQFAVGWSGSLNVEEGECVTSALCIPLASQKRSSTGRPDWTCIVVGFTSGYVRFYTENGVLLLAQLLNEDPVLQLKCRTYEIPRHPGVTEQNEELSILYPAAIVTIDGFSLFQSLRACRNQVAKAAASGNENIQPPPLAYKKWGLQDIDTIIDHASVGIMTLSPFDQMKTASNIGGFNAAIKNSPPAMSQYITVGSNPFTGFFYALEGSTQPLLSHVALAVASKLTSALFNAASGWLGWKSKHEEEAVQKQKPKVEPATPLAVRFGLPDSRRHGESICLSPCNTLAAVTDDFGRVILLDVARGIAIRMWKGYRDAQIGWIQTVEDLHERVPEKADFSPFGNSQGPSRVAQFLVIYAPRRGILEVWSTQQGPRVGAFNVGKHCRLLYPGYKIMGLNNVTSQSWQPQTYQICLVDPVSGSVKTVNVPFHLALSDKKSERAKDMHLVKKLAALLKTKSPNLDLVETEIKELILDIKYPATKKQALESILASERLPFSCLRNITQTLMDTLKSQELESVDEGLLQFCANKLKLLQLYESVSQLNSLDFHLDTPFSDNDLALLLRLDEKELLKLQALLEKYKQENTRTNVRFSDDKDGVLPVKTFLEYLEYEKDVLNIKKISEEEYVALGSFFFWKCLHGESSTEDMCHTLESAGLSPQLLLSLLLSVWLSKEKDILDKPQSICCLHTMLSLLSKMKVAIDETWDSQSVSPWWQQMRTACIQSENNGAALLSAHVGHSVAAQISNNMTEKKFSQTVLGADSEALTDSWEALSLDTEYWKLLLKQLEDCLILQTLLHSKGNTQTSKVSSLQAEPLPRLSVKKLLEGGKGGIADSVAKWIFKQDFSPEVLKLANEERDAENPDEPKEGVNRSFLEVSEMEMDLGAIPDLLHLAYEQFPCSLELDVLHAHCCWEYVVQWNKDPEEARFFVRSIEHLKQIFNAHVQNGK

SEQ ID NO: 876619 - protein, 206 aa, Homo sapiens; identical to SEQ ID NO: 876608

SEQ ID NO: 876620 - protein, 1393 aa, Homo sapiens; identical to SEQ ID NO: 876609

SEQ ID NO: 876621 - protein, 1139 aa, Homo sapiens
MTAITLYIQITFFFLLGIMTLSPFDQMKTASNIGGFNAAIKNSPPAMSQYITVGSNPFTGFFYALEGSTQPLLSHVALAVASKLTSALFNAASGWLGWKSKHEEEAVQKQKPKVEPATPLAVRFGLPDSRRHGESICLSPCNTLAAVTDDFGRVILLDVARGIAIRMWKGYRDAQIGWIQTVEDLHERVPEKADFSPFGNSQGPSRVAQFLVIYAPRRGILEVWSTQQGPRVGAFNVGKHCRLLYPGYKIMGLNNVTSQSWQPQTYQICLVDPVSGSVKTVNVPFHLALSDKKSERAKDMHLVKKLAALLKTKSPNLDLVETEIKELILDIKYPATKKQALESILASERLPFSCLRNITQTLMDTLKSQELESVDEGLLQFCANKLKLLQLYESVSQLNSLDFHLDTPFSDNDLALLLRLDEKELLKLQALLEKYKQENTRTNVRFSDDKDGVLPVKTFLEYLEYEKDVLNIKKISEEEYVALGSFFFWKCLHGESSTEDMCHTLESAGLSPQLLLSLLLSVWLSKEKDILDKPQSICCLHTMLSLLSKMKVAIDETWDSQSVSPWWQQMRTACIQSENNGAALLSAHVGHSVAAQISNNMTEKKFSQTVLGADSEALTDSWEALSLDTEYWKLLLKQLEDCLILQTLLHSKGNTQTSKVSSLQAEPLPRLSVKKLLEGGKGGIADSVAKWIFKQDFSPEVLKLANEERDAENPDEPKEGVNRSFLEVSEMEMDLGAIPDLLHLAYEQFPCSLELDVLHAHCCWEYVVQWNKDPEEARFFVRSIEHLKQIFNAHVQNGIALMMWNTFLVKRFSAATYLMDKVGKSPKDRLCRRDVGMSDTAMTSFLGSCLDLLQILMEADVSRDEIQVPVLDTEDAWLSVEGPISIVELALEQKHIHYPLVEHHSILCSILYAVMRFSLKTVKPLSLFDSKGKNAFFKDLTSIQLLPSGEMDPNFISVRQQFLLKVVSAAVQAQHSATKVKDPTEEATPTPFGKDQDWPALAVDLAHHLQVSEDVVRRHYVGELYNYGVDHLGEEAILQVHDKEVLASQLLVLTGQRLAHALLHTQTKEGMELLARLPPTLCTWLKAMDPQDLQNTEVPIATTAKLVNKVIELLPEKHGQYGLALHLIEAVEAISLPSL

SEQ ID NO: 876622 - protein, 1288 aa, Homo sapiens
MACSIVQFCYFQDLQAARDFLFPHLREEILSGALRRDPSKSTDWEDDGWGAWEENEPQEPEEEGNTCKTQKTSWLQDCVLSLSPTNDLMVIAREQKAVFLVPKWKYSDKGKEEMQFAVGWSGSLNVEEGECVTSALCIPLASQKRSSTGRPDWTCIVVGFTSGYVRFYTENGVLLLAQLLNEDPVLQLKCRTYEIPRHPGVTEQNEELSILYPAAIVTIDGFSLFQSLRACRNQVAKAAASGNENIQPPPLAYKKWGLQDIDTIIDHASVGIMTLSPFDQMKTASNIGGFNAAIKNSPPAMSQYITVGSNPFTGFFYALEGSTQPLLSHVALAVASKLTSALFNAASGWLGWKSKHEEEAVQKQKPKVEPATPLAVRFGLPDSRRHGESICLSPCNTLAAVTDDFGRVILLDVARGIAIRMWKGYRDAQIGWIQTVEDLHERVPEKADFSPFGNSQGPSRVAQFLVIYAPRRGILEVWSTQQGPRVGAFNVGKHCRLLYPGYKIMGLNNVTSQSWQPQTYQICLVDPVSGSVKTVNVPFHLALSDKKSERAKDMHLVKKLAALLKTKSPNLDLVETEIKELILDIKYPATKKQALESILASERLPFSCLRNITQTLMDTLKSQELESVDEGLLQFCANKLKLLQLYESVSQLNSLDFHLDTPFSDNDLALLLRLDEKELLKLQALLEKYKQENTRTNVRFSDDKDGVLPVKTFLEYLEYEKDVLNIKKISEEEYVALGSFFFWKCLHGESSTEDMCHTLESAGLSPQLLLSLLLSVWLSKEKDILDKPQSICCFRLCFTAKGTLQTSKVSSLQAEPLPRLSVKKLLEGGKGGIADSVAKWIFKQDFSPEVLKLANEERDAENPDEPKEGVNRSFLEVSEMEMDLGAIPDLLHLAYEQFPCSLELDVLHAHCCWEYVVQWNKDPEEARFFVRSIEHLKQIFNAHVQNGIALMMWNTFLVKRFSAATYLMDKVGKSPKDRLCRRDVGMSDTAMTSFLGSCLDLLQILMEADVSRDEIQVPVLDTEDAWLSVEGPISIVELALEQKHIHYPLVEHHSILCSILYAVMRFSLKTVKPLSLFDSKGKNAFFKDLTSIQLLPSGEMDPNFISVRQQFLLKVVSAAVQAQHSATKVKDPTEEATPTPFGKDQDWPALAVDLAHHLQVSEDVVRRHYVGELYNYGVDHLGEEAILQVHDKEVLASQLLVLTGQRLAHALLHTQTKEGMELLARLPPTLCTWLKAMDPQDLQNTEVPIATTAKLVNKVIELLPEKHGQYGLALHLIEAVEAISLPSL

SEQ ID NO: 876623 - protein, 1358 aa, Homo sapiens
MACSIVQFCYFQDLQAARDFLFPHLREEILSGALRRDPSKSTDWEDDGWGAWEENEPQEPEEEGNTCKTQKTSWLQDCVLSLSPTNDLMVIAREQKAVFLVPKWKYSDKGKEEMQFAVGWSGSLNVEEGECVTSALCIPLASQKRSSTGRPDWTCIVVGFTSGYVRFYTENGVLLLAQLLNEDPVLQLKCRTYEIPRHPGVTEQNEELSILYPAAIVTIDGFSLFQSLRACRNQVAKAAASGNENIQPPPLAYKKWGLQDIDTIIDHASVGIMTLSPFDQMKTASNIGGFNAAIKNSPPAMSQYITVGSNPFTGFFYALEGSTQPLLSHVALAVASKLTSALFNAASGWLGWKSKHEEEAVQKQKPKVEPATPLAVRFGLPDSRRHGESICLSPCNTLAAVTDDFGRVILLDVARGIAIRMWKGYRDAQIGWIQTVEDLHERVPEKADFSPFGNSQGPSRVAQFLVIYAPRRGILEVWSTQQGPRVGAFNVGKHCRLLYPGYKIMGLNNVTSQSWQPQTYQICLVDPVSGSVKTVNVPFHLALSDKKSERAKDMHLVKKLAALLKTKSPNLDLVETEIKELILDIKYPATKKQALESILASERLPFSCLRNITQTLMDTLKSQELESVDEGLLQFCANKLKLLQLYESVSQLNSLDFHLDTPFSDNDLALLLRLDEKELLKLQALLEKYKQENTRTNVRFSDDKDGVLPVKTFLEYLEYEKDVLNIKKISEEEYVALGSFFFWKCLHGESSTEDMCHTLESAGLSPQLLLSLLLSVWLSKEKDILDKPQSICCLHTMLSLLSKMKVAIDETWDSQSVSPWWQQMRTACIQSENNGAALLSAHVGHSVAAQISNNMTEKKFSQTVLGADSEALTDSWEALSLDTEYWKLLLKQLEDCLILQTLLHSKGNTQTSKVSSLQAEPLPRLSVKKLLEGGKGGIADSVAKWIFKQDFSPEVLKLANEERDAENPDEPKEGVNRSFLEVSEMEMDLGAIPDLLHLAYEQFPCSLELDVLHAHCCWEYVVQWNKDPEEARFFVRSIEHLKQIFNAHVQNGIALMMWNTFLVKRFSAATYLMDKVGKSPKDRLCRRDVGMSDTAMTSFLGSCLDLLQILMEADVSRDEIQVPVLDTEDAWLSVEGPISIVELALEQKHIHYPLVEHHSILCSILYAVMRFSLKTVKPLSLFDSKGKNAFFKDLTSIQLLPSGEMDPNFISVRQQFLLKVVSAAVQAQHSATKVKDPTEEATPTPFGKDQDWPALAVDLAHHLQVSEDVVRRHYVGELYNYGVDHLGEEAILQVHDKEVLASQLLVLTGQRLAHALLHTQTKEGMELLARLPPTLCTWLKAMVSTIERDQAKGHWMFS

SEQ ID NO: 876624 - protein, 337 aa, Homo sapiens
MWNTFLVKRFSAATYLMDKVGKSPKDRLCRRDVGMSDTAMTSFLGSCLDLLQILMEADVSRDEIQVPVLDTEDAWLSVEGPISIVELALEQKHIHYPLVEHHSILCSILYAVMRFSLKTVKPLSLFDSKGKNAFFKDLTSIQLLPSGEMDPNFISVRQQFLLKVVSAAVQAQHSATKVKDPTEEATPTPFGKDQDWPALAVDLAHHLQVSEDVVRRHYVGELYNYGVDHLGEEAILQVHDKEVLASQLLVLTGQRLAHALLHTQTKEGMELLARLPPTLCTWLKAMDPQDLQNTEVPIATTAKLVNKVIELLPEKHGQYGLALHLIEAVEAISLPSL

SEQ ID NO: 876625 - protein, 1111 aa, Homo sapiens
MACSIVQFCYFQDLQAARDFLFPHLREEILSGALRRDPSKSTDWEDDGWGAWEENEPQEPEEEGNTCKTQKTSWLQDCVLSLSPTNDLMVIAREQKAVFLVPKWKYSDKGKEEMQFAVGWSGSLNVEEGECVTSALCIPLASQKRSSTGRPDWTCIVVGFTSGYVRFYTENGVLLLAQLLNEDPVLQLKCRTYEIPRHPGVTEQNEELSILYPAAIVTIDGFSLFQSLRACRNQVAKAAASGNENIQPPPLAYKKWGLQDIDTIIDHASVGIMTLSPFDQMKTASNIGGFNAAIKNSPPAMSQYITVGSNPFTGFFYALEGSTQPLLSHVALAVASKLTSALFNAASGWLGWKSKHEEEAVQKQKPKVEPATPLAVRFGLPDSRRHGESICLSPCNTLAAVTDDFGRVILLDVARGIAIRMWKGYRDAQIGWIQTVEDLHERVPEKADFSPFGNSQGPSRVAQFLVIYAPRRGILEVWSTQQGPRVGAFNVGKHCRLLYPGYKIMGLNNVTSQSWQPQTYQICLVDPVSGSVKTVNVPFHLALSDKKSERAKDMHLVKKLAALLKTKSPNLDLVETEIKELILDIKYPATKKQALESILASERLPFSCLRNITQTLMDTLKSQELESVDEGLLQFCANKLKLLQLYESVSQLNSLDFHLDTPFSDNDLALLLRLDEKELLKLQALLEKYKQENTRTNVRFSDDKDGVLPVKTFLEYLEYEKDVLNIKKISEEEYVALGSFFFWKCLHGESSTEDMCHTLESAGLSPQLLLSLLLSVWLSKEKDILDKPQSICCLHTMLSLLSKMKVAIDETWDSQSVSPWWQQMRTACIQSENNGAALLSAHVGHSVAAQISNNMTEKKFSQTVLGADSEALTDSWEALSLDTEYWKLLLKQLEDCLILQTLLHSKGNTQTSKVSSLQAEPLPRLSVKKLLEGGKGGIADSVAKWIFKQDFSPEVLKLANEERDAENPDEPKEGVNRSFLEVSEMEMDLGAIPDLLHLAYEQFPCSLELDVLHAHCCWEYVVQWNKDPEEARFFVRSIEHLKQIFNAHVQNGIALMMWNTFLVKRFSAATYLMDKVGKSPKDRLCRRLSESPIARIMVVNSTLLCSTLLTV

SEQ ID NO: 876626 - protein, 825 aa, Homo sapiens
MACSIVQFCYFQDLQAARDFLFPHLREEILSGALRRDPSKSTDWEDDGWGAWEENEPQEPEEEGNTCKTQKTSWLQDCVLSLSPTNDLMVIAREQKAVFLVPKWKYSDKGKEEMQFAVGWSGSLNVEEGECVTSALCIPLASQKRSSTGRPDWTCIVVGFTSGYVRFYTENGVLLLAQLLNEDPVLQLKCRTYEIPRHPGVTEQNEELSILYPAAIVTIDGFSLFQSLRACRNQVAKAAASGNENIQPPPLAYKKWGLQDIDTIIDHASVGIMTLSPFDQMKTASNIGGFNAAIKNSPPAMSQYITVGSNPFTGFFYALEGSTQPLLSHVALAVASKLTSALFNAASGWLGWKSKHEEEAVQKQKPKVEPATPLAVRFGLPDSRRHGESICLSPCNTLAAVTDDFGRVILLDVARGIAIRMWKGYRDAQIGWIQTVEDLHERVPEKADFSPFGNSQGPSRVAQFLVIYAPRRGILEVWSTQQGPRVGAFNVGKHCRLLYPGYKIMGLNNVTSQSWQPQTYQICLVDPVSGSVKTVNVPFHLALSDKKSERAKDMHLVKKLAALLKTKSPNLDLVETEIKELILDIKYPATKKQALESILASERLPFSCLRNITQTLMDTLKSQELESVDEGLLQFCANKLKLLQLYESVSQLNSLDFHLDTPFSDNDLALLLRLDEKELLKLQALLEKYKQENTRTNVRFSDDKDGVLPVKTFLEYLEYEKDVLNIKKISEEEYVALGSFFFWKCLHGESSTEDMCHTLESAGLSPQLLLSLLLSVWLSKEKDILDKPQSICCFRLCFTAKGTLRPPKCHHCRLSHFQGFLLKSY

SEQ ID NO: 876627 - protein, 462 aa, Homo sapiens
LYSQARRERREQLPGPGAAFVLGSANVASSVRLRCSFPLSLGGPSGPAAASVALGPAGPGRSLGRTPDTGDWEMDSVSFEDVAVAFTQEEWALLDPSQKNLYRDVMQEIFRNLASVGNKSEDQNIQDDFKNPGRNLSSHVVERLFEIKEGSQYGETFSQDSNLNLNKKVSTGVKPCECSVCGKVFICHSALHRHILSHIGNKLFECEECPEKLYHCKQCGKAFISLTSVDRHMVTHTSNGPYKGPVYEKPFDFPSVFQMPQSTYTGEKTYKCKHCDKAFNYSSYLREHERTHTGEKPYACKKCGKSFTFSSSLRQHERSHTGEKPYECKECGKAFSRSTYLGIHERTHTGEKPYECIKCGKAFRCSRVLRVHERTHSGEKPYECKQCGKAFKYSSNLCEHERTHTGVKPYGCKECGKSFTSSSALRSHERTHTGEKPYECKKCGKAFSCSSSLRKHERAYMW

SEQ ID NO: 876628 - protein, 462 aa, Homo sapiens; identical to SEQ ID NO: 876627

SEQ ID NO: 876629 - protein, 79 aa, Homo sapiens
GRLQGLVELVSATLPQGAHGLEAPRAERVVDGLGQGLHLLGEGVLQLGSRPWVTAPCAGRSAVAGGSPEASCGFSRSSC

SEQ ID NO: 876630 - protein, 410 aa, Homo sapiens
LPVPKGRVSKPSNSASEEESGKPFQCPICGLVIKRKSYWKRHMVIHTGLKSHQCPLCPFRCARKDNLKSHMKVHQHQDRGETFQCQLCPFTSSRHFSLKLHMRCHQHFLRTEAKVKEEIPDPDVKGSPHLSDSACLGQQREGGGTELVGTMMTSNTPERTSQGGAGVSPLLVKEEPKEDNGLPTSFTLNAADRPANHTKLKDPSEYVANSASALFSQDISVKMASDFLMKLSAANQKEPMNLNFKVKEEPKEGESLSTTLPRSSYVFSPESEVSAPGVSEDALKPQEGKGSVLRRDVSVKAASELLMKLSAESYKETQMVKIKEEPMEVDIQDSHVSISPSRNVGYSTLIGREKTEPLQKMPEGRVPPERNLFSQDISVKMASELLFQLSEKVSKEHNHTKENTIRTTTR

SEQ ID NO: 876631 - protein, 410 aa, Homo sapiens
MPRRKQEQPKRLPSPSEEESGKPFQCPICGLVIKRKSYWKRHMVIHTGLKSHQCPLCPFRCARKDNLKSHMKVHQHQDRGETFQCQLCPFTSSRHFSLKLHMRCHQHFLRTEAKVKEEIPDPDVKGSPHLSDSACLGQQREGGGTELVGTMMTSNTPERTSQGGAGVSPLLVKEEPKEDNGLPTSFTLNAADRPANHTKLKDPSEYVANSASALFSQDISVKMASDFLMKLSAANQKEPMNLNFKVKEEPKEGESLSTTLPRSSYVFSPESEVSAPGVSEDALKPQEGKGSVLRRDVSVKAASELLMKLSAESYKETQMVKIKEEPMEVDIQDSHVSISPSRNVGYSTLIGREKTEPLQKMPEGRVPPERNLFSQDISVKMASELLFQLSEKVSKEHNHTKENTIRTTTR

SEQ ID NO: 876632 - protein, 262 aa, Homo sapiens
MPRRKQEQPKRLPSPSEEESGKPFQCPICGLVIKRKSYWKRHMVIHTGLKSHQCPLCPFRCARKDNLKSHMKVHQHQDRGETFQCQLCPFTSSRHFSLKLHMRCHQHFLRTEAKVKEEIPDPDVKGSPHLSDSACLGQQREGGGTELVGTMMTSNTPERTSQGGAGVSPLLVKEEPKEDNGLPTSFTLNAADRPANHTKLKDPSEYVANSASALFSQDISVKMASDFLMKLSGSPQLKKSISFCFKVDNIWQLPSFLIINGR

SEQ ID NO: 876633 - protein, 143 aa, Homo sapiens
CRGRLAQLEEAAAAATMSAGDAVCTGWLVKSPPERKLQRYAWRKRWFVLRRGRMSGNPDVLEYYRNKHSSKPIRVIDLSECAVWKHVGPSFVRKEFQNNFVFIVKTTSRTFYLVAKTEQEMQVWVHSISQVCNLGHLEDGAAQ

SEQ ID NO: 876634 - protein, 151 aa, Homo sapiens
CRGRLAQLEEAAAAATMSAGDAVCTGWLVKSPPERKLQRYAWRKRWFVLRRGRMSGNPDVLEYYRNKHSSKPIRVIDLSECAVWKHVGPSFVRKEFQNNFVFIVKTTSRTFYLVAKTEQEMQVWVHSISQVCNLGHLEDGAGKSGVGAPMC

SEQ ID NO: 876635 - protein, 101 aa, Homo sapiens
QLSGSQTVRAGVRIHHLATVWLQSFWPGSRSLLLPSDAHLLYLPLYPVSSSELKWVPNGREPHCSSLKGVGPIFKYLRSFHCLVLQILTWQTLSPHHLQFP

SEQ ID NO: 876636 - protein, 109 aa, Homo sapiens
MLSVMRIRVESLQTGRSTMGRFTTCRTLGCPLPTLAVHVSFRLPQPVTRPLYPAWSKLWGRKKGLVRANPHRSRLAPTPFLRDQNLKRQSWLGTDVHACGLGTLGGRGG

SEQ ID NO: 876637 - protein, 102 aa, Homo sapiens [sequence omitted]

SEQ ID NO: 876638 - protein, 92 aa, Homo sapiens
SVTVPEAENPRDSLVLPPTQSSSDSSPPEVSGPSSSQMSMKTRRLSSASTGKPPLSVEDDFEKLTWEISGGKLEAEIDLDPGKDEDDLPLEL

SEQ ID NO: 876639 - protein, 132 aa, Homo sapiens [sequence omitted]

SEQ ID NO: 876640 - protein, 96 aa, Homo sapiens
HCAWPICLVLEASSPAGPTAYPVLQSAGFALPVRGARAQQGHCSWESTGRQSLPPPPHQPRSVSAGLAPRTEHWLMPRSRIQTLMLPPTSFVILGK

SEQ ID NO: 876641 - protein, 164 aa, Homo sapiens
RARPGPGREERGGGVGTRSRRTAARANSPEEEVVRGAEGGAELLPFPRDRGPCTLAQMAMRSALARVVDSTSELVSVEQTLLGPLQQERSFPIHLKDSVEFRNICSHLALQIEGQQFDRDLNAAHQCLKTIVKKLIQSLANFPSDAHMVACASLRQILQNLPDI

SEQ ID NO: 876642 - protein, 148 aa, Homo sapiens
  misc_feature (5)..(5): Xaa can be any naturally occurring amino acid
  misc_feature (87)..(87): Xaa can be any naturally occurring amino acid
FTTGXEQDTVMDQKLIPEFIKKIQEAASQGLKFVGVIPQYHSSVNSAGSSAPVSTANSTEDARDAKNARGDHASLENEKPGTGDVCXYQQGFSLAALHPFVQPTHEREKTPLEHIFRAILIKKTDRSQKTDLHNEGYILELDCCSSLD

SEQ ID NO: 876643 - protein, 302 aa, Homo sapiens
MEIFTLFNKPKSHQKCRQYYPVTIPLHVSKNGQTVSGLDANWLEHMSDHFRKGGMLVNAVFYLGIVNDSLHGLTDGVFIFEAVSTEDSKTIQGYDAIVVEQWTVLEGVEVQTDYVPLLNSLAAYGWQLTCVLPTPVVKTTSEGSVSTKQIVFLQRPCLPQKIKKKESKFQWRFSREEMHNRQMRKSKGKLSARDKQQAEENEKNLEDQSSKAGDMGNCVSGQQQEGGVSEEMKGPVQEDKGEQLSPGGLLCGVGVEGEAVQNGPASHSRALVGICTGHSNPGEDARDGDAEEVRELGTVEEN

SEQ ID NO: 876644 - protein, 578 aa, Homo sapiens
MGCGLNKLEKRDEKRPGNIYSTLKRPQVETKIDVSYEYRFLEFTTLSAAELPGSSAVRLASLRDLPAQLLELYQQGFSLAALHPFVQPTHEREKTPLEHIFRAILIKKTDRSQKTDLHNEGYILELDCCSSLDHPTDQKLIPEFIKKIQEAASQGLKFVGVIPQYHSSVNSAGSSAPVSTANSTEDARDAKNARGDHASLENEKPGTGDVCSAPAGRNQSPEPSSGPRGEVPLAKQPSSPSGEGDGGELSPQGVSKTLDGPESNPLEVHEEPLSGKMEIFTLFNKPKSHQKCRQYYPVTIPLHVSKNGQTVSGLDANWLEHMSDHFRKGGMLVNAVFYLGIVNDSLHGLTDGVFIFEAVSTEDSKTIQGYDAIVVEQWTVLEGVEVQTDYVPLLNSLAAYGWQLTCVLPTPVVKTTSEGSVSTKQIVFLQRPCLPQKIKKKESKFQWRFSREEMHNRQMRKSKGKLSARDKQQAEENEKNLEDQSSKAGDMGNCVSGQQQEGGVSEEMKGPVQEDKGEQLSPGGLLCGVGVEGEAVQNGPASHSRALVGICTGHSNPGEDARDGDAEEVRELGTVEEN

SEQ ID NO: 876645 - protein, 578 aa, Homo sapiens; identical to SEQ ID NO: 876644

SEQ ID NO: 876646 - protein, 541 aa, Homo sapiens
MGCGLNKLEKRDEKRPGNIYSTLKRPQVETKIDVSYEYRFLEFTTLSAAELPGSSAVRLASLRDLPAQLLELYQQGFSLAALHPFVQPTHEREKTPLEHIFRAILIKKTDRSQKTDLHNEGYILELDCCSSLDHPTDQKLIPEFIKKIQEAASQGLKFVGVIPQYHSSVNSAGSSAPVSTANSTEDARDAKNARGDHASLENEKPGTGDVCSAPAGRNQSPEPSSGPRGEVPLAKQPSSPSGEGDGGELSPQGVSKTLDGPESNPLEVHEEPLSGKMEIFTLFNKPKSHQKCRQYYPVTIPLHVSKNGQTVSGLDANWLEHMSDHFRKGGMLVNAVFYLGIVNDSLHGLTDGVFIFEAVSTEDSKTIQGYDAIVVEQWTVLEGVEVQTDYVPLLNSLAAYGWQLTCVLPTPVVKTTSEGSVSTKQIVFLQRPCLPQKIKKKESKFQWRFSREEMHNRQMRKSKGKLSARDKQQAEENEKNLEDQSSKAGDMGNCVSGQQQEGGVSEEHSGQIHGHPGLQTKAAVHPTSCGAVSIPCSYLVT

SEQ ID NO: 876647 - protein, 578 aa, Homo sapiens; identical to SEQ ID NO: 876644

SEQ ID NO: 876648 - protein, 563 aa, Homo sapiens
HGRKAVLPLRPPWPLWGSLQLMYCDGAVDLDAAAELPGSSAVRLASLRDLPAQLLELYQQGFSLAALHPFVQPTHEREKTPLEHIFRAILIKKTDRSQKTDLHNEGYILELDCCSSLDHPTDQKLIPEFIKKIQEAASQGLKFVGVIPQYHSSVNSAGSSAPVSTANSTEDARDAKNARGDHASLENEKPGTGDVCSAPAGRNQSPEPSSGPRGEVPLAKQPSSPSGEGDGGELSPQGVSKTLDGPESNPLEVHEEPLSGKMEIFTLFNKPKSHQKCRQYYPVTIPLHVSKNGQTVSGLDANWLEHMSDHFRKGGMLVNAVFYLGIVNDSLHGLTDGVFIFEAVSTEDSKTIQGYDAIVVEQWTVLEGVEVQTDYVPLLNSLAAYGWQLTCVLPTPVVKTTSEGSVSTKQIVFLQRPCLPQKIKKKESKFQWRFSREEMHNRQMRKSKGKLSARDKQQAEENEKNLEDQSSKAGDMGNCVSGQQQEGGVSEEMKGPVQEDKGEQLSPGGLLCGVGVEGEAVQNGPASHSRALVGICTGHSNPGEDARDGDAEEVRELGTVEEN

SEQ ID NO: 876649 - protein, 425 aa, Homo sapiens
MGCGLNKLEKRDEKRPGNIYSTLKRPQVETKIDVSYEYRFLEFTTLSAAELPGSSAVRLASLRDLPAQLLELYQQGFSLAALHPFVQPTHEREKTPLEHIFRAILIKKTDRSQKTDLHNEGYILELDCCSSLDHPTDQKLIPEFIKKIQEAASQGLKFVGVIPQYHSSVNSAGSSAPVSTANSTEDARDAKNARGDHASLENEKPGTGDVCSAPAGRNQSPEPSSGPRGEVPLAKQPSSPSGEGDGGELSPQGVSKTLDGPESNPLEVHEEPLSGKMEIFTLFNKPKSHQKCRQYYPVTIPLHVSKNGQTVSGLDANWLEHMSDHFRKGGMLVNAVFYLGIVNGCRSADRLRAPAELAGGLWLAAHLCATNSRRQDYQRGECIHQADCLSSETVSTSENQEEGIEVSVAILQRRNAQQADEEIKR

SEQ ID NO: 876650 - protein, 578 aa, Homo sapiens; identical to SEQ ID NO: 876644

SEQ ID NO: 876651 - protein, 473 aa, Homo sapiens
MGCGLNKLEKRDEKRPGNIYSTLKRPQVETKIDVSYEYRFLEFTTLSAAELPGSSAVRLASLRDLPAQLLELYQQGFSLAALHPFVQPTHEREKTPLEHIFRAILIKKTDRSQKTDLHNEGYILELDCCSSLDHPTDQKLIPEFIKKIQEAASQGLKFVGVIPQYHSSVNSAGSSAPVSTANSTEDARDAKNARGDHASLENEKPGTGDVCSAPAGRNQSPEPSSGPRGEVPLAKQPSSPSGEGDGGELSPQGVSKTLDGPESNPLEVHEEPLSGKMEIFTLFNKPKSHQKCRQYYPVTIPLHVSKNGQTVSGLDANWLEHMSDHFRKGGMLVNAVFYLGIVNDSLHGLTDGVFIFEAVSTEDSKTIQGYDAIVVEQWTVLEGVEVQTDYVPLLNSLAAYGWQLTCVLPTPVVKTTSEGSVSTKQIVFLQRPCLPQKIKKKESKFQWRFSREEMHNRQMRKSKVTYGNKSSMS

SEQ ID NO: 876652 - protein, 107 aa, Homo sapiens
MLRSVVNQTLYSSCPHSSGGDKQVKLLINRAVEDISPLAEWKGTSEVPGHREQRLFPSPSDLQLWRGVFRGVVVYLEWDEKLCCPKCFLFQGKISMAGYEEWGLQTS

SEQ ID NO: 876653 - protein, 246 aa, Homo sapiens
RVWAGRSWGRVQRPEGLRLPGWPRSQRRVPRCRPGIWGLWCLSVSLSARTQLLQPQARPGQGVGASGAGLERSSARWCGQRRGTAALAAASPQVIILLQVSSGLRWLRVCAMVDILGERHLVTCKGATVEAEAALQNKVVALYFAAARCAPSRDFTPLLCDFYTALVAEARRPAPFEVVFVSADGSSQEMLDFMRELHGAWLALPFHDPYRQRSLALLPRLECSGVILAHCNLCLLGSSDSLALAS

SEQ ID NO: 876654 - protein, 250 aa, Homo sapiens
RVWAGRSWGRVQRPEGLRLPGWPRSQRRVPRCRPGIWGLWCLSVSLSARTQLLQPQARPGQGVGASGAGLERSSARWCGQRRGTAALAAASPQVIILLQVSSGLRWLRVCAMVDILGERHLVTCKGATVEAEAALQNKVVALYFAAARCAPSRDFTPLLCDFYTALVAEARRPAPFEVVFVSADGSSQEMLDFMRELHGAWLALPFHDPYRHHCCELREGKILKRSWTLRECSCSPPAPSVSCILRVCAH

SEQ ID NO: 876655 - protein, 256 aa, Homo sapiens
RVWAGRSWGRVQRPEGLRLPGWPRSQRRVPRCRPGIWGLWCLSVSLSARTQLLQPQARPGQGVGASGAGLERSSARWCGQRRGTAALAAASPQVIILLQVSSGLRWLRVCAMVDILGERHLVTCKGATVEAEAALQNKVVALYFAAARCAPSRDFTPLLCDFYTALVAEARRPAPFEVVFVSADGSSQEMLDFMRELHGAWLALPFHDPYRHSRSQLIHAATFSPCLHFLFQAIWWKQSNCLQNHPKASLGRSWWN

SEQ ID NO: 876656 - protein, 95 aa, Homo sapiens
DSKRKRLDLLLDCTIQYGCTSTFQVDSGYCIVQIWNISIITETVIGQCCLRDVGCRTSTRRPGYQTPAFKFLPSAVECGRPLEVQYLNMLVTTVY

SEQ ID NO: 876657 - protein, 172 aa, Homo sapiens
MSGALDVLQMKEEDVLKFLAAGTHLGGTNLDFQMEQYIYKRKSDGIYIINLKRTWEKLLLAARAIVAIENPADVSVISSRNTGQRAVLKFAAATGATPIAGRFTPGTFTNQIQAAFREPRLLVVTDPRLTTSLSRRHLMLTYLPLRCVTQILLCAMWTLPSHATTRELTQWV

SEQ ID NO: 876658 - protein, 73 aa, Homo sapiens
MVDFRGLHSPLLLFATAMKNNWRDYSKTKRKWTFLQVKIEIHILRWHQVLRGILDPGRVLLVQHLFGEPYLQT

SEQ ID NO: 876659 - protein, 104 aa, Homo sapiens [sequence omitted]

SEQ ID NO: 876660 - protein, 112 aa, Homo sapiens
MTSPFTPKTQGQSLLQSPGKGGVRWWGAKGQEMEHRPSPPHLCPLRPWATSNLLQIFPSRGPHPSPPPDHPSRSHHVSQTPGSFRFTPSPCSQHPHQDPTTPTPALSGSLLS

SEQ ID NO: 876661 - protein, 161 aa, Homo sapiens
MAKEEPQSISRDLQELQKKLSLLIDSFQNNSKVVAFMKSPVGQYLDSHPFLAFTLLVFIVMSAVPVGFFLLIVVLTTLAALLGVIILEGLVISVGGFSLLCILCGLGFVSLAMSGMMIASYVVVSSLISCWFSPRPLTQQNTSCDFLPAMKSADFEGLYQE

SEQ ID NO: 876662 - protein, 161 aa, Homo sapiens; identical to SEQ ID NO: 876661

SEQ ID NO: 876663 - protein, 185 aa, Homo sapiens
MAKEEPQSISRDLQELQKKLSLLIDSFQNNSKLPQHSRISLDSDDGVSRLGSAGSKVVAFMKSPVGQYLDSHPFLAFTLLVFIVMSAVPVGFFLLIVVLTTLAALLGVIILEGLVISVGGFSLLCILCGLGFVSLAMSGMMIASYVVVSSLISCWFSPRPLTQQNTSCDFLPAMKSADFEGLYQE

SEQ ID NO: 876664 - protein, 157 aa, Homo sapiens
CLEGGLSFLTPSQSCGKGHSLSLSFLSCQPLRACSSGSESQWEQARFAKPWAPGLGAPLPDPSGHGRGEPRGEEPRGGARARGRRQAALAPSRDALSFFLLFLLLPLFASPANAVGAARRSGAGYPPSACPPSRYEDGRSSRRTRWMKTTNGFCFLW

SEQ ID NO: 876665 - protein, 89 aa, Homo sapiens
PRWRSILTGVLLPPFPGEPICSPHCGSLDCKDQVTQGASNKDACGFELERSQDLRQRKGPAHILCGDSHGSSASLSLSAAPTQQDLTGL

SEQ ID NO: 876666 - protein, 161 aa, Homo sapiens; identical to SEQ ID NO: 876661

SEQ ID NO: 876667 - protein, 161 aa, Homo sapiens; identical to SEQ ID NO: 876661

SEQ ID NO: 876668 - protein, 185 aa, Homo sapiens; identical to SEQ ID NO: 876663

SEQ ID NO: 876669 - protein, 163 aa, Homo sapiens
MAKEEPQSISRDLQELQKKLSLLIDSFQNNSKLPQHSRISLDSDDGVSRLGSAGSKVVAFMKSPVGQYLDSHPFLAFTLLVFIVMSAVPVGFFLLIVVLTTLAALLGVIILEGLVISVGGFSLLCILCGLGFVSLAMSGMMIASYVVVSSLISCWFSPRSHEI

SEQ ID NO: 876670 - protein, 232 aa, Homo sapiens
MGSVLSTDSGKSAPASATARALERRRDPELPVTSFDCAVCLEVLHQPVRTRCGHVFCRSCIATSLKNNKWTCPYCRAYLPSEGVPATDVAKRMKSEYKNCAECDTLVCLSEMRAHIRTCQKYIDKYGPLQELEETAARCVCPFCQRELYEDSLLDHCITHHRSERRPVFCPLCRLIPDENPSSFSGSLIRHLQVSHTLFYDDFIDFNIIEEALIRRVLDRSLLEYVNHSNTT

SEQ ID NO: 876671 - protein, 121 aa, Homo sapiens [sequence omitted]

SEQ ID NO: 876672 - protein, 121 aa, Homo sapiens [sequence omitted]

SEQ ID NO: 876673 - protein, 117 aa, Homo sapiens
MGSVLSTDSGKSAPASATARALERRRDPELPVTSFDCAVCLEVLHQPVRTRCGHVFCRSCIATSLKNNKWTCPYCRAYLPSEGVPATDVAKRMKSEYKNCAECDTLVCMSLLSEGTV

SEQ ID NO: 876674 - protein, 3957 aa, Homo sapiens
MMNEDAAQKSDSGEKFNGSSQRRKRPKKSDSNASFLRAARAGNLDKVVEYLKGGIDINTCNQNGLNALHLAAKEGHVGLVQELLGRGSSVDSATKKGNTALHIASLAGQAEVVKVLVKEGANINAQSQNGFTPLYMAAQENHIDVVKYLLENGANQSTATEDGFTPLAVALQQGHNQAVAILLENDTKGKVRLPALHIAARKDDTKSAALLLQNDHNADVQSKMMVNRTTESGFTPLHIAAHYGNVNVATLLLNRGAAVDFTARNGITPLHVASKRGNTNMVKLLLDRGGQIDAKTRDGLTPLHCAARSGHDQVVELLLERGAPLLARTKNGLSPLHMAAQGDHVECVKHLLQHKAPVDDVTLDYLTALHVAAHCGHYRVTKLLLDKRANPNARALNGFTPLHIACKKNRIKVMELLVKYGASIQAITESGLTPIHVAAFMGHLNIVLLLLQNGASPDVTNIRGETALHMAARAGQVEVVRCLLRNGALVDARAREEQTPLHIASRLGKTEIVQLLLQHMAHPDAATTNGYTPLHISAREGQVDVASVLLEAGAAHSLATKKGFTPLHVAAKYGSLDVAKLLLQRRAAADSAGKNGLTPLHVAAHYDNQKVALLLLEKGASPHATAKNGYTPLHIAAKKNQMQIASTLLNYGAETNIVTKQGVTPLHLASQEGHTDMVTLLLDKGANIHMSTKSGLTSLHLAAQEDKVNVADILTKHGADQDAHTKLGYTPLIVACHYGNVKMVNFLLKQGANVNAKTKNGYTPLHQAAQQGHTHIINVLLQHGAKPNATTANGNTALAIAKRLGYISVVDTLKVVTEEVTTTTTTITEKHKLNVPETMTEVLDVSDEEGDDTMTGDGGEYLRPEDLKELGDDSLPSSQFLDGMNYLRYSLEGGRSDSLRSFSSDRSHTLSHASYLRDSAVMDDSVVIPSHQVSTLAKEAERNSYRLSWGTENLDNVALSSSPIHSGFLVSFMVDARGGAMRGCRHNGLRIIIPPRKCTAPTRVTCRLVKRHRLATMPPMVEGEGLASRLIEVGPSGAQFLGKLHLPTAPPPLNEGESLVSRILQLGPPGTKFLGPVIVEIPHFAALRGKERELVVLRSENGDSWKEHFCDYTEDELNEILNGMDEVLDSPEDLEKKRICRIITRDFPQYFAVVSRIKQDSNLIGPEGGVLSSTVVPQVQAVFPEGALTKRIRVGLQAQPMHSELVKKILGNKATFSPIVTLEPRRRKFHKPITMTIPVPKASSDVMLNGFGGDAPTLRLLCSITGGTTPAQWEDITGTTPLTFVNECVSFTTNVSARFWLIDCRQIQESVTFASQVYREIICVPYMAKFVVFAKSHDPIEARLRCFCMTDDKVDKTLEQQENFAEVARSRDVEVLEGKPIYVDCFGNLVPLTKSGQHHIFSFFAFKENRLPLFVKVRDTTQEPCGRLSFMKEPKSTRGLVHQAICNLNITLPIYTKESESDQEQEEEIDMTSEKNDETESTETSVLKSHLVNEVPVLASPDLLSEVSEMKQDLIKMTAILTTDVSDKAGSIKVKELVKAAEEEPGEPFEIVERVKEDLEKVNEILRSGTCTRDESSVQSSRSERGLVEEEWVIVSDEEIEEARQKAPLEITEYPCVEVRIDKEIKGKVEKDSTGLVNYLTDDLNTCVPLPKEQLQTVQDKAGKKCEALAVGRSSEKEGKDIPPDETQSTQKQHKPSLGIKKPVRRKLKEKQKQKEEGLQASAEKAELKKGSSEESLGEDPGLAPEPLPTVKATSPLIEETPIGSIKDKVKALQKRVEDEQKGRSKLPIRVKGKEDVPKKTTHRPHPAASPSLKSERHAPGSPSPKTERHSTLSSSAKTERHPPVSPSSKTEKHSPVSPSAKTERHSPASSSSKTEKHSPVSPSTKTERHSPVSSTKTERHPPVSPSGKTDKRPPVSPSGRTEKHPPVSPGRTEKRLPVSPSGRTDKHQPVSTAGKTEKHLPVSPSGKTEKQPPVSPTSKTERIEETMSVRELMKAFQSGQDPSKHKTGLFEHKSAKQKQPQEKGKVRVEKEKGPILTQREAQKTENQTIKRGQRLPVTGTAESKRGVRVSSIGVKKEDAAGGKEKVLSHKIPEPVQSVPEEESHRESEVPKEKMADEQGDMDLQISPDRKTSTDFSEVIKQELEDNDKYQQFRLSEETEKAQLHLDQVLTSPFNTTFPLDYMKDEFLPALSLQSGALDGSSESLKNEGVAGSPCGSLMEGTPQISSEESYKHEGLAETPETSPESLSFSPKKSEEQTGETKESTKTETTTEIRSEKEHPTTKDITGGSEERGATVTEDSETSTESFQKEATLGSPKDTSPKRQDDCTGSCSVALAKETPTGLTEEAACDEGQRTFGSSAHKTQTDSEAQESTATSDETKALPLPEASVKTDTGTESKPQGVIRSPQGLELALPSRDSEVLSAVADDSLAVSHKDSLEASPVLEDNSSHKTPDSLEPSPLKESPCRDSLESSPVEPKMKAGIFPSHFPLPAAVAKTELLTEVASVRSRLLRDPDGSAEDDSLEQTSLMESSGKSPLSPDTPSSEEVSYEVTPKTTDVSTPKPAVIHECAEEDDSENGEKKRFTPEEEMFKMVTKIKMFDELEQEAKQKRDYKKEPKQEESSSSSDPDADCSVDVDEPKHTGSGEDESGVPVLVTSESRKVSSSSESEPELAQLKKGADSGLLPEPVIRVQPPSPLPSSMDSNSSPEEVQFQPVVSKQYTFKMNEDTQEEPGKSEEEKDSESHLAEDRHAVSTEAEDRSYDKLNRDTDQPKICDGHGCEAMSPSSSARPVSSGLQSPTGDDVDEQPVIYKESLALQGTHEKDTEGEELDVSRAESPQADCPSESFSSSSSLPHCLVSEGKELDEDISATSSIQKTEVTKTDETFENLPKDCPSQDSSITTQTDRFSMDVPVSDLAENDEIYDPQITSPYENVPSQSFFSSEESKTQTDANHTTSFHSSEVYSVTITSPVEDVVVASSSSGTVLSKESNFEGQDIKMESQLESTLWEMQSDSVSSSFEPTMSATTTVVGEQISKVIITKTDVDSDSWSEIREDDEAFEARVKEEEQKIFGLMVDRQSQGTTPDTTPARTPTEEGTPTSEQNPFLFQEGKLFEMTRSGAIDMTKRSYADESFHFFQIGQESREETLSEDVKEGATGADPLPLETSAESLALSESKETVDDEADLLPDDVSEEVEEIPASDAQLNSQMGISASTETPTKEAVSVGTKDLPTVQTGDIPPLSGVKQISCPDSSEPAVQVQLDFSTLTRSVYSDRGDDSPDSSPEEQKSVIEIPTAPMENVPFTESKSKIPVRTMPTSTPAPPSAEYESSVSEDFLSSVDEENKADEAKPKSKLPVKVPLQRVEQQLSDLDTSVQKTVAPQGQDMASIAPDNRSKSESDASSLDSKTKCPVKTRSYTETETESRERAEELELESEEGATRPKILTSRLPVKSRSTTSSCRGGTSPTKESKEHFFDLYRNSIEFFEEISDEASKLVDRLTQSEREQEIVSDDESSSALEVSVIENLPPVETEHSVPEDIFDTRPIWDESIETLIERIPDENGHDHAEDPQDEQERIEERLAYIADHLGFSWTELARELDFTEEQIHQIRIENPNSLQDQSHALLKYWLERDGKHATDTNLVECLTKINRMDIVHLMETNTEPLQERISHSYAEIEQTITLDHSEGFSVLQEELCTAQHKQKEEQAVSKESETCDHPPIVSEEDISVGYSTFQDGVPKTEGDSSATALFPQTHKEQVQQDFSGKMQDLPEESSLEYQQEYFVTTPGTETSETQKAMIVPSSPSKTPEEVSTPAEEEKLYLQTPTSSERGGSPIIQEPEEPSEHREESSPRKTSLVIVESADNQPETCERLDEDAAFEKGDDMPEIPPETVTEEEYIDEHGHTVVKKVTRKIIRRYVSSEGTEKEEIMVQGMPQEPVNIEEGDGYSKVIKRVVLKSDTEQSEDNNE

SEQ ID NO: 876675 - protein, 3957 aa, Homo sapiens; identical to SEQ ID NO: 876674

SEQ ID NO: 876676 - protein, 3924 aa, Homo sapiens
MMNEDAAQKSDSGEKFNGSSQRRKRPKKSDSNASFLRAARAGNLDKVVEYLKGGIDINTCNQNGLNALHLAAKEGHVGLVQELLGRGSSVDSATKKGNTALHIASLAGQAEVVKVLVKEGANINAQSQNGFTPLYMAAQENHIDVVKYLLENGANQSTATEDGFTPLAVALQQGHNQAVAILLENDTKGKVRLPALHIAARKDDTKSAALLLQNDHNADVQSKMMVNRTTESGFTPLHIAAHYGNVNVATLLLNRGAAVDFTARNGITPLHVASKRGNTNMVKLLLDRGGQIDAKTRDGLTPLHCAARSGHDQVVELLLERGAPLLARTKNGLSPLHMAAQGDHVECVKHLLQHKAPVDDVTLDYLTALHVAAHCGHYRVTKLLLDKRANPNARALNGFTPLHIACKKNRIKVMELLVKYGASIQAITESGLTPIHVAAFMGHLNIVLLLLQNGASPDVTNIRGETALHMAARAGQVEVVRCLLRNGALVDARAREEQTPLHIASRLGKTEIVQLLLQHMAHPDAATTNGYTPLHISAREGQVDVASVLLEAGAAHSLATKKGFTPLHVAAKYGSLDVAKLLLQRRAAADSAGKNGLTPLHVAAHYDNQKVALLLLEKGASPHATAKNGYTPLHIAAKKNQMQIASTLLNYGAETNIVTKQGVTPLHLASQEGHTDMVTLLLDKGANIHMSTKSGLTSLHLAAQEDKVNVADILTKHGADQDAHTKLGYTPLIVACHYGNVKMVNFLLKQGANVNAKTKNGYTPLHQAAQQGHTHIINVLLQHGAKPNATTANGNTALAIAKRLGYISVVDTLKVVTEEVTTTTTTITEKHKLNVPETMTEVLDVSDEEGDDTMTGDGGEYLRPEDLKELGDDSLPSSQFLDGMNYLRYSLEGGRSDSLRSFSSDRSHTLSHASYLRDSAVMDDSVVIPSHQVSTLAKEAERNSYRLSWGTENLDNVALSSSPIHSGFLVSFMVDARGGAMRGCRHNGLRIIIPPRKCTAPTRVTCRLVKRHRLATMPPMVEGEGLASRLIEVGPSGAQFLGPVIVEIPHFAALRGKERELVVLRSENGDSWKEHFCDYTEDELNEILNGMDEVLDSPEDLEKKRICRIITRDFPQYFAVVSRIKQDSNLIGPEGGVLSSTVVPQVQAVFPEGALTKRIRVGLQAQPMHSELVKKILGNKATFSPIVTLEPRRRKFHKPITMTIPVPKASSDVMLNGFGGDAPTLRLLCSITGGTTPAQWEDITGTTPLTFVNECVSFTTNVSARFWLIDCRQIQESVTFASQVYREIICVPYMAKFVVFAKSHDPIEARLRCFCMTDDKVDKTLEQQENFAEVARSRDVEVLEGKPIYVDCFGNLVPLTKSGQHHIFSFFAFKENRLPLFVKVRDTTQEPCGRLSFMKEPKSTRGLVHQAICNLNITLPIYTKESESDQEQEEEIDMTSEKNDETESTETSVLKSHLVNEVPVLASPDLLSEVSEMKQDLIKMTAILTTDVSDKAGSIKVKELVKAAEEEPGEPFEIVERVKEDLEKVNEILRSGTCTRDESSVQSSRSERGLVEEEWVIVSDEEIEEARQKAPLEITEYPCVEVRIDKEIKGKVEKDSTGLVNYLTDDLNTCVPLPKEQLQTVQDKAGKKCEALAVGRSSEKEGKDIPPDETQSTQKQHKPSLGIKKPVRRKLKEKQKQKEEGLQASAEKAELKKGSSEESLGEDPGLAPEPLPTVKATSPLIEETPIGSIKDKVKALQKRVEDEQKGRSKLPIRVKGKEDVPKKTTHRPHPAASPSLKSERHAPGSPSPKTERHSTLSSSAKTERHPPVSPSSKTEKHSPVSPSAKTERHSPASSSSKTEKHSPVSPSTKTERHSPVSSTKTERHPPVSPSGKTDKRPPVSPSGRTEKHPPVSPGRTEKRLPVSPSGRTDKHQPVSTAGKTEKHLPVSPSGKTEKQPPVSPTSKTERIEETMSVRELMKAFQSGQDPSKHKTGLFEHKSAKQKQPQEKGKVRVEKEKGPILTQREAQKTENQTIKRGQRLPVTGTAESKRGVRVSSIGVKKEDAAGGKEKVLSHKIPEPVQSVPEEESHRESEVPKEKMADEQGDMDLQISPDRKTSTDFSEVIKQELEDNDKYQQFRLSEETEKAQLHLDQVLTSPFNTTFPLDYMKDEFLPALSLQSGALDGSSESLKNEGVAGSPCGSLMEGTPQISSEESYKHEGLAETPETSPESLSFSPKKSEEQTGETKESTKTETTTEIRSEKEHPTTKDITGGSEERGATVTEDSETSTESFQKEATLGSPKDTSPKRQDDCTGSCSVALAKETPTGLTEEAACDEGQRTFGSSAHKTQTDSEAQESTATSDETKALPLPEASVKTDTGTESKPQGVIRSPQGLELALPSRDSEVLSAVADDSLAVSHKDSLEASPVLEDNSSHKTPDSLEPSPLKESPCRDSLESSPVEPKMKAGIFPSHFPLPAAVAKTELLTEVASVRSRLLRDPDGSAEDDSLEQTSLMESSGKSPLSPDTPSSEEVSYEVTPKTTDVSTPKPAVIHECAEEDDSENGEKKRFTPEEEMFKMVTKIKMFDELEQEAKQKRDYKKEPKQEESSSSSDPDADCSVDVDEPKHTGSGEDESGVPVLVTSESRKVSSSSESEPELAQLKKGADSGLLPEPVIRVQPPSPLPSSMDSNSSPEEVQFQPVVSKQYTFKMNEDTQEEPGKSEEEKDSESHLAEDRHAVSTEAEDRSYDKLNRDTDQPKICDGHGCEAMSPSSSARPVSSGLQSPTGDDVDEQPVIYKESLALQGTHEKDTEGEELDVSRAESPQADCPSESFSSSSSLPHCLVSEGKELDEDISATSSIQKTEVTKTDETFENLPKDCPSQDSSITTQTDRFSMDVPVSDLAENDEIYDPQITSPYENVPSQSFFSSEESKTQTDANHTTSFHSSEVYSVTITSPVEDVVVASSSSGTVLSKESNFEGQDIKMESQLESTLWEMQSDSVSSSFEPTMSATTTVVGEQISKVIITKTDVDSDSWSEIREDDEAFEARVKEEEQKIFGLMVDRQSQGTTPDTTPARTPTEEGTPTSEQNPFLFQEGKLFEMTRSGAIDMTKRSYADESFHFFQIGQESREETLSEDVKEGATGADPLPLETSAESLALSESKETVDDEADLLPDDVSEEVEEIPASDAQLNSQMGISASTETPTKEAVSVGTKDLPTVQTGDIPPLSGVKQISCPDSSEPAVQVQLDFSTLTRSVYSDRGDDSPDSSPEEQKSVIEIPTAPMENVPFTESKSKIPVRTMPTSTPAPPSAEYESSVSEDFLSSVDEENKADEAKPKSKLPVKVPLQRVEQQLSDLDTSVQKTVAPQGQDMASIAPDNRSKSESDASSLDSKTKCPVKTRSYTETETESRERAEELELESEEGATRPKILTSRLPVKSRSTTSSCRGGTSPTKESKEHFFDLYRNSIEFFEEISDEASKLVDRLTQSEREQEIVSDDESSSALEVSVIENLPPVETEHSVPEDIFDTRPIWDESIETLIERIPDENGHDHAEDPQDEQERIEERLAYIADHLGFSWTELARELDFTEEQIHQIRIENPNSLQDQSHALLKYWLERDGKHATDTNLVECLTKINRMDIVHLMETNTEPLQERISHSYAEIEQTITLDHSEGFSVLQEELCTAQHKQKEEQAVSKESETCDHPPIVSEEDISVGYSTFQDGVPKTEGDSSATALFPQTHKEQVQQDFSGKMQDLPEESSLEYQQEYFVTTPGTETSETQKAMIVPSSPSKTPEEVSTPAEEEKLYLQTPTSSERGGSPIIQEPEEPSEHREESSPRKTSLVIVESADNQPETCERLDEDAAFEKGDDMPEIPPETVTEEEYIDEHGHTVVKKVTRKIIRRYVSSEGTEKEEIMVQGMPQEPVNIEEGDGYSKVIKRVVLKSDTEQSEDNNE

SEQ ID NO: 876677 - protein, 3955 aa, Homo sapiens
MMNEDAAQKSDSGEKFNGSSQRRKRPKKSDSNASFLRAARAGNLDKVVEYLKGGIDINTCNQNGLNALHLAAKEGHVGLVQELLGRGSSVDSATKKGNTALHIASLAGQAEVVKVLVKEGANINAQSQNGFTPLYMAAQENHIDVVKYLLENGANQSTATEDGFTPLAVALQQGHNQAVAILLENDTKGKVRLPALHIAARKDDTKSAALLLQNDHNADVQSKMMVNRTTESGFTPLHIAAHYGNVNVATLLLNRGAAVDFTARNGITPLHVASKRGNTNMVKLLLDRGGQIDAKTRDGLTPLHCAARSGHDQVVELLLERGAPLLARTKNGLSPLHMAAQGDHVECVKHLLQHKAPVDDVTLDYLTALHVAAHCGHYRVTKLLLDKRANPNARALNGFTPLHIACKKNRIKVMELLVKYGASIQAITESGLTPIHVAAFMGHLNIVLLLLQNGASPDVTNIRGETALHMAARAGQVEVVRCLLRNGALVDARAREEQTPLHIASRLGKTEIVQLLLQHMAHPDAATTNGYTPLHISAREGQVDVASVLLEAGAAHSLATKKGFTPLHVAAKYGSLDVAKLLLQRRAAADSAGKNGLTPLHVAAHYDNQKVALLLLEKGASPHATAKNGYTPLHIAAKKNQMQIASTLLNYGAETNIVTKQGVTPLHLASQEGHTDMVTLLLDKGANIHMSTKSGLTSLHLAAQEDKVNVADILTKHGADQDAHTKLGYTPLIVACHYGNVKMVNFLLKQGANVNAKTKNGYTPLHQAAQQGHTHIINVLLQHGAKPNATTANGNTALAIAKRLGYISVVDTLKVVTEEVTTTTTTITEKHKLNVPETMTEVLDVSDEEGDDTMTGDGGEYLRPEDLKELGDDSLPSSQFLDGMNYLRYSLEGGRSDSLRSFSSDRSHTLSHASYLRDSAVMDDSVVIPSHQVSTLAKEAERNSYRLSWGTENLDNVALSSSPIHSGFLVSFMVDARGGAMRGCRHNGLRIIIPPRKCTAPTRVTCRLVKRHRLATMPPMVEGEGLASRLIEVGPSGAQFLGPVIVEIPHFAALRGKERELVVLRSENGDSWKEHFCDYTEDELNEILNGMDEVLDSPEDLEKKRICRIITRDFPQYFAVVSRIKQDSNLIGPEGGVLSSTVVPQVQAVFPEGALTKRIRVGLQAQPMHSELVKKILGNKATFSPIVTLEPRRRKFHKPITMTIPVPKASSDVMLNGFGGDAPTLRLLCSITGGTTPAQWEDITGTTPLTFVNECVSFTTNVSARFWLIDCRQIQESVTFASQVYREIICVPYMAKFVVFAKSHDPIEARLRCFCMTDDKVDKTLEQQENFAEVARSRDVEVLEGKPIYVDCFGNLVPLTKSGQHHIFSFFAFKENRLPLFVKVRDTTQEPCGRLSFMKEPKSTRGLVHQAICNLNITLPIYTKESESDQEQEEEIDMTSEKNDETESTETSVLKSHLVNEVPVLASPDLLSEVSEMKQDLIKMTAILTTDVSDKAGSIKVKELVKAAEEEPGEPFEIVERVKEDLEKVNEILRSGTCTRDESSVQSSRSERGLVEEEWVIVSDEEIEEARQKAPLEITEYPCVEVRIDKEIKGKVEKDSTGLVNYLTDDLNTCVPLPKEQLQTVQDKAGKKCEALAVGRSSEKEGKDIPPDETQSTQKQHKPSLGIKKPVRRKLKEKQKQKEEGLQASAEKAELKKGSSEESLGEDPGLAPEPLPTVKATSPLIEETPIGSIKDKVKALQKRVEDEQKGRSKLPIRVKGKEDVPKKTTHRPHPAASPSLKSERHAPGSPSPKTERHSTLSSSAKTERHPPVSPSSKTEKHSPVSPSAKTERHSPASSSSKTEKHSPVSPSTKTERHSPVSSTKTERHPPVSPSGKTDKRPPVSPSGRTEKHPPVSPGRTEKRLPVSPSGRTDKHQPVSTAGKTEKHLPVSPSGKTEKQPPVSPTSKTERIEETMSVRELMKAFQSGQDPSKHKTGLFEHKSAKQKQPQEKGKVRVEKEKGPILTQREAQKTENQTIKRGQRLPVTGTAESKRGVRVSSIGVKKEDAAGGKEKVLSHKIPEPVQSVPEEESHRESEVPKEKMADEQGDMDLQISPDRKTSTDFSEVIKQELEDNDKYQQFRLSEETEKAQLHLDQVLTSPFNTTFPLDYMKDEFLPALSLQSGALDGSSESLKNEGVAGSPCGSLMEGTPQISSEESYKHEGLAETPETSPESLSFSPKKSEEQTGETKESTKTETTTEIRSEKEHPTTKDITGGSEERGATVTEDSETSTESFQKEATLGSPKDTSPKRQDDCTGSCSVALAKETPTGLTEEAACDEGQRTFGSSAHKTQTDSEAQESTATSDETKALPLPEASVKTDTGTESKPQGVIRSPQGLELALPSRDSEVLSAVADDSLAVSHKDSLEASPVLEDNSSHKTPDSLEPSPLKESPCRDSLESSPVEPKMKAGIFPSHFPLPAAVAKTELLTEVASVRSRLLRDPDGSAEDDSLEQTSLMESSGKSPLSPDTPSSEEVSYEVTPKTTDVSTPKPAVIHECAEEDDSENGEKKRFTPEEEMFKMVTKIKMFDELEQEAKQKRDYKKEPKQEESSSSSDPDADCSVDVDEPKHTGSGEDESGVPVLVTSESRKVSSSSESEPELAQLKKGADSGLLPEPVIRVQPPSPLPSSMDSNSSPEEVQFQPVVSKQYTFKMNEDTQEEPGKSEEEKDSESHLAEDRHAVSTEAEDRSYDKLNRDTDQPKICDGHGCEAMSPSSSARPVSSGLQSPTGDDVDEQPVIYKESLALQGTHEKDTEGEELDVSRAESPQADCPSESFSSSSSLPHCLVSEGKELDEDISATSSIQKTEVTKTDETFENLPKDCPSQDSSITTQTDRFSMDVPVSDLAENDEIYDPQITSPYENVPSQSFFSSEESKTQTDANHTTSFHSSEVYSVTITSPVEDVVVASSSSGTVLSKESNFEGQDIKMESQLESTLWEMQSDSVSSSFEPTMSATTTVVGEQISKVIITKTDVDSDSWSEIREDDEAFEARVKEEEQKIFGLMVDRQSQGTTPDTTPARTPTEEGTPTSEQNPFLFQEGKLFEMTRSGAIDMTKRSYADESFHFFQIGQESREETLSEDVKEGATGADPLPLETSAESLALSESKETVDDEADLLPDDVSEEVEEIPASDAQLNSQMGISASTETPTKEAVSVGTKDLPTVQTGDIPPLSGVKQISCPDSSEPAVQVQLDFSTLTRSVYSDRGDDSPDSSPEEQKSVIEIPTAPMENVPFTESKSKIPVRTMPTSTPAPPSAEYESSVSEDFLSSVDEENKADEAKPKSKLPVKVPLQRVEQQLSDLDTSVQKTVAPQGQDMASIAPDNRSKSESDASSLDSKTKCPVKTRSYTETETESRERAEELELESEEGATRPKILTSRLPVKSRSTTSSCRGGTSPTKESKEHFFDLYRNSIEFFEEISDEASKLVDRLTQSEREQEIVSDDESSSALEVSVIENLPPVETEHSVPEDIFDTRPIWDESIETLIERIPDENGHDHAEDPQDEQERIEERLAYIADHLGFSWTELARELDFTEEQIHQIRIENPNSLQDQSHALLKYWLERDGKHATDTNLVECLTKINRMDIVHLMETNTEPLQERISHSYAEIEQTITLDHSEGFSVLQEELCTAQHKQKEEQAVSKESETCDHPPIVSEEDISVGYSTFQDGVPKTEGDSSATALFPQTHKEQVQQDFSGKMQDLPEESSLEYQQEYFVTTPGTETSETQKAMIVPSSPSKTPEEVSTPAEEEKLYLQTPTSSERGGSPIIQEPEEPSEHREESSPRKTSLVIVESADNQPETCERLDEDAAFEKELTEELGELEASSDEEAMVTTRVVRRRVIIQGDDMPEIPPETVTEEEYIDEHGHTVVKKVTRKIIRRYVSSEGTEKEEIMVQGMPQEPVNIEEGDGYSKVIKRVVLKSDTEQSEDNNE

SEQ ID NO: 876678 - protein, 422 aa, Homo sapiens
MASWGGKESESDQEQEEEIDMTSEKNPQDEQERIEERLAYIADHLGFSWTELARELDFTEEQIHQIRIENPNSLQDQSHALLKYWLERDGKHATDTNLVECLTKINRMDIVHLMETNTEPLQERISHSYAEIEQTITLDHSEGFSVLQEELCTAQHKQKEEQAVSKESETCDHPPIVSEEDISVGYSTFQDGVPKTEGDSSATALFPQTHKEQVQQDFSGKMQDLPEESSLEYQQEYFVTTPGTETSETQKAMIVPSSPSKTPEEVSTPAEEEKLYLQTPTSSERGGSPIIQEPEEPSEHREESSPRKTSLVIVESADNQPETCERLDEDAAFEKGDDMPEIPPETVTEEEYIDEHGHTVVKKVTRKIIRRYVSSEGTEKEEIMVQGMPQEPVNIEEGDGYSKVIKRVVLKSDTEQSEDNNE

SEQ ID NO: 876679 - protein, 2358 aa, Homo sapiens
MMNEDAAQKSDSGEKFNGSSQRRKRPKKSDSNASFLRAARAGNLDKVVEYLKGGIDINTCNQNGLNALHLAAKEGHVGLVQELLGRGSSVDSATKKGNTALHIASLAGQAEVVKVLVKEGANINAQSQNGFTPLYMAAQENHIDVVKYLLENGANQSTATEDGFTPLAVALQQGHNQAVAILLENDTKGKVRLPALHIAARKDDTKSAALLLQNDHNADVQSKMMVNRTTESGFTPLHIAAHYGNVNVATLLLNRGAAVDFTARNGITPLHVASKRGNTNMVKLLLDRGGQIDAKTRDGLTPLHCAARSGHDQVVELLLERGAPLLARTKNGLSPLHMAAQGDHVECVKHLLQHKAPVDDVTLDYLTALHVAAHCGHYRVTKLLLDKRANPNARALNGFTPLHIACKKNRIKVMELLVKYGASIQAITESGLTPIHVAAFMGHLNIVLLLLQNGASPDVTNIRGETALHMAARAGQVEVVRCLLRNGALVDARAREEQTPLHIASRLGKTEIVQLLLQHMAHPDAATTNGYTPLHISAREGQVDVASVLLEAGAAHSLATKKGFTPLHVAAKYGSLDVAKLLLQRRAAADSAGKNGLTPLHVAAHYDNQKVALLLLEKGASPHATAKNGYTPLHIAAKKNQMQIASTLLNYGAETNIVTKQGVTPLHLASQEGHTDMVTLLLDKGANIHMSTKSGLTSLHLAAQEDKVNVADILTKHGADQDAHTKLGYTPLIVACHYGNVKMVNFLLKQGANVNAKTKNGYTPLHQAAQQGHTHIINVLLQHGAKPNATTANGNTALAIAKRLGYISVVDTLKVVTEEVTTTTTTITEKHKLNVPETMTEVLDVSDEEGDDTMTGDGGEYLRPEDLKELGDDSLPSSQFLDGMNYLRYSLEGGRSDSLRSFSSDRSHTLSHASYLRDSAVMDDSVVIPSHQVSTLAKEAERNSYRLSWGTENLDNVALSSSPIHSGFLVSFMVDARGGAMRGCRHNGLRIIIPPRKCTAPTRVTCRLVKRHRLATMPPMVEGEGLASRLIEVGPSGAQFLGPVIVEIPHFAALRGKERELVVLRSENGDSWKEHFCDYTEDELNEILNGMDEVLDSPEDLEKKRICRIITRDFPQYFAVVSRIKQDSNLIGPEGGVLSSTVVPQVQAVFPEGALTKRIRVGLQAQPMHSELVKKILGNKATFSPIVTLEPRRRKFHKPITMTIPVPKASSDVMLNGFGGDAPTLRLLCSITGGTTPAQWEDITGTTPLTFVNECVSFTTNVSARFWLIDCRQIQESVTFASQVYREIICVPYMAKFVVFAKSHDPIEARLRCFCMTDDKVDKTLEQQENFAEVARSRDVEVLEGKPIYVDCFGNLVPLTKSGQHHIFSFFAFKENRLPLFVKVRDTTQEPCGRLSFMKEPKSTRGLVHQAICNLNITLPIYTKESESDQEQEEEIDMTSEKNDETESTETSVLKSHLVNEVPVLASPDLLSEVSEMKQDLIKMTAILTTDVSDKAGSIKVKELVKAAEEEPGEPFEIVERVKEDLEKVNEILRSGTCTRDESSVQSSRSERGLVEEEWVIVSDEEIEEARQKAPLEITEYPCVEVRIDKEIKGKVEKDSTGLVNYLTDDLNTCVPLPKEQLQTVQDKAGKKCEALAVGRSSEKEGKDIPPDETQSTQKQHKPSLGIKKPVRRKLKEKQKQKEEGLQASAEKAELKKGSSEESLGEDPGLAPEPLPTVKATSPLIEETPIGSIKDKVKALQKRVEDEQKGRSKLPIRVKGKEDVPKKTTHRPHPAASPSLKSERHAPGSPSPKTERHSTLSSSAKTERHPPVSPSSKTEKHSPVSPSAKTERHSPASSSSKTEKHSPVSPSTKTERHSPVSSTKTERHPPVSPSGKTDKRPPVSPSGRTEKHPPVSPGRTEKRLPVSPSGRTDKHQPVSTAGKTEKHLPVSPSGKTEKQPPVSPTSKTERIEETMSVRELMKAFQSGQDPSKHKTGLFEHKSAKQKQPQEKGKVRVEKEKGPILTQREAQKTENQTIKRGQRLPVTGTAESKRGVRVSSIGVKKEDAAGGKEKVLSHKIPEPVQSVPEEESHRESEVPKEKMADEQGDMDLQISPDRKTSTDFSEVIKQELEDNDKYQQFRLSEETEKAQLHLDQVLTSPFNTTFPLDYMKDEFLPALSLQSGALDGSSESLKNEGVAGSPCGSLMEGTPQISSEESYKHEGLAETPETSPESLSFSPKKSEEQTGETKESTKTETTTEIRSEKEHPTTKDITGGSEERGATVTEDSETSTESFQKEATLGSPKDTSPKRQDDCTGSCSVALAKETPTGLTEEAACDEGQRTFGSSAHKTQKNTTYQNKERSEITQRYLKIVQMLQIN

SEQ ID NO: 876680 - protein, 1872 aa, Homo sapiens
MMNEDAAQKSDSGEKFNGSSQRRKRPKKSDSNASFLRAARAGNLDKVVEYLKGGIDINTCNQNGLNALHLAAKEGHVGLVQELLGRGSSVDSATKKGNTALHIASLAGQAEVVKVLVKEGANINAQSQNGFTPLYMAAQENHIDVVKYLLENGANQSTATEDGFTPLAVALQQGHNQAVAILLENDTKGKVRLPALHIAARKDDTKSAALLLQNDHNADVQSKMMVNRTTESGFTPLHIAAHYGNVNVATLLLNRGAAVDFTARNGITPLHVASKRGNTNMVKLLLDRGGQIDAKTRDGLTPLHCAARSGHDQVVELLLERGAPLLARTKNGLSPLHMAAQGDHVECVKHLLQHKAPVDDVTLDYLTALHVAAHCGHYRVTKLLLDKRANPNARALNGFTPLHIACKKNRIKVMELLVKYGASIQAITESGLTPIHVAAFMGHLNIVLLLLQNGASPDVTNIRGETALHMAARAGQVEVVRCLLRNGALVDARAREEQTPLHIASRLGKTEIVQLLLQHMAHPDAATTNGYTPLHISAREGQVDVASVLLEAGAAHSLATKKGFTPLHVAAKYGSLDVAKLLLQRRAAADSAGKNGLTPLHVAAHYDNQKVALLLLEKGASPHATAKNGYTPLHIAAKKNQMQIASTLLNYGAETNIVTKQGVTPLHLASQEGHTDMVTLLLDKGANIHMSTKSGLTSLHLAAQEDKVNVADILTKHGADQDAHTKLGYTPLIVACHYGNVKMVNFLLKQGANVNAKTKNGYTPLHQAAQQGHTHIINVLLQHGAKPNATTANGNTALAIAKRLGYISVVDTLKVVTEEVTTTTTTITEKHKLNVPETMTEVLDVSDEEGDDTMTGDGGEYLRPEDLKELGDDSLPSSQFLDGMNYLRYSLEGGRSDSLRSFSSDRSHTLSHASYLRDSAVMDDSVVIPSHQVSTLAKEAERNSYRLSWGTENLDNVALSSSPIHSGFLVSFMVDARGGAMRGCRHNGLRIIIPPRKCTAPTRVTCRLVKRHRLATMPPMVEGEGLASRLIEVGPSGAQFLGKLHLPTAPPPLNEGESLVSRILQLGPPGTKFLGPVIVEIPHFAALRGKERELVVLRSENGDSWKEHFCDYTEDELNEILNGMDEVLDSPEDLEKKRICRIITRDFPQYFAVVSRIKQDSNLIGPEGGVLSSTVVPQVQAVFPEGALTKRIRVGLQAQPMHSELVKKILGNKATFSPIVTLEPRRRKFHKPITMTIPVPKASSDVMLNGFGGDAPTLRLLCSITGGTTPAQWEDITGTTPLTFVNECVSFTTNVSARFWLIDCRQIQESVTFASQVYREIICVPYMAKFVVFAKSHDPIEARLRCFCMTDDKVDKTLEQQENFAEVARSRDVEVLEGKPIYVDCFGNLVPLTKSGQHHIFSFFAFKENRLPLFVKVRDTTQEPCGRLSFMKEPKSTRGLVHQAICNLNITLPIYTKESESDQEQEEEIDMTSEKNPQDEQERIEERLAYIADHLGFSWTELARELDFTEEQIHQIRIENPNSLQDQSHALLKYWLERDGKHATDTNLVECLTKINRMDIVHLMETNTEPLQERISHSYAEIEQTITLDHSEGFSVLQEELCTAQHKQKEEQAVSKESETCDHPPIVSEEDISVGYSTFQDGVPKTEGDSSATALFPQTHKEQVQQDFSGKMQDLPEESSLEYQQEYFVTTPGTETSETQKAMIVPSSPSKTPEEVSTPAEEEKLYLQTPTSSERGGSPIIQEPEEPSEHREESSPRKTSLVIVESADNQPETCERLDEDAAFEKGDDMPEIPPETVTEEEYIDEHGHTVVKKVTRKIIRRYVSSEGTEKEEIMVQGMPQEPVNIEEGDGYSKVIKRVVLKSDTEQSEDNNE

SEQ ID NO: 876681 - protein, 3985 aa, Homo sapiens
MMNEDAAQKSDSGEKFNGSSQRRKRPKKSDSNASFLRAARAGNLDKVVEYLKGGIDINTCNQNGLNALHLAAKEGHVGLVQELLGRGSSVDSATKKGNTALHIASLAGQAEVVKVLVKEGANINAQSQNGFTPLYMAAQENHIDVVKYLLENGANQSTATEDGFTPLAVALQQGHNQAVAILLENDTKGKVRLPALHIAARKDDTKSAALLLQNDHNADVQSKMMVNRTTESGFTPLHIAAHYGNVNVATLLLNRGAAVDFTARNGITPLHVASKRGNTNMVKLLLDRGGQIDAKTRDGLTPLHCAARSGHDQVVELLLERGAPLLARTKNGLSPLHMAAQGDHVECVKHLLQHKAPVDDVTLDYLTALHVAAHCGHYRVTKLLLDKRANPNARALNGFTPLHIACKKNRIKVMELLVKYGASIQAITESGLTPIHVAAFMGHLNIVLLLLQNGASPDVTNIRGETALHMAARAGQVEVVRCLLRNGALVDARAREEQTPLHIASRLGKTEIVQLLLQHMAHPDAATTNGYTPLHISAREGQVDVASVLLEAGAAHSLATKKGFTPLHVAAKYGSLDVAKLLLQRRAAADSAGKNGLTPLHVAAHYDNQKVALLLLEKGASPHATAKNGYTPLHIAAKKNQMQIASTLLNYGAETNIVTKQGVTPLHLASQEGHTDMVTLLLDKGANIHMSTKSGLTSLHLAAQEDKVNVADILTKHGADQDAHTKLGYTPLIVACHYGNVKMVNFLLKQGANVNAKTKNGYTPLHQAAQQGHTHIINVLLQHGAKPNATTANGNTALAIAKRLGYISVVDTLKVVTEEVTTTTTTITEKHKLNVPETMTEVLDVSDEEGDDTMTGDGGEYLRPEDLKELGDDSLPSSQFLDGMNYLRYSLEGGRSDSLRSFSSDRSHTLSHASYLRDSAVMDDSVVIPSHQVSTLAKEAERNSYRLSWGTENLDNVALSSSPIHSGFLVSFMVDARGGAMRGCRHNGLRIIIPPRKCTAPTRVTCRLVKRHRLATMPPMVEGEGLASRLIEVGPSGAQFLGPVIVEIPHFAALRGKERELVVLRSENGDSWKEHFCDYTEDELNEILNGMDEVLDSPEDLEKKRICRIITRDFPQYFAVVSRIKQDSNLIGPEGGVLSSTVVPQVQAVFPEGALTKRIRVGLQAQPMHSELVKKILGNKATFSPIVTLEPRRRKFHKPITMTIPVPKASSDVMLNGFGGDAPTLRLLCSITGGTTPAQWEDITGTTPLTFVNECVSFTTNVSARFWLIDCRQIQESVTFASQVYREIICVPYMAKFVVFAKSHDPIEARLRCFCMTDDKVDKTLEQQENFAEVARSRDVEVLEGKPIYVDCFGNLVPLTKSGQHHIFSFFAFKENRLPLFVKVRDTTQEPCGRLSFMKEPKSTRGLVHQAICNLNITLPIYTKESESDQEQEEEIDMTSEKNDETESTETSVLKSHLVNEVPVLASPDLLSEVSEMKQDLIKMTAILTTDVSDKAGSIKVKELVKAAEEEPGEPFEIVERVKEDLEKVNEILRSGTCTRDESSVQSSRSERGLVEEEWVIVSDEEIEEARQKAPLEITEYPCVEVRIDKEIKGKVEKDSTGLVNYLTDDLNTCVPLPKEQLQTVQDKAGKKCEALAVGRSSEKEGKDIPPDETQSTQKQHKPSLGIKKPVRRKLKEKQKQKEEGLQASAEKAELKKGSSEESLGEDPGLAPEPLPTVKATSPLIEETPIGSIKDKVKALQKRVEDEQKGRSKLPIRVKGKEDVPKKTTHRPHPAASPSLKSERHAPGSPSPKTERHSTLSSSAKTERHPPVSPSSKTEKHSPVSPSAKTERHSPASSSSKTEKHSPVSPSTKTERHSPVSSTKTERHPPVSPSGKTDKRPPVSPSGRTEKHPPVSPGRTEKRLPVSPSGRTDKHQPVSTAGKTEKHLPVSPSGKTEKQPPVSPTSKTERIEETMSVRELMKAFQSGQDPSKHKTGLFEHKSAKQKQPQEKGKVRVEKEKGPILTQREAQKTENQTIKRGQRLPVTGTAESKRGVRVSSIGVKKEDAAGGKEKVLSHKIPEPVQSVPEEESHRESEVPKEKMADEQGDMDLQISPDRKTSTDFSEVIKQELEDNDKYQQFRLSEETEKAQLHLDQVLTSPFNTTFPLDYMKDEFLPALSLQSGALDGSSESLKNEGVAGSPCGSLMEGTPQISSEESYKHEGLAETPETSPESLSFSPKKSEEQTGETKESTKTETTTEIRSEKEHPTTKDITGGSEERGATVTEDSETSTESFQKEATLGSPKDTSPKRQDDCTGSCSVALAKETPTGLTEEAACDEGQRTFGSSAHKTQTDSEAQESTATSDETKALPLPEASVKTDTGTESKPQGVIRSPQGLELALPSRDSEVLSAVADDSLAVSHKDSLEASPVLEDNSSHKTPDSLEPSPLKESPCRDSLESSPVEPKMKAGIFPSHFPLPAAVAKTELLTEVASVRSRLLRDPDGSAEDDSLEQTSLMESSGKSPLSPDTPSSEEVSYEVTPKTTDVSTPKPAVIHECAEEDDSENGEKKRFTPEEEMFKMVTKIKMFDELEQEAKQKRDYKKEPKQEESSSSSDPDADCSVDVDEPKHTGSGEDESGVPVLVTSESRKVSSSSESEPELAQLKKGADSGLLPEPVIRVQPPSPLPSSMDSNSSPEEVQFQPVVSKQYTFKMNEDTQEEPGKSEEEKDSESHLAEDRHAVSTEAEDRSYDKLNRDTDQPKICDGHGCEAMSPSSSARPVSSGLQSPTGDDVDEQPVIYKESLALQGTHEKDTEGEELDVSRAESPQADCPSESFSSSSSLPHCLVSEGKELDEDISATSSIQKTEVTKTDETFENLPKDCPSQDSSITTQTDRFSMDVPVSDLAENDEIYDPQITSPYENVPSQSFFSSEESKTQTDANHTTSFHSSEVYSVTITSPVEDVVVASSSSGTVLSKESNFEGQDIKMESQLESTLWEMQSDSVSSSFEPTMSATTTVVGEQISKVIITKTDVDSDSWSEIREDDEAFEARVKEEEQKIFGLMVDRQSQGTTPDTTPARTPTEEGTPTSEQNPFLFQEGKLFEMTRSGAIDMTKRSYADESFHFFQIGQESREETLSEDVKEGATGADPLPLETSAESLALSESKETVDDEADLLPDDVSEEVEEIPASDAQLNSQMGISASTETPTKEAVSVGTKDLPTVQTGDIPPLSGVKQISCPDSSEPAVQVQLDFSTLTRSVYSDRGDDSPDSSPEEQKSVIEIPTAPMENVPFTESKSKIPVRTMPTSTPAPPSAEYESSVSEDFLSSVDEENKADEAKPKSKLPVKVPLQRVEQQLSDLDTSVQKTVAPQGQDMASIAPDNRSKSESDASSLDSKTKCPVKTRSYTETETESRERAEELELESEEGATRPKILTSRLPVKSRSTTSSCRGGTSPTKESKEHFFDLYRNSIEFFEEISDEASKLVDRLTQSEREQEIVSDDESSSALEVSVIENLPPVETEHSVPEDIFDTRPIWDESIETLIERIPDENGHDHAEDPQDEQERIEERLAYIADHLGFSWTELARELDFTEEQIHQIRIENPNSLQDQSHALLKYWLERDGKHATDTNLVECLTKINRMDIVHLMETNTEPLQERISHSYAEIEQTITLDHSEGFSVLQEELCTAQHKQKEEQAVSKESETCDHPPIVSEEDISVGYSTFQDGVPKTEGDSSATALFPQTHKEQVQQDFSGKMQDLPEESSLEYQQEYFVTTPGTETSETQKAMIVPSSPSKTPEEVSTPAEEEKLYLQTPTSSERGGSPIIQEPEEPSEHREESSPRKTSLVIVESADNQPETCERLDEDAAFEKGDDMPEIPPETVTEEEYIDEHGHTVVKKVTRKIIRRYVSSEGTEKEEIMVQGMPQEPVNIEEGDGYSKVIKRVVLKSDTEQSEVTLCEPSILSSTSQFQAEPVEGRRVSKVVKTTVVLGERMEKHLGDSSLATDLPSAKDDFEEDNNE

SEQ ID NO: 876682 - protein, 2507 aa, Homo sapiens
MASWGGKESESDQEQEEEIDMTSEKNDETESTETSVLKSHLVNEVPVLASPDLLSEVSEMKQDLIKMTAILTTDVSDKAGSIKVKELVKAAEEEPGEPFEIVERVKEDLEKVNEILRSGTCTRDESSVQSSRSERGLVEEEWVIVSDEEIEEARQKAPLEITEYPCVEVRIDKEIKGKVEKDSTGLVNYLTDDLNTCVPLPKEQLQTVQDKAGKKCEALAVGRSSEKEGKDIPPDETQSTQKQHKPSLGIKKPVRRKLKEKQKQKEEGLQASAEKAELKKGSSEESLGEDPGLAPEPLPTVKATSPLIEETPIGSIKDKVKALQKRVEDEQKGRSKLPIRVKGKEDVPKKTTHRPHPAASPSLKSERHAPGSPSPKTERHSTLSSSAKTERHPPVSPSSKTEKHSPVSPSAKTERHSPASSSSKTEKHSPVSPSTKTERHSPVSSTKTERHPPVSPSGKTDKRPPVSPSGRTEKHPPVSPGRTEKRLPVSPSGRTDKHQPVSTAGKTEKHLPVSPSGKTEKQPPVSPTSKTERIEETMSVRELMKAFQSGQDPSKHKTGLFEHKSAKQKQPQEKGKVRVEKEKGPILTQREAQKTENQTIKRGQRLPVTGTAESKRGVRVSSIGVKKEDAAGGKEKVLSHKIPEPVQSVPEEESHRESEVPKEKMADEQGDMDLQISPDRKTSTDFSEVIKQELEDNDKYQQFRLSEETEKAQLHLDQVLTSPFNTTFPLDYMKDEFLPALSLQSGALDGSSESLKNEGVAGSPCGSLMEGTPQISSEESYKHEGLAETPETSPESLSFSPKKSEEQTGETKESTKTETTTEIRSEKEHPTTKDITGGSEERGATVTEDSETSTESFQKEATLGSPKDTSPKRQDDCTGSCSVALAKETPTGLTEEAACDEGQRTFGSSAHKTQTDSEAQESTATSDETKALPLPEASVKTDTGTESKPQGVIRSPQGLELALPSRDSEVLSAVADDSLAVSHKDSLEASPVLEDNSSHKTPDSLEPSPLKESPCRDSLESSPVEPKMKAGIFPSHFPLPAAVAKTELLTEVASVRSRLLRDPDGSAEDDSLEQTSLMESSGKSPLSPDTPSSEEVSYEVTPKTTDVSTPKPAVIHECAEEDDSENGEKKRFTPEEEMFKMVTKIKMFDELEQEAKQKRDYKKEPKQEESSSSSDPDADCSVDVDEPKHTGSGEDESGVPVLVTSESRKVSSSSESEPELAQLKKGADSGLLPEPVIRVQPPSPLPSSMDSNSSPEEVQFQPVVSKQYTFKMNEDTQEEPGKSEEEKDSESHLAEDRHAVSTEAEDRSYDKLNRDTDQPKICDGHGCEAMSPSSSARPVSSGLQSPTGDDVDEQPVIYKESLALQGTHEKDTEGEELDVSRAESPQADCPSESFSSSSSLPHCLVSEGKELDEDISATSSIQKTEVTKTDETFENLPKDCPSQDSSITTQTDRFSMDVPVSDLAENDEIYDPQITSPYENVPSQSFFSSEESKTQTDANHTTSFHSSEVYSVTITSPVEDVVVASSSSGTVLSKESNFEGQDIKMESQLESTLWEMQSDSVSSSFEPTMSATTTVVGEQISKVIITKTDVDSDSWSEIREDDEAFEARVKEEEQKIFGLMVDRQSQGTTPDTTPARTPTEEGTPTSEQNPFLFQEGKLFEMTRSGAIDMTKRSYADESFHFFQIGQESREETLSEDVKEGATGADPLPLETSAESLALSESKETVDDEADLLPDDVSEEVEEIPASDAQLNSQMGISASTETPTKEAVSVGTKDLPTVQTGDIPPLSGVKQISCPDSSEPAVQVQLDFSTLTRSVYSDRGDDSPDSSPEEQKSVIEIPTAPMENVPFTESKSKIPVRTMPTSTPAPPSAEYESSVSEDFLSSVDEENKADEAKPKSKLPVKVPLQRVEQQLSDLDTSVQKTVAPQGQDMASIAPDNRSKSESDASSLDSKTKCPVKTRSYTETETESRERAEELELESEEGATRPKILTSRLPVKSRSTTSSCRGGTSPTKESKEHFFDLYRNSIEFFEEISDEASKLVDRLTQSEREQEIVSDDESSSALEVSVIENLPPVETEHSVPEDIFDTRPIWDESIETLIERIPDENGHDHAEDPQDEQERIEERLAYIADHLGFSWTELARELDFTEEQIHQIRIENPNSLQDQSHALLKYWLERDGKHATDTNLVECLTKINRMDIVHLMETNTEPLQERISHSYAEIEQTITLDHSEGFSVLQEELCTAQHKQKEEQAVSKESETCDHPPIVSEEDISVGYSTFQDGVPKTEGDSSATALFPQTHKEQVQQDFSGKMQDLPEESSLEYQQEYFVTTPGTETSETQKAMIVPSSPSKTPEEVSTPAEEEKLYLQTPTSSERGGSPIIQEPEEPSEHREESSPRKTSLVIVESADNQPETCERLDEDAAFEKGDDMPEIPPETVTEEEYIDEHGHTVVKKVTRKIIRRYVSSEGTEKEEIMVQGMPQEPVNIEEGDGYSKVIKRVVLKSDTEQSEDNNE

SEQ ID NO: 876683 - protein, 1836 aa, Homo sapiens
MMNEDAAQKSDSGEKFNGSSQRRKRPKKSDSNASFLRAARAGNLDKVVEYLKGGIDINTCNQNGLNALHLAAKEGHVGLVQELLGRGSSVDSATKKGNTALHIASLAGQAEVVKVLVKEGANINAQSQNGFTPLYMAAQENHIDVVKYLLENGANQSTATEDGFTPLAVALQQGHNQAVAILLENDTKGKVRLPALHIAARKDDTKSAALLLQNDHNADVQSKMMVNRTTESGFTPLHIAAHYGNVNVATLLLNRGAAVDFTARNGITPLHVASKRGNTNMVKLLLDRGGQIDAKTRDGLTPLHCAARSGHDQVVELLLERGAPLLARTKNGLSPLHMAAQGDHVECVKHLLQHKAPVDDVTLDYLTALHVAAHCGHYRVTKLLLDKRANPNARALNGFTPLHIACKKNRIKVMELLVKYGASIQAITESGLTPIHVAAFMGHLNIVLLLLQNGASPDVTNIRGETALHMAARAGQVEVVRCLLRNGALVDARAREEQTPLHIASRLGKTEIVQLLLQHMAHPDAATTNGYTPLHISAREGQVDVASVLLEAGAAHSLATKKGFTPLHVAAKYGSLDVAKLLLQRRAAADSAGKNGLTPLHVAAHYDNQKVALLLLEKGASPHATAKNGYTPLHIAAKKNQMQIASTLLNYGAETNIVTKQGVTPLHLASQEGHTDMVTLLLDKGANIHMSTKSGLTSLHLAAQEDKVNVADILTKHGADQDAHTKLGYTPLIVACHYGNVKMVNFLLKQGANVNAKTKNGYTPLHQAAQQGHTHIINVLLQHGAKPNATTANGNTALAIAKRLGYISVVDTLKVVTEEVTTTTTTITEKHKLNVPETMTEVLDVSDEEGDDTMTGDGGEYLRPEDLKELGDDSLPSSQFLDGMNYLRYSLEGGRSDSLRSFSSDRSHTLSHASYLRDSAVMDDSVVIPSHQVSTLAKEAERNSYRLSWGTENLDNVALSSSPIHSGFLVSFMVDARGGAMRGCRHNGLRIIIPPRKCTAPTRVTCRLVKRHRLATMPPMVEGEGLASRLIEVGPSGAQFLGPVIVEIPHFAALRGKERELVVLRSENGDSWKEHFCDYTEDELNEILNGMDEVLDSPEDLEKKRICRIITRDFPQYFAVVSRIKQDSNLIGPEGGVLSSTVVPQVQAVFPEGALTKRIRVGLQAQPMHSELVKKILGNKATFSPIVTLEPRRRKFHKPITMTIPVPKASSDVMLNGFGGDAPTLRLLCSITGGTTPAQWEDITGTTPLTFVNECVSFTTNVSARFWLIDCRQIQESVTFASQVYREIICVPYMAKFVVFAKSHDPIEARLRCFCMTDDKVDKTLEQQENFAEVARSRDVEVLEGKPIYVDCFGNLVPLTKSGQHHIFSFFAFKENRLPLFVKVRDTTQEPCGRLSFMKEPKSTRGLVHQAICNLNITLPIYTKESESDQEQEEEIDMTSEKNDETESTETSVLKSHLVNEVPVLASPDLLSEVSEMKQDLIKMTAILTTDVSDKAGSIKVKELVKAAEEEPGEPFEIVERVKEDLEKVNEILRSGTCTRDESSVQSSRSERGLVEEEWVIVSDEEIEEARQKAPLEITEYPCVEVRIDKEIKGKVEKDSTGLVNYLTDDLNTCVPLPKEQLQTVQDKAGKKCEALAVGRSSEKEGKDIPPDETQSTQKQHKPSLGIKKPVRRKLKEKQKQKEEGLQASAEKAELKKGSSEESLGEDPGLAPEPLPTVKATSPLIEETPIGSIKDKVKALQKRVEDEQKGRSKLPIRVKGKEDVPKKTTHRPHPAASPSLKSERHAPGSPSPKTERHSTLSSSAKTERHPPVSPSSKTEKHSPVSPSAKTERHTPR

SEQ ID NO: 876684 - protein, 83 aa, Homo sapiens
EKKHPTWGGKEGLGKTPERHPSNKAGREKDSPSGWVEDARKGLNHGLLGITALPFLRSPCGLALELVLTGTLANRVVFFTRVI

SEQ ID NO: 876685 - protein, 703 aa, Homo sapiens
FIHAGLIFVVIAVPAADLRFLRSAEFFNYTVRTLGLGEEWRGGDVARTVGGGQKVRWLKKEMEKYADREDMIIMFVDSYDVILAGSPTELLKKFVQSGSRLLFSAESFCWPEWGLAEQYPEVGTGKRFLNSGGFIGFATTIHQIVRQWKYKDDDDDQLFYTRLYLDPGLREKLSLNLDHKSRIFQNLNGALDEVVLKFDRNRVRIRNVAYDTLPIVVHGNGPTKLQLNYLGNYVPNGWTPEGGCGFCNQDRRTLPGGQPPPRVFLAVFVEQPTPFLPRFLQRLLLLDYPPDRVTLFLHNNEVFHEPHIADSWPQLQDHFSAVKLVGPEEALSPGEARDMAMDLCRQDPECEFYFSLDADAVLTNLQTLRILIEENRKVIAPMLSRHGKLWSNFWGALSPDEYYARSEDYVELVQRKRVGVWNVPYISQAYVIRGDTLRMELPQRDVFSGSDTDPDMAFCKSFRDKGIFLHLSNQHEFGRLLATSRYDTEHLHPDLWQIFDNPVDWKEQYIHENYSRALEGEGIVEQPCPDVYWFPLLSEQMCDELVAEMEHYGQWSGGRHEDSRLAGGYENVPTVDIHMKQVGYEDQWLQLLRTYVGPMTESLFPGYHTKARAVMNFVVRYRPDEQPSLRPHHDSSTFTLNVALNHKGLDYEGGGCRFLRYDCVISSPRKGWALLHPGRLTHYHEGLPTTWGTRYIMVSFVDP

SEQ ID NO: 876686 - protein, 696 aa, Homo sapiens
MTSSGPGPRFLLLLPLLLPPAASASDRPRGRDPVNPEKLLVITVATAETEGYLRFLRSAEFFNYTVRTLGLGEEWRGGDVARTVGGGQKVRWLKKEMEKYADREDMIIMFVDSYDVILAGSPTELLKKFVQSGSRLLFSAESFCWPEWGLAEQYPEVGTGKRFLNSGGFIGFATTIHQIVRQWKYKDDDDDQLFYTRLYLDPGLREKLSLNLDHKSRIFQNLNGALDEVVLKFDRNRVRIRNVAYDTLPIVVHGNGPTKLQLNYLGNYVPNGWTPEGGCGFCNQDRRTLPGGQEVFHEPHIADSWPQLQDHFSAVKLVGPEEALSPGEARDMAMDLCRQDPECEFYFSLDADAVLTNLQTLRILIEENRKVIAPMLSRHGKLWSNFWGALSPDEYYARSEDYVELVQRKRVGVWNVPYISQAYVIRGDTLRMELPQRDVFSGSDTDPDMAFCKSFRDKGIFLHLSNQHEFGRLLATSRYDTEHLHPDLWQIFDNPVDWKEQYIHENYSRALEGEGIVEQPCPDVYWFPLLSEQMCDELVAEMEHYGQWSGGRHEDSRLAGGYENVPTVDIHMKQVGYEDQWLQLLRTYVGPMTESLFPGYHTKARAVMNFVVRYRPDEQPSLRPHHDSSTFTLNVALNHKGLDYEGGGCRFLRYDCVISSPRKGWALLHPGRLTHYHEGLPTTWGTRYIMVSFVDP

SEQ ID NO: 876687 - protein, 738 aa, Homo sapiens
MTSSGPGPRFLLLLPLLLPPAASASDRPRGRDPVNPEKLLVITVATAETEGYLRFLRSAEFFNYTVRTLGLGEEWRGGDVARTVGGGQKVRWLKKEMEKYADREDMIIMFVDSYDVILAGSPTELLKKFVQSGSRLLFSAESFCWPEWGLAEQYPEVGTGKRFLNSGGFIGFATTIHQIVRQWKYKDDDDDQLFYTRLYLDPGLREKLSLNLDHKSRIFQNLNGALDEVVLKFDRNRVRIRNVAYDTLPIVVHGNGPTKLQLNYLGNYVPNGWTPEGGCGFCNQDRRTLPGGQPPPRVFLAVFVEQPTPFLPRFLQRLLLLDYPPDRVTLFLHNNEVFHEPHIADSWPQLQDHFSAVKLVGPEEALSPGEARDMAMDLCRQDPECEFYFSLDADAVLTNLQTLRILIEENRKVIAPMLSRHGKLWSNFWGALSPDEYYARSEDYVELVQRKRVGVWNVPYISQAYVIRGDTLRMELPQRDVFSGSDTDPDMAFCKSFRDKGIFLHLSNQHEFGRLLATSRYDTEHLHPDLWQIFDNPVDWKEQYIHENYSRALEGEGIVEQPCPDVYWFPLLSEQMCDELVAEMEHYGQWSGGRHEDSRLAGGYENVPTVDIHMKQVGYEDQWLQLLRTYVGPMTESLFPGYHTKARAVMNFVVRYRPDEQPSLRPHHDSSTFTLNVALNHKGLDYEGGGCRFLRYDCVISSPRKGWALLHPGRLTHYHEGLPTTWGTRYIMVSFVDP

SEQ ID NO: 876688 - protein, 464 aa, Homo sapiens
WLGGGWGQSAEGRTLPGGQPPPRVFLAVFVEQPTPFLPRFLQRLLLLDYPPDRVTLFLHNNEVFHEPHIADSWPQLQDHFSAVKLVGPEEALSPGEARDMAMDLCRQDPECEFYFSLDADAVLTNLQTLRILIEENRKVIAPMLSRHGKLWSNFWGALSPDEYYARSEDYVELVQRKRVGVWNVPYISQAYVIRGDTLRMELPQRDVFSGSDTDPDMAFCKSFRDKGIFLHLSNQHEFGRLLATSRYDTEHLHPDLWQIFDNPVDWKEQYIHENYSRALEGEGIVEQPCPDVYWFPLLSEQMCDELVAEMEHYGQWSGGRHEDSRLAGGYENVPTVDIHMKQVGYEDQWLQLLRTYVGPMTESLFPGYHTKARAVMNFVVRYRPDEQPSLRPHHDSSTFTLNVALNHKGLDYEGGGCRFLRYDCVISSPRKGWALLHPGRLTHYHEGLPTTWGTRYIMVSFVDP

SEQ ID NO: 876689 - protein, 547 aa, Homo sapiens
MTSSGPGPRFLLLLPLLLPPAASASDRPRGRDPVNPEKLLVITVATAETEGYLRFLRSAEFFNYTVRTLGLGEEWRGGDVARTVGGGQKVRWLKKEMEKYADREDMIIMFVDSYDVILAGSPTELLKKFVQSGSRLLFSAESFCWPEWGLAEQYPEVGTGKRFLNSGGFIGFATTIHQIVRQWKYKDDDDDQLFYTRLYLDADAVLTNLQTLRILIEENRKVIAPMLSRHGKLWSNFWGALSPDEYYARSEDYVELVQRKRVGVWNVPYISQAYVIRGDTLRMELPQRDVFSGSDTDPDMAFCKSFRDKGIFLHLSNQHEFGRLLATSRYDTEHLHPDLWQIFDNPVDWKEQYIHENYSRALEGEGIVEQPCPDVYWFPLLSEQMCDELVAEMEHYGQWSGGRHEDSRLAGGYENVPTVDIHMKQVGYEDQWLQLLRTYVGPMTESLFPGYHTKARAVMNFVVRYRPDEQPSLRPHHDSSTFTLNVALNHKGLDYEGGGCRFLRYDCVISSPRKGWALLHPGRLTHYHEGLPTTWGTRYIMVSFVDP

SEQ ID NO: 876690 - protein, 633 aa, Homo sapiens
MTSSGPGPRFLLLLPLLLPPAASASDRPRGRDPVNPEKLLVITVATAETEGYLRFLRSAEFFNYTVRTLGLGEEWRGGDVARTVGGGQKVRWLKKEMEKYADREDMIIMFVDSYDVILAGSPTELLKKFVQSGSRLLFSAESFCWPEWGLAEQYPEVGTGKRFLNSGGFIGFATTIHQIVRQWKYKDDDDDQLFYTRLYLDPGLREKLSLNLDHKSRIFQNLNGALDEVVLKFDRNRVRIRNVAYDTLPIVVHGNGPTKLQLNYLGNYVPNGWTPEGGCGFCNQDRRTLPGGQPPPRVFLAVFVEQPTPFLPRFLQRLLLLDYPPDRVTLFLHNNEVFHEPHIADSWPQLQDHFSAVKLVGPEEALSPGEARDMAMDLCRQDPECEFYFSLDADAVLTNLQTLRILIEENRKVIAPMLSRHGKLWSNFWGALSPDEYYARSEDYVELVQRKRVGVWNVPYISQAYVIRGDTLRMELPQRDVFSGSDTDPDMAFCKSFRDKGIFLHLSNQHEFGRLLATSRYDTEHLHPDLWQIFDNPVDWKEQYIHENYSRALEGEGIVEQPCPDVYWFPLLSEQMCDELVAEMEHYGQWSGGRHEIQGCWRLRKFAPGGSLKQWVPRPWFLLDFGPNERCGT

SEQ ID NO: 876691 - protein, 778 aa, Homo sapiens
  misc_feature (650)..(650): Xaa can be any naturally occurring amino acid
MTSSGPGPRFLLLLPLLLPPAASASDRPRGRDPVNPEKLLVITVATAETEGYLRFLRSAEFFNYTVRTLGLGEEWRGGDVARTVGGGQKVRWLKKEMEKYADREDMIIMFVDSYDVILAGSPTELLKKFVQSGSRLLFSAESFCWPEWGLAEQYPEVGTGKRFLNSGGFIGFATTIHQIVRQWKYKDDDDDQLFYTRLYLDPGLREKLSLNLDHKSRIFQNLNGALDEVVLKFDRNRVRIRNVAYDTLPIVVHGNGPTKLQLNYLGNYVPNGWTPEGGCGFCNQDRRTLPGGQPPPRVFLAVFVEQPTPFLPRFLQRLLLLDYPPDRVTLFLHNNEVFHEPHIADSWPQLQDHFSAVKLVGPEEALSPGEARDMAMDLCRQDPECEFYFSLDADAVLTNLQTLRILIEENRKVIAPMLSRHGKLWSNFWGALSPDEYYARSEDYVELVQRKRVGVWNVPYISQAYVIRGDTLRMELPQRDVFSGSDTDPDMAFCKSFRDKGIFLHLSNQHEFGRLLATSRYDTEHLHPDLWQIFDNPVARGRQQLTLHEHTTAGPLPQAEGTRSAATTHAPGPHDTSVTQLAMLSNKTAVHETWDGHARSTDNHNAPQLRPEPRRTQEGTTKAPRHRKQTYQTTMLAHKHSARQITTTQXTHQSAGHRRAPTMRLDPHSLPGTVLRWAHPTWNHAATQWSPHADTKPYTKVAPTGQRRTDTFMLADRSTPGPTRDAQPDLNSQRPLTHPNHNPTLTHTITQERHFTPNTSLHTLTRGTITRNHTRHRT

SEQ ID NO: 876692 - protein, 738 aa, Homo sapiens
MTSSGPGPRFLLLLPLLLPPAASASDRPRGRDPVNPEKLLVITVATAETEGYLRFLRSAEFFNYTVRTLGLGEEWRGGDVARTVGGGQKVRWLKKEMEKYADREDMIIMFVDSYDVILAGSPTELLKKFVQSGSRLLFSAESFCWPEWGLAEQYPEVGTGKRFLNSGGFIGFATTIHQIVRQWKYKDDDDDQLFYTRLYLDPGLREKLSLNLDHKSRIFQNLNGALDEVVLKFDRNRVRIRNVAYDTLPIVVHGNGPTKLQLNYLGNYVPNGWTPEGGCGFCNQDRRTLPGGQPPPRVFLAVFVEQPTPFLPRFLQRLLLLDYPPDRVTLFLHNNEVFHEPHIADSWPQLQDHFSAVKLVGPEEALSPGEARDMAMDLCRQDPECEFYFSLDADAVLTNLQTLRILIEENRKVIAPMLSRHGKLWSNFWGALSPDEYYARSEDYVELVQRKRVGVWNVPYISQAYVIRGDTLRMELPQRDVFSGSDTDPDMAFCKSFRDKGIFLHLSNQHEFGRLLATSRYDTEHLHPDLWQIFDNPVVSGDPTPRAHRFPACAKEDTKRDGCCQRRTLSGRGRSPGGWERGGHRSDVPPTLSQDWKEQYIHENYSRALEGEGIVEQPCPDVYWFPLLSEQMCDELVAEMEHYGQWSGGRHEVRAWARRAEAFPEEEVQDLVNKQWNQENGSKEGFPGGRQTLGSQLHSFMYSRNIYCWAQWLMPVILALWEAEAGGLLEQGEFEASL

SEQ ID NO: 876693 - protein, 569 aa, Homo sapiens
MTSSGPGPRFLLLLPLLLPPAASASDRPRGRDPVNPEKLLVITVATAETEGYLRFLRSAEFFNYTVRTLGLGEEWRGGDVARTVGGGQKVRWLKKEMEKYADREDMIIMFVDSYDVILAGSPTELLKKFVQSGSRLLFSAESFCWPEWGLAEQYPEVGTGKRFLNSGGFIGFATTIHQIVRQWKYKDDDDDQLFYTRLYLDPGLREKLSLNLDHKSRIFQNLNGALDEVVLKFDRNRVRIRNVAYDTLPIVVHGNGPTKLQLNYLGNYVPNGWTPEGGCGFCNQDRRTLPGGQPPPRVFLAVFVEQPTPFLPRFLQRLLLLDYPPDRVTLFLHNNEVFHEPHIADSWPQLQDHFSAVKLVGPEEALSPGEARDMAMDLCRQDPECEFYFSLDADAVLTNLQTLRILIEENRKVIAPMLSRHGKLWSNFWGALSPDEYYARSEDYVELVQRKRVGVWNVPYISQAYVIRGDTLRMELPQRDVFSGSDTDPDMAFCKSFRDKGIFLHLSNQHEFGRLLATSTHPLASAAPAPRSPRSGRSTHRGSGPPEVGPQLAVAGQHGGDHLPVLLNE

SEQ ID NO: 876694 - protein, 738 aa, Homo sapiens; identical to SEQ ID NO: 876687

SEQ ID NO: 876695 - protein, 689 aa, Homo sapiens [sequence omitted]

SEQ ID NO: 876696 - protein, 426 aa, Homo sapiens
HFSSCEVVLELRPGVSDVGFMEDLVVVQEKGDPVGGILQDHFSAVKLVGPEEALSPGEARDMAMDLCRQDPECEFYFSLDADAVLTNLQTLRILIEENRKVIAPMLSRHGKLWSNFWGALSPDEYYARSEDYVELVQRKRVGVWNVPYISQAYVIRGDTLRMELPQRDVFSGSDTDPDMAFCKSFRDKGIFLHLSNQHEFGRLLATSRYDTEHLHPDLWQIFDNPVDWKEQYIHENYSRALEGEGIVEQPCPDVYWFPLLSEQMCDELVAEMEHYGQWSGGRHEDSRLAGGYENVPTVDIHMKQVGYEDQWLQLLRTYVGPMTESLFPGYHTKARAVMNFVVRYRPDEQPSLRPHHDSSTFTLNVALNHKGLDYEGGGCRFLRYDCVISSPRKGWALLHPGRLTHYHEGLPTTWGTRYIMVSFVDP

SEQ ID NO: 876697 - protein, 435 aa, Homo sapiens
HLSPIQPLLGLPIRILAAPMLSLLPLPAHPDSREPGEGRIDTASLLFSWGHGPVTPSTPPPHLPPSQLPLTSRDLCRQDPECEFYFSLDADAVLTNLQTLRILIEENRKVIAPMLSRHGKLWSNFWGALSPDEYYARSEDYVELVQRKRVGVWNVPYISQAYVIRGDTLRMELPQRDVFSGSDTDPDMAFCKSFRDKGIFLHLSNQHEFGRLLATSRYDTEHLHPDLWQIFDNPVDWKEQYIHENYSRALEGEGIVEQPCPDVYWFPLLSEQMCDELVAEMEHYGQWSGGRHEDSRLAGGYENVPTVDIHMKQVGYEDQWLQLLRTYVGPMTESLFPGYHTKARAVMNFVVRYRPDEQPSLRPHHDSSTFTLNVALNHKGLDYEGGGCRFLRYDCVISSPRKGWALLHPGRLTHYHEGLPTTWGTRYIMVSFVDP

SEQ ID NO: 876698 - protein, 305 aa, Homo sapiens
MTSSGPGPRFLLLLPLLLPPAASASDRPRGRDPVNPEKLLVITVATAETEGYLRFLRSAEFFNYTVRGIFLHLSNQHEFGRLLATSRYDTEHLHPDLWQIFDNPVDWKEQYIHENYSRALEGEGIVEQPCPDVYWFPLLSEQMCDELVAEMEHYGQWSGGRHEDSRLAGGYENVPTVDIHMKQVGYEDQWLQLLRTYVGPMTESLFPGYHTKARAVMNFVVRYRPDEQPSLRPHHDSSTFTLNVALNHKGLDYEGGGCRFLRYDCVISSPRKGWALLHPGRLTHYHEGLPTTWGTRYIMVSFVDP

SEQ ID NO: 876699 - protein, 554 aa, Homo sapiens
MTSSGPGPRFLLLLPLLLPPAASASDRPRGRDPVNPEKLLVITVATAETEGYLRFLRSAEFFNYTVRTLGLGEEWRGGDVARTVGGGQKVRWLKKEMEKYADREDMIIMFVDSYDVILAGSPTELLKKFVQSGSRLLFSAESFCWPEWGLAEQYPEVGTGKRFLNSGGFIGFATTIHQIVRQWKYKDDDDDQLFYTRLYLDPGLREKLSLNLDHKSRIFQNLNGALDEVVLKFDRNRVRIRNVAYDTLPIVVHGNGPTKLQLNYLGNYVPNGWTPEGGCGFCNQDRRTLPGGQPPPRVFLAVFVEQPTPFLPRFLQRLLLLDYPPDRVTLFLHNNEVFHEPHIADSWPQLQDHFSAVKLVGPEEALSPGEARDMAMDLCRQDPECEFYFSLDADAVLTNLQTLRILIEENRKVIAPMLSRHGKLWSNFWGALSPDEYYARSEDYVELVQRKRVGVWNVPYISQAYVIRGDTLRMELPQRDVFSGSDTDPDMAFCKSFRDKGIFLHLSNQHEFGRLLATSRYDTEHLHPDLWQIFDNPVVSGDPTPRAHRFPALC

SEQ ID NO: 876700 - protein, 124 aa, Homo sapiens [sequence omitted]

SEQ ID NO: 876701 - protein, 1106 aa, Homo sapiens [sequence omitted]

SEQ ID NO: 876702 - protein, 972 aa, Homo sapiens [sequence omitted]

SEQ ID NO: 876703 - protein, 972 aa, Homo sapiens [sequence omitted]

SEQ ID NO: 876704 - protein, 972 aa, Homo sapiens [sequence omitted]

SEQ ID NO: 876705 - protein, 1106 aa, Homo sapiens [sequence omitted]

SEQ ID NO: 876706 - protein, 1106 aa, Homo sapiens [sequence omitted]

SEQ ID NO: 876707 - protein, 1106 aa, Homo sapiens
MRLPGAMPALALKGELLLLSLLLLLEPQISQGLVVTPPGPELVLNVSSTFVLTCSGSAPVVWERMSQEPPQEMAKAQDGTFSSVLTLTNLTGLDTGEYFCTHNDSRGLETDERKRLYIFVPDPTVGFLPNDAEELFIFLTEITEITIPCRVTDPQLVVTLHEKKGDVALPVPYDHQRGFSGIFEDRSYICKTTIGDREVDSDAYYVYRLQVSSINVSVNAVQTVVRQGENITLMCIVIGNEVVNFEWTYPRKESGRLVEPVTDFLLDMPYHIRSILHIPSAELEDSGTYTCNVTESVNDHQDEKAINITVVESGYVRLLGEVGTLQFAELHRSRTLQVVFEAYPPPTVLWFKDNRTLGDSSAGEIALSTRNVSETRYVSELTLVRVKVAEAGHYTMRAFHEDAEVQLSFQLQINVPVRVLELSESHPDSGEQTVRCRGRGMPQPNIIWSACRDLKRCPRELPPTLLGNSSEEESQLETNVTYWEEEQEFEVVSTLRLQHVDRPLSVRCTLRNAVGQDTQEVIVVPHSLPFKVVVISAILALVVLTIISLIILIMLWQKKPRYEIRWKVIESVSSDGHEYIYVDPMQLPYDSTWELPRDQLVLGRTLGSGAFGQVVEATAHGLSHSQATMKVAVKMLKSTARSSEKQALMSELKIMSHLGPHLNVVNLLGACTKGGPIYIITEYCRYGDLVDYLHRNKHTFLQHHSDKRRPPSAELYSNALPVGLPLPSHVSLTGESDGGYMDMSKDESVDYVPMLDMKGDVKYADIESSNYMAPYDNYVPSAPERTCRATLINESPVLSYMDLVGFSYQVANGMEFLASKNCVHRDLAARNVLICEGKLVKICDFGLARDIMRDSNYISKGSTFLPLKWMAPESIFNSLYTTLSDVWSFGILLWEIFTLGGTPYPELPMNEQFYNAIKRGYRMAQPAHASDEIYEIMQKCWEEKFEIRPPFSQLVLLLERLLGEGYKKKYQQVDEEFLRSDHPAILRSQARLPGFHGLRSPLDTSSVLYTAVQPNEGDNDYIIPLPDPKPEVADEGPLEGSPSLASSTLNEVNTSSTISCDSPLEPQDEPEPEPQLELQVEPEPELEQLPDSGCPAPRAEAEDSFL

SEQ ID NO: 876708 - protein, 459 aa, Homo sapiens
MRATVILSSTPRSCLTTRSGSSPGTTCSLVRWQLITPQLPITGPVGVAGSPWALGQRPFGAQGLKGPVCVAGKTLGAGAFGKVVEATAFGLGKEDAVLKVAVKMLKSTAHADEKEALMSELKIMSHLGQHENIVNLLGACTHGGPVLVITEYCCYGDLLNFLRRKAEAMLGPSLSPGQDPEGGVDYKNIHLEKKYVRRDSGFSSQGVDTYVEMRPVSTSSNDSFSEQDLDKEDGRPLELRDLLHFSSQVAQGMAFLASKNCIHRDVAARNVLLTNGHVAKIGDFGLARDIMNDSNYIVKGNARLPVKWMAPESIFDCVYTVQSDVWSYGILLWEIFSLGLNPYPGILVNSKFYKLVKDGYQMAQPAFAPKNIYSIMQACWALEPTHRPTFQQICSFLQEQAQEDRRERDYTNLPSSSRSGGSGSSSSELEEESSSEHLTCCEQGDIAQPLLQPNNYQFC

SEQ ID NO: 876709 - protein, 117 aa, Homo sapiens
MVLASCLLCQLVEPSFLIPLSSWKWTDFMPMKSPGATLILRKPGSLGLDRLAESEISLSERSSRCSQTTLSSGPLEQDGSSKNLTGPLSLCPIRRLHSTASPLPPPYWYCCNEPSGS

SEQ ID NO: 876710 - protein, 1106 aa, Homo sapiens; identical to SEQ ID NO: 876707

SEQ ID NO: 876711 - protein, 122 aa, Homo sapiens
LGDLEYPRFDASAEELTTGSTTLPSSKLQLLHGWGDTGRTYKLCLRSFHSTARPSSETWEGEGFRGGQRIPLPEHGPSLPVRGWGLSPHPPLPYCSHGVGLVFAMPTSRTFFPNPLIFMEMD

SEQ ID NO: 876712 - protein, 1106 aa, Homo sapiens; identical to SEQ ID NO: 876707

SEQ ID NO: 876713 - protein, 901 aa, Homo sapiens
MRLPGAMPALALKGELLLLSLLLLLEPQISQGLVVTPPGPELVLNVSSTFVLTCSGSAPVVWERMSQEPPQEMAKAQDGTFSSVLTLTNLTGLDTGEYFCTHNDSRGLETDERKRLYIFVPDPTVGFLPNDAEELFIFLTEITEITIPCRVTDPQLVVTLHEKKGDVALPVPYDHQRGFSGIFEDRSYICKTTIGDREVDSDAYYVYRLQVSSINVSVNAVQTVVRQGENITLMCIVIGNEVVNFEWTYPRKESGRLVEPVTDFLLDMPYHIRSILHIPSAELEDSGTYTCNVTESVNDHQDEKAINITVVESGYVRLLGEVGTLQFAELHRSRTLQVVFEAYPPPTVLWFKDNRTLGDSSAGEIALSTRNVSETRYVSELTLVRVKVAEAGHYTMRAFHEDAEVQLSFQLQINVPVRVLELSESHPDSGEQTVRCRGRGMPQPNIIWSACRDLKRCPRELPPTLLGNSSEEESQLETNVTYWEEEQEFEVVSTLRLQHVDRPLSVRCTLRNAVGQDTQEVIVVPHSLPFKVVVISAILALVVLTIISLIILIMLWQKKPRYEIRWKVIESVSSDGHEYIYVDPMQLPYDSTWELPRDQLVLGRTLGSGAFGQVVEATAHGLSHSQATMKVAVKMLKSTARSSEKQALMSELKIMSHLGPHLNVVNLLGACTKGGPIYIITEYCRYGDLVDYLHRNKHTFLQHHSDKRRPPSAELYSNALPVGLPLPSHVSLTGESDGGYMDMSKDESVDYVPMLDMKGDVKYADIESSNYMAPYDNYVPSAPERTCRATLINESPVLSYMDLVGFSYQVANGMEFLASKNCVHRDLAARNVLICEGKLVKICDFGLARDIMRDSNYISKGSTFLPDFLIPPVAKGPFPAAFAFSSSSFFCSSFGFCLKAL

SEQ ID NO: 876714 - protein, 511 aa, Homo sapiens
MRLPGAMPALALKGELLLLSLLLLLEPQISQGLVVTPPGPELVLNVSSTFVLTCSGSAPVVWERMSQEPPQEMAKAQDGTFSSVLTLTNLTGLDTGEYFCTHNDSRGLETDERKRLYIFVPDPTVGFLPNDAEELFIFLTEITEITIPCRVTDPQLVVTLHEKKGDVALPVPYDHQRGFSGIFEDRSYICKTTIGDREVDSDAYYVYRLQVSSINVSVNAVQTVVRQGENITLMCIVIGNEVVNFEWTYPRKESGRLVEPVTDFLLDMPYHIRSILHIPSAELEDSGTYTCNVTESVNDHQDEKAINITVVESGYVRLLGEVGTLQFAELHRSRTLQVVFEAYPPPTVLWFKDNRTLGDSSAGEIALSTRNVSETRYVSELTLVRVKVAEAGHYTMRAFHEDAEVQLSFQLQINGDEHAPRHVPAPSPPCPRSLSLPALSTHPWEEWEREPGTQEMDSRPLTHCRVNLASGPQFPQLYKEAIWLDWCFQNFRHLGTKAMIFPSHIPLILYY

SEQ ID NO: 876715 - protein, 218 aa, Homo sapiens
MRLPGAMPALALKGELLLLSLLLLLEPQISQGLVVTPPGPELVLNVSSTFVLTCSGSAPVVWERMSQEPPQEMAKAQDGTFSSVLTLTNLTGLDTGEYFCTHNDSRGLETDERKRLYIFVPDPTVGFLPNDAEELFIFLTEITEITIPCRVTDPQLVVTLHEKKGDVALPVPYDHQRGFSGIFEDRSYICKTTIGDREVDSDAYYVYRLQGEPPFWPD

SEQ ID NO: 876716 - protein, 1106 aa, Homo sapiens; identical to SEQ ID NO: 876707

SEQ ID NO: 876717 - protein, 1251 aa, Homo sapiens
MLLSFSICVLFFKGKILILNLVLLTHRLCGLSRVWVPAHRECGVGHMRLTQTQTPRQVPSALSLIHSSVKWGFSLSHPSLEAGGPRPWAWFPKVGSEQAFLAPQSLALSRAGGCGAAGLLQGSGAEASHCLHHVLWLWLSAGTPSPPLRPQARIEAGVLCDRQLLEPRFQVQVSHDQAPGRRRADRVSKSVRARSEEKVEKREEEEEEEERKLEGTAARLKGEEEDQPKEEEEENKTNSQCRGEERVSSVPIPAELVAESSVPWAPCSPAPACHFPTEAMGPGVLLLLLVATAWHGQGIPVIEPSVPELVVKPGATVTLRCVGNGSVEWDGPPSPHWTLYSDGSSSILSTNNATFQNTGTYRCTEPGDPLGGSAAIHLYVKDPARPWNVLAQEVVVFEDQDALLPCLLTDPVLEAGVSLVRVRGRPLMRHTNYSFSPWHGFTIHRAKFIQSQDYQCSALMGGRKVMSISIRLKVQKVIPGPPALTLVPAELVRIRGEAAQIVCSASSVDVNFDVFLQHNNTKLAIPQQSDFHNNRYQKVLTLNLDQVDFQHAGNYSCVASNVQGKHSTSMFFRVVESAYLNLSSEQNLIQEVTVGEGLNLKVMVEAYPGLQGFNWTYLGPFSDHQPEPKLANATTKDTYRHTFTLSLPRLKPSEAGRYSFLARNPGGWRALTFELTLRYPPEVSVIWTFINGSGTLLCAASGYPQPNVTWLQCSGHTDRCDEAQVLQVWDDPYPEVLSQEPFHKVTVQSLLTVETLEHNQTYECRAHNSVGSGSWAFIPISAGAHTHPPDEFLFTPVVVACMSIMALLLLLLLLLLYKYKQKPKYQVRWKIIESYEGNSYTFIDPTQLPYNEKWEFPRNNLQFGKTLGAGAFGKVVEATAFGLGKEDAVLKVAVKMLKSTAHADEKEALMSELKIMSHLGQHENIVNLLGACTHGGPVLVITEYCCYGDLLNFLRRKAEAMLGPSLSPGQDPEGGVDYKNIHLEKKYVRRDSGFSSQGVDTYVEMRPVSTSSNDSFSEQDLDKEDGRPLELRDLLHFSSQVAQGMAFLASKNCIHRDVAARNVLLTNGHVAKIGDFGLARDIMNDSNYIVKGNARLPVKWMAPESIFDCVYTVQSDVWSYGILLWEIFSLGLNPYPGILVNSKFYKLVKDGYQMAQPAFAPKNIYSIMQACWALEPTHRPTFQQICSFLQEQAQEDRRERDYTNLPSSSRSGGSGSSSSELEEESSSEHLTCCEQGDIAQPLLQPNNYQFC

SEQ ID NO: 876718 - protein, 972 aa, Homo sapiens
MGPGVLLLLLVATAWHGQGIPVIEPSVPELVVKPGATVTLRCVGNGSVEWDGPPSPHWTLYSDGSSSILSTNNATFQNTGTYRCTEPGDPLGGSAAIHLYVKDPARPWNVLAQEVVVFEDQDALLPCLLTDPVLEAGVSLVRVRGRPLMRHTNYSFSPWHGFTIHRAKFIQSQDYQCSALMGGRKVMSISIRLKVQKVIPGPPALTLVPAELVRIRGEAAQIVCSASSVDVNFDVFLQHNNTKLAIPQQSDFHNNRYQKVLTLNLDQVDFQHAGNYSCVASNVQGKHSTSMFFRVVESAYLNLSSEQNLIQEVTVGEGLNLKVMVEAYPGLQGFNWTYLGPFSDHQPEPKLANATTKDTYRHTFTLSLPRLKPSEAGRYSFLARNPGGWRALTFELTLRYPPEVSVIWTFINGSGTLLCAASGYPQPNVTWLQCSGHTDRCDEAQVLQVWDDPYPEVLSQEPFHKVTVQSLLTVETLEHNQTYECRAHNSVGSGSWAFIPISAGAHTHPPDEFLFTPVVVACMSIMALLLLLLLLLLYKYKQKPKYQVRWKIIESYEGNSYTFIDPTQLPYNEKWEFPRNNLQFGKTLGAGAFGKVVEATAFGLGKEDAVLKVAVKMLKSTAHADEKEALMSELKIMSHLGQHENIVNLLGACTHGGPVLVITEYCCYGDLLNFLRRKAEAMLGPSLSPGQDPEGGVDYKNIHLEKKYVRRDSGFSSQGVDTYVEMRPVSTSSNDSFSEQDLDKEDGRPLELRDLLHFSSQVAQGMAFLASKNCIHRDVAARNVLLTNGHVAKIGDFGLARDIMNDSNYIVKGNARLPVKWMAPESIFDCVYTVQSDVWSYGILLWEIFSLGLNPYPGILVNSKFYKLVKDGYQMAQPAFAPKNIYSIMQACWALEPTHRPTFQQICSFLQEQAQEDRRERDYTNLPSSSRSGGSGSSSSELEEESSSEHLTCCEQGDIAQPLLQPNNYQFC

SEQ ID NO: 876719 - protein, 1106 aa, Homo sapiens; identical to SEQ ID NO: 876707

SEQ ID NO: 876720 - protein, 342 aa, Homo sapiens [sequence omitted]

SEQ ID NO: 876721 - protein, 1106 aa, Homo sapiens; identical to SEQ ID NO: 876707

SEQ ID NO: 876722 - protein, 1106 aa, Homo sapiens; identical to SEQ ID NO: 876707

SEQ ID NO: 876723 - protein, 1086 aa, Homo sapiens
MRLPGAMPALALKGELLLLSLLLLLEPQISQGLVVTPPGPELVLNVSSTFVLTCSGSAPVVWERMSQEPPQEMAKAQDGTFSSVLTLTNLTGLDTGEYFCTHNDSRGLETDERKRLYIFVPDPTVGFLPNDAEELFIFLTEITEITIPCRVTDPQLVVTLHEKKGDVALPVPYDHQRGFSGIFEDRSYICKTTIGDREVDSDAYYVYRLQVSSINVSVNAVQTVVRQGENITLMCIVIGNEVVNFEWTYPRKESGRLVEPVTDFLLDMPYHIRSILHIPSAELEDSGTYTCNVTESVNDHQDEKAINITVVESGYVRLLGEVGTLQFAELHRSRTLQVVFEAYPPPTVLWFKDNRTLGDSSAGEIALSTRNVSETRYVSELTLVRVKVAEAGHYTMRAFHEDAEVQLSFQLQINVPVRVLELSESHPDSGEQTVRCRGRGMPQPNIIWSACRDLKRCPRELPPTLLGNSSEEESQLETNVTYWEEEQEFEVVSTLRLQHVDRPLSVRCTLRNAVGQDTQEVIVVPHSLPFKVVVISAILALVVLTIISLIILIMLWQKKPRYEIRWKVIESVSSDGHEYIYVDPMQLPYDSTWELPRDQLVLGRTLGSGAFGQVVEATAHGLSHSQATMKVAVKMLKSTARSSEKQALMSELKIMSHLGPHLNVVNLLGACTKGGPIYIITEYCRYGDLVDYLHRNKHTFLQHHSDKRRPPSAELYSNALPVGLPLPSHVSLTGESDGGYMDMSKDESVDYVPMLDMKGDVKYADIESSNYMAPYDNYVPSAPERTCRATLINESPVLSYMDLVGFSYQVANGMEFLASKNCVHRDLAARNVLICEGKLVKICDFGLARDIMRDSNYISKGSTFLPLKWMAPESIFNSLYTTLSDVWSFGILLWEIFTLGGTPYPELPMNEQFYNAIKRGYRMAQPAHASDEIYEIMQKCWEEKFEIRPPFSQLVLLLERLLGEGYKKKYQQVDEEFLRSDHPAILRSQARLPGFHGLRSPLDTSSVLYTAVQPNEGDNDYIIPLPDPKPEVADEGPLEGSPSLASSTLNEVNTSSTISCDSPLEPQDDPITSLTQVPRSTFVYVS

SEQ ID NO: 876724 - protein, 766 aa, Homo sapiens
MRLPGAMPALALKGELLLLSLLLLLEPQISQGLVVTPPGPELVLNVSSTFVLTCSGSAPVVWERMSQEPPQEMAKAQDGTFSSVLTLTNLTGLDTGEYFCTHNDSRGLETDERKRLYIFVPDPTVGFLPNDAEELFIFLTEITEITIPCRVTDPQLVVTLHEKKGDVALPVPYDHQRGFSGIFEDRSYICKTTIGDREVDSDAYYVYRLQVSSINVSVNAVQTVVRQGENITLMCIVIGNEVVNFEWTYPRKESGRLVEPVTDFLLDMPYHIRSILHIPSAELEDSGTYTCNVTESVNDHQDEKAINITVVESGYVRLLGEVGTLQFAELHRSRTLQVVFEAYPPPTVLWFKDNRTLGDSSAGEIALSTRNVSETRYVSELTLVRVKVAEAGHYTMRAFHEDAEVQLSFQLQINVPVRVLELSESHPDSGEQTVRCRGRGMPQPNIIWSACRDLKRCPRELPPTLLGNSSEEESQLETNVTYWEEEQEFEVVSTLRLQHVDRPLSVRCTLRNAVGQDTQEVIVVPHSLPFKVVVISAILALVVLTIISLIILIMLWQKKPRYEIRWKVIESVSSDGHEYIYVDPMQLPYDSTWELPRDQLVLGRTLGSGAFGQVVEATAHGLSHSQATMKVAVKMLKSTARSSEKQALMSELKIMSHLGPHLNVVNLLGACTKGGPIYIITEYCRYGDLVDYLHRNKHTFLQHHSDKRRPPSAELYSNALPVGLPLPSHVSLTGESGVGCSQRRWMQSAALDAVCGVGCSQRRWIQ

SEQ ID NO: 876725 - protein, 116 aa, Homo sapiens
PCPQPNFNLSSGNSMAGTVPRPEAPPHRLASFGIQLVPCPQGPAPDGHPYAESGYVRLLGEVGTLQFAELHRSRTLQVVFEAYPPPTVLWFKDNRTLGDSSAGEIALSTRNVSETR

SEQ ID NO: 876726 - protein, 1106 aa, Homo sapiens [sequence omitted]

SEQ ID NO: 876727 - protein, 1106 aa, Homo sapiens [sequence omitted]

SEQ ID NO: 876728 - protein, 1106 aa, Homo sapiens [sequence omitted]

SEQ ID NO: 876729 - protein, 972 aa, Homo sapiens [sequence omitted]

SEQ ID NO: 876730 - protein, 972 aa, Homo sapiens [sequence omitted]

SEQ ID NO: 876731 - protein, 76 aa, Homo sapiens
MPTRYASGHYQRVLWVAKLPLVVNHKHFHPGDFTDMKLAGEGPRWPGHTHPVPAAQRECPPRTWGTEKHLRYVGDE

SEQ ID NO: 876732 - protein, 231 aa, Homo sapiens
TTLTISGRFFDQTDFPVRVLVGGEPCDILNVTENSICCKTPPKPHILKTVYPGGRGLKLEVWNNSRPIRLEEILEYNEKTPGYMGASWVDSASYIWLMEQDTFVARFSGFLVAPDSDVYRFYIKGDDRYAIYFSQTGLPEDKVRIAYHSANANSYFSSPTQRSDDIHLQKGKEYYIEILLQEYRLSAFVDVGLYQYRNVYTEQQTGDAVNEEQVIKSQSTILQEVQVCYDC

SEQ ID NO: 876733 - protein, 112 aa, Homo sapiens
MGTGKSSSFFAEPAGCGHQNESGPSRCQGLDLPPCIRQAAHTPRKSARSLRQSDSRAQRPTRDALKEVTFRGCYSQTRPSSTRRIYVGSDPCKHRRDRASGWEHATVPPTAT

SEQ ID NO: 876734 - protein, 119 aa, Homo sapiens
MPHCGPPTLRPPAPTSVIVLMSSPSHFQPLPSIPGALTQDPTWSRDAGSPPWGLVLAHPAGIAHRLPDTPPEGGTRFSAAAFTAAPAPSAGPPSSLCTLLAEGWETLQDIPTLPHAAKL

SEQ ID NO: 876735 - protein, 415 aa, Homo sapiens
MTKNDPFKARVSSGYVPPPVATPFSSKSSTKPAAGGTAPLPPWKSPSSSQPLPQVPAPAQSQTQFHVQPQPQPKPQVQLHVQSQTQPVSLANTQPRGPPASSPAPAPKFSPVTPKFTPVASKFSPGAPGGSGSQPNQKLGHPEALSAGTGSPQPPSFTYAQQREKPRVQEKQHPVPPPAQNQNQVRSPGAPGPLTLKEVEELEQLTQQLMQDMEHPQRQNVAVNELCGRCHQPLARAQPAVRALGQLFHIACFTCHQCAQQLQGQQFYSLEGAPYCEGCYTDTLEKCNTCGEPITDRMLRATGKAYHPHCFTCVVCARPLEGTSFIVDQANRPHCVPDYHKQYAPRCSVCSEPIMPEPGRDETVRVVALDKNFHMKCYKCEDCGKPLSIEADDNGCFPLDGHVLCRKCHTARAQT

SEQ ID NO: 876736 - protein, 415 aa, Homo sapiens; identical to SEQ ID NO: 876735

SEQ ID NO: 876737 - protein, 415 aa, Homo sapiens; identical to SEQ ID NO: 876735

SEQ ID NO: 876738 - protein, 587 aa, Homo sapiens
MREETVRVFALDKNFHMKCYKCEDCGKPLSIEADDNGCFPLDGHVLCRKCHTARAQTCVRTGPLQTAVHAPLWTTHTETTCPAEDFPLPPPPLAGDGDDAEGALGGAFPPPPPPIEESFPPAPLEEEIFPSPPPPPEEEGGPEAPIPPPPQPREKVSSIDLEIDSLSSLLDDMTKNDPFKARVSSGYVPPPVATPFSSKSSTKPAAGGTAPLPPWKSPSSSQPLPQVPAPAQSQTQFHVQPQPQPKPQVQLHVQSQTQPVSLANTQPRGPPASSPAPAPKFSPVTPKFTPVASKFSPGAPGGSGSQPNQKLGHPEALSAGTGSPQPPSFTYAQQREKPRVQEKQHPVPPPAQNQNQVRSPGAPGPLTLKEVEELEQLTQQLMQDMEHPQRQNVAVNELCGRCHQPLARAQPAVRALGQLFHIACFTCHQCAQQLQGQQFYSLEGAPYCEGCYTDTLEKCNTCGEPITDRMLRATGKAYHPHCFTCVVCARPLEGTSFIVDQANRPHCVPDYHKQYAPRCSVCSEPIMPEPGRDETVRVVALDKNFHMKCYKCEDCGKPLSIEADDNGCFPLDGHVLCRKCHTARAQT

SEQ ID NO: 876739 - protein, 415 aa, Homo sapiens; identical to SEQ ID NO: 876735

SEQ ID NO: 876740 - protein, 441 aa, Homo sapiens
MAAPRPSPAISVSVSAPAFYASLLDDMTKNDPFKARVSSGYVPPPVATPFSSKSSTKPAAGGTAPLPPWKSPSSSQPLPQVPAPAQSQTQFHVQPQPQPKPQVQLHVQSQTQPVSLANTQPRGPPASSPAPAPKFSPVTPKFTPVASKFSPGAPGGSGSQPNQKLGHPEALSAGTGSPQPPSFTYAQQREKPRVQEKQHPVPPPAQNQNQVRSPGAPGPLTLKEVEELEQLTQQLMQDMEHPQRQNVAVNELCGRCHQPLARAQPAVRALGQLFHIACFTCHQCAQQLQGQQFYSLEGAPYCEGCYTDTLEKCNTCGEPITDRMLRATGKAYHPHCFTCVVCARPLEGTSFIVDQANRPHCVPDYHKQYAPRCSVCSEPIMPEPGRDETVRVVALDKNFHMKCYKCEDCGKPLSIEADDNGCFPLDGHVLCRKCHTARAQT

SEQ ID NO: 876741 - protein, 398 aa, Homo sapiens
MTKNDPFKARVSSGYVPPPVATPFSSKSSTKPAAGGTAPLPPWKSPSSSQPLPQVPAPAQSQTQFHVQSQTQPVSLANTQPRGPPASSPAPAPKFSPVTPKFTPVASKFSPGAPGGSGSQPNQKLGHPEALSAGTGSPQPPSFTYAQQREKPRVQEKQHPVPPPVRTKTRCAPWGPRSPDSEGGGGAGAVTSSYAGHGASQRQMWLSTNSADDAKTLARAQPAVRALGQLFHIACFTCHQCAQQLQGQQFYSLEGAPYCEGCYTDTLEKCNTCGEPITDRMLRATGKAYHPHCFTCVVCARPLEGTSFIVDQANRPHCVPDYHKQYAPRCSVCSEPIMPEPGRDETVRVVALDKNFHMKCYKCEDCGKPLSIEADDNGCFPLDGHVLCRKCHTARAQT

SEQ ID NO: 876742 - protein, 415 aa, Homo sapiens; identical to SEQ ID NO: 876735

SEQ ID NO: 876743 - protein, 190 aa, Homo sapiens
HASADRVGLARAQPAVRALGQLFHIACFTCHQCAQQLQGQQFYSLEGAPYCEGCYTDTLEKCNTCGEPITDRMLRATGKAYHPHCFTCVVCARPLEGTSFIVDQANRPHCVPDYHKQYAPRCSVCSEPIMPEPGRDETVRVVALDKNFHMKCYKCEDCGKPLSIEADDNGCFPLDGHVLCRKCHTARAQT

SEQ ID NO: 876744 - protein, 244 aa, Homo sapiens
RSSTYFLLFTAVFSGLPRTLRPMPSTPGPGAASRPRSRAAVPHRLLHLPPVCAAAPGPAVLQSGGGAVLRGLLHCESGCAGLCWAVLGSRALEACCGVPVPCQPPPAASSDTLEKCNTCGEPITDRMLRATGKAYHPHCFTCVVCARPLEGTSFIVDQANRPHCVPDYHKQYAPRCSVCSEPIMPEPGRDETVRVVALDKNFHMKCYKCEDCGKPLSIEADDNGCFPLDGHVLCRKCHTARAQT

SEQ ID NO: 876745 - protein, 127 aa, Homo sapiens
MAAPRPSPAISVSVSAPAFYAPQKKFGPVVAPKPKVNPFRPGDSEPPPAPGAQRAQMGRVGEIPPPPRGRLSPASTSPCWGWRRCRGCSGRCLPAAPSPDRGIISPCASGGGDLPFPAASSGGGGRA

SEQ ID NO: 876746 - protein, 119 aa, Homo sapiens; identical to SEQ ID NO: 876734

SEQ ID NO: 876747 - protein, 135 aa, Homo sapiens
MTKNDPFKARVSSGYVPPPVATPFSSKSSTKPAAGGTAPLPPWKSPSSSQPLPQVPAPAQSQTQFHVQPQPQPKPQVQLHVQSQTPPEGGTRFSAAAFTAAPAPSAGPPSSLCTLLAEGWETLQDIPTLPHAAKL

SEQ ID NO: 876748 - protein, 211 aa, Homo sapiens
MCPHQWPLHSVPSPVPSLQPGAQHPCLLGSPLPAPSLCPRFRLRLRARHSSMFSPSPSPSLRSNSMSSPRPSLCLWLTPSPVPPPAQNQNQVRSPGAPGPLTLKEVEELEQLTQQLMQDMEHPQRQNVAVNELCGRCHQPPSFTMPSRGRSPECRRSSTPCPLEGTSFIVDQANRPHCVPDYHKQYAPRCSVCSEPIMLSWREETSMAPDR

SEQ ID NO: 876749 - protein, 219 aa, Homo sapiens
MITHVRSSVLISYGGVVPFSVSGLVVLTVTQSLRTRRRGGHPRRGAHAPACAARPGHGGPPPVSRDLRFGLGSGFLRPAEEVRPCGGPKAQSESLPARGQRASPGTRGPARTDGPGGRDSPAAPPEDFLPCRPSFPRCWSDWLSRVTRCGDSEWRGVAFPRHDALLRLNYVRRYTSSSLMHVILAQRSALVNPIMHTGETVSAQRKGSEYRHRQNRADQ

SEQ ID NO: 876750 - protein, 119 aa, Homo sapiens; identical to SEQ ID NO: 876734

SEQ ID NO: 876751 - protein, 259 aa, Homo sapiens
MAAPRPSPAISVSVSAPAFYAPQKKFGPVVAPKPKVNPFRPGDSEPPPAPGAQRAQMGRVGEIPPPHDDPRKDYACLDSTVLGMPDDADGDSCEGLHVCARNYARGHVLHLLARRSLTLDVGPIFASWLTSAPVFRASWFFHSFWWGNWFWVHLPVMATSLRLIDAKKSKLEFSIYPSTPRFAQLIARALQLRSFTTQSSLEHSDCAFMGRTMRPMYDTRVVATSHFERQTLTTLIDLIRHIGLSTNASRRLRTPKGPE

SEQ ID NO: 876752 - protein, 415 aa, Homo sapiens; identical to SEQ ID NO: 876735

SEQ ID NO: 876753 - protein, 520 aa, Homo sapiens
LHHSSAVRPAFPDLPAEDFPLPPPPLAGDGDDAEGALGGAFPPPPPPIEESFPPAPLEEEIFPSPPPPPEEEGGPEAPIPPPPQPREKVSSIDLEIDSLSSLLDDMTKNDPFKARVSSGYVPPPVATPFSSKSSTKPAAGGTAPLPPWKSPSSSQPLPQVPAPAQSQTQFHVQPQPQPKPQVQLHVQSQTQPVSLANTQPRGPPASSPAPAPKFSPVTPKFTPVASKFSPGAPGGSGSQPNQKLGHPEALSAGTGSPQPPSFTYAQQREKPRVQEKQHPVPPPAQNQNQVRSPGAPGPLTLKEVEELEQLTQQLMQDMEHPQRQNVAVNELCGRCHQPLARAQPAVRALGQLFHIACFTCHQCAQQLQGQQFYSLEGAPYCEGCYTDTLEKCNTCGEPITDRMLRATGKAYHPHCFTCVVCARPLEGTSFIVDQANRPHCVPDYHKQYAPRCSVCSEPIMPEPGRDETVRVVALDKNFHMKCYKCEDCGKPLSIEADDNGCFPLDGHVLCRKCHTARAQT

SEQ ID NO: 876754 - protein, 415 aa, Homo sapiens; identical to SEQ ID NO: 876735

SEQ ID NO: 876755 - protein, 415 aa, Homo sapiens; identical to SEQ ID NO: 876735

SEQ ID NO: 876756 - protein, 412 aa, Homo sapiens
MTKNDPFKARVSSGYVPPPVATPFSSKSSTKPAAGGTAPLPPWKSPSSSQPLPQVPAPAQSQTQFHVQPQPQPKPQVQLHVQSQTQPVSLANTQPRGPPASSPAPAPKFSPVTPKFTPVASKFSPGAPGGSGSQPNQKLGHPEALSAGTGSPQPPSFTYAQQREKPRVQEKQHPVPPPVRTKTRCAPWGPRSPDSEGGGGAGAVTSSYAGHGASQRQMWLSTNSADDAKTLARAQPAVRALGQLFHIACFTCHQCAQQLQGQQFYSLEGAPYCEGCYTDTLEKCNTCGEPITDRMLRATGKAYHPHCFTCVVCARPLEGTSFIVDQANRPHCVPDYHKQYAPRCSVCSEPIMPEPGRDETVRVVALDKNFHMKCYKCEDCGKPLSIEADDNGCFPLDGHVLCRKCHTARAQT

SEQ ID NO: 876757 - protein, 440 aa, Homo sapiens
GRVGDHEPREKVSSIDLEIDSLSSLLDDMTKNDPFKARVSSGYVPPPVATPFSSKSSTKPAAGGTAPLPPWKSPSSSQPLPQVPAPAQSQTQFHVQPQPQPKPQVQLHVQSQTQPVSLANTQPRGPPASSPAPAPKFSPVTPKFTPVASKFSPGAPGGSGSQPNQKLGHPEALSAGTGSPQPPSFTYAQQREKPRVQEKQHPVPPPVRTKTRCAPWGPRSPDSEGGGGAGAVTSSYAGHGASQRQMWLSTNSADDAKTLARAQPAVRALGQLFHIACFTCHQCAQQLQGQQFYSLEGAPYCEGCYTDTLEKCNTCGEPITDRMLRATGKAYHPHCFTCVVCARPLEGTSFIVDQANRPHCVPDYHKQYAPRCSVCSEPIMPEPGRDETVRVVALDKNFHMKCYKCEDCGKPLSIEADDNGCFPLDGHVLCRKCHTARAQT

SEQ ID NO: 876758 - protein, 120 aa, Homo sapiens
MCPHQWPLHSVPSPVPSLQPGAQHPCLLGSPLPAPNRPHCVPDYHKQYAPRCSVCSEPIMPEPGRDETVRVVALDKNFHMKCYKCEDCGKPLSIEADDNGCFPLDGHVLCRKCHTARAQT

SEQ ID NO: 876759 - protein, 391 aa, Homo sapiens
MTKNDPFKARVSSGYVPPPVATPFSSKSSTKPAAGGTAPLPPWKSPSSSQPLPQVPAPAQSQTQFHVQPQPQPKPQVQLHVQSQTQPVSLANTQPRGPPASSPAPAPKFSPVTPKFTPVASKFSPGAPGGSGSQPNQKLGHPEALSAGTGSPQPPSFTYAQQREKPRVQEKQHPVPPPAQNQNQVRSPGAPGPLTLKEVEELEQLTQQLMQDMEHPQRQNVAVNELCGRCHQPLARAQPAVRALGQLFHIACFTCHQCAQQLQGQQFYSLEGAPYCEGCYTDTLEKCNTCGEPITDRMLRATGKAYHPHCFTCVVCARPLEGTSFIVDQANRPHCVPDYHKQYAPRCSVCSEPIMPEPGRDGLGNVAPWHDFHWMFHVSWGALSVSLIRLS

SEQ ID NO: 876760 - protein, 119 aa, Homo sapiens; identical to SEQ ID NO: 876734

SEQ ID NO: 876761 - protein, 115 aa, Homo sapiens
MLHQDENTPPHLYTPTPASVVPMIKQDTPTPDHQASKMVQETYAKLQNQHHKRNQKSEQYSTEDRSEQGLSVIKSRHDNHHSDRLETTYQYTDDKKVIDDKSKKIDKDSQIRHTK

SEQ ID NO: 876762 - protein, 97 aa, Homo sapiens
LLDDMTKNDPFKARVRDRRVGKAGLRARETGHRTKEDGVLLTASLFPLPPLAGVIWICAPTSGHSIQFQVQYQACSRGHSTPASLEVPFQLPASAPG

SEQ ID NO: 876763 - protein, 212 aa, Homo sapiens
MDLRQFLMCLSLCTAFALSKPTEKKDRVHHEPQLSDKVHNDAQSFDYDHDAFLGAEEAKTFDQLTPEESKERLGKIVSKIDGDKDGFVTVDELKDWIKFAQKRWIYEDVERQWKGHDLNEDGLVSWEEYKNATYGYVLDDPDPDDGFNYKQMMVRDERRFKMADKDGDLIATKEEFTAFLHPEEYDYMKDIVVQETIGRILLENPKGFIGPK

SEQ ID NO: 876764 - protein, 303 aa, Homo sapiens
MDLRQFLMCLSLCTAFALSKPTEKKDRVHHEPQLSDKVHNDAQSFDYDHDAFLGAEEAKTFDQLTPEESKERLGKIVSKIDGDKDGFVTVDELKDWIKFAQKRWIYEDVERQWKGHDLNEDGLVSWEEYKNATYGYVLDDPDPDDGFNYKQMMVRDERRFKMADKDGDLIATKEEFTAFLHPEEYDYMKDIVVQETLERSRKGIADGCIDLEEYDGDSYQNEGHYDEPERVKTQQERGSDEMKNREGKRTETTTQDSPAPDREGNTGPGCDSTKKEEAKEERTMNNGQRHNSAKQHARTDPTK

SEQ ID NO: 876765 - protein, 315 aa, Homo sapiens
MDLRQFLMCLSLCTAFALSKPTEKKDRVHHEPQLSDKVHNDAQSFDYDHDAFLGAEEAKTFDQLTPEESKERLGKIVSKIDGDKDGFVTVDELKDWIKFAQKRWIYEDVERQWKGHDLNEDGLVSWEEYKNATYGYVLDDPDPDDGFNYKQMMVRDERRFKMADKDGDLIATKEEFTAFLHPEEYDYMKDIVVQETMEDIDKNADGFIDLEEYIGDMYSHDGNTDEPEWVKTEREQFVEFRDKNRDGKMDKEETKDWILPSDYDHAEAEARHLVYESDQNKDGKLTKEEIVDKYDLFVGSQATDFGEALVRHDEF

SEQ ID NO: 876766 - protein, 315 aa, Homo sapiens; identical to SEQ ID NO: 876765

SEQ ID NO: 876767 - protein, 315 aa, Homo sapiens
MDLRQFLMCLSLCTAFALSKPTEKKDRVHHEPQLSDKVHNDAQSFDYDHDAFLGAEEAKTFDQLTPEESKERLGMIVDKIDADKDGFVTEGELKSWIKHAQKKYIYDNVENQWQEFDMNQDGLISWDEYRNVTYGTYLDDPDPDDGFNYKQMMVRDERRFKMADKDGDLIATKEEFTAFLHPEEYDYMKDIVVQETMEDIDKNADGFIDLEEYIGDMYSHDGNTDEPEWVKTEREQFVEFRDKNRDGKMDKEETKDWILPSDYDHAEAEARHLVYESDQNKDGKLTKEEIVDKYDLFVGSQATDFGEALVRHDEF

SEQ ID NO: 876768 - protein, 315 aa, Homo sapiens; identical to SEQ ID NO: 876765

SEQ ID NO: 876769 - protein, 315 aa, Homo sapiens; identical to SEQ ID NO: 876765

SEQ ID NO: 876770 - protein, 353 aa, Homo sapiens
GAVNGGERMCCPRGGFDDQYPQLIIVPDNRNEMLPDSLCHQTVYDLCRPYPHSRDRRTRCYQYTRVRRRCSSSNGYHYDGSYFDYDHDAFLGAEEAKTFDQLTPEESKERLGMIVDKIDADKDGFVTEGELKSWIKHAQKKYIYDNVENQWQEFDMNQDGLISWDEYRNVTYGTYLDDPDPDDGFNYKQMMVRDERRFKMADKDGDLIATKEEFTAFLHPEEYDYMKDIVVQETMEDIDKNADGFIDLEEYIGDMYSHDGNTDEPEWVKTEREQFVEFRDKNRDGKMDKEETKDWILPSDYDHAEAEARHLVYESDQNKDGKLTKEEIVDKYDLFVGSQATDFGEALVRHDEF

SEQ ID NO: 876771 - protein, 315 aa, Homo sapiens; identical to SEQ ID NO: 876765

SEQ ID NO: 876772 - protein, 315 aa, Homo sapiens; identical to SEQ ID NO: 876765

SEQ ID NO: 876773 - protein, 161 aa, Homo sapiens
MDLRQFLMCLSLCTAFALSKPTEKKDRVHHEPQLSDKVHNDAQSFDYDHDAFLGAEEAKTFDQLTPEESKERLGMIVDKIDADKDGFVTEGELKSWIKHAQKKYIYDNVENQWQEFDMNQDGLISWDEYRNVTYGTYLGKGQDVSLAGTVVLSQRNKWVTQ

SEQ ID NO: 876774 - protein, 200 aa, Homo sapiens
MDLRQFLMCLSLCTAFALSKPTEKKDRVHHEPQLSDKVHNDAQSFDYDHDAFLGAEEAKTFDQLTPEESKERLGKIVSKIDGDKDGFVTVDELKDWIKFAQKRWIYEDVERQWKGHDLNEDGLVSWEEYKNATYGYVLDDPDPDDGFNYKQMMVRDERRFKMADKDGDLIATKEEFTAFLHPEEYDYMKDIVVQGNNGKI

SEQ ID NO: 876775 - protein, 315 aa, Homo sapiens; identical to SEQ ID NO: 876765

SEQ ID NO: 876776 - protein, 315 aa, Homo sapiens; identical to SEQ ID NO: 876765

SEQ ID NO: 876777 - protein, 315 aa, Homo sapiens; identical to SEQ ID NO: 876765

SEQ ID NO: 876778 - protein, 297 aa, Homo sapiens
MDLRQFLMCLSLCTAFALSKPTEKKDRVHHEPQLSDKVHNDAQSFDYDHDAFLGAEEAKTFDQLTPEESKERLGKIVSKIDGDKDGFVTVDELKDWIKFAQKRWIYEDVERQWKGHDLNEDGLVSWEEYKNATYGYVLDDPDPDDGFNYKQMMVRDERRFFLHPEEYDYMKDIVVQETMEDIDKNADGFIDLEEYIGDMYSHDGNTDEPEWVKTEREQFVEFRDKNRDGKMDKEETKDWILPSDYDHAEAEARHLVYESDQNKDGKLTKEEIVDKYDLFVGSQATDFGEALVRHDEF

SEQ ID NO: 876779 - protein, 262 aa, Homo sapiens
MDLRQFLMCLSLCTAFALSKPTEKKDRVHHEPQLSDKVHNDAQSFDYDHDAFLGAEEAKTFDQLTPEESKERLGKIVSKIDGDKDGFVTVDELKDWIKFAQKRWIYEDVERQWKGHDLNEDGLVSWEEYKNATYGYVLDDPDPDDGFNYKQMMVRDERRFKMADKDGDLIATKEEFTAFLHPEEYDYMKDIVVQETMEDIDKNADGFIDLEEYIGDMYSHDGNTDEPEWVKTEREQFVEFRDKNRDGKMDKEGDCYYKLFKT

SEQ ID NO: 876780 - protein, 315 aa, Homo sapiens; identical to SEQ ID NO: 876765

SEQ ID NO: 876781 - protein, 315 aa, Homo sapiens; identical to SEQ ID NO: 876765

SEQ ID NO: 876782 - protein, 315 aa, Homo sapiens; identical to SEQ ID NO: 876765

SEQ ID NO: 876783 - protein, 104 aa, Homo sapiens
MDLRQFLMCLSLCTAFALSKPTEKKDRVHHEPQLSDKVHNDAQSFDYDHDAFLGAEEAKTFDQLTPEESKERLGEDVSKIDGDKPVLVSDTSSRVEVEGPFEES

SEQ ID NO: 876784 - protein, 109 aa, Homo sapiens
MPRISGMVCVQTKPCHFSSVGAQRGNAPPAPSTEILPIHQTIPLLIFLPPGASDSRKSDWREHTLRCTLSSSIEPGVTLRDSGHLTRLYQEQRLQLVESTGCREMVTRK

SEQ ID NO: 876785 - protein, 125 aa, Homo sapiens
MESSGSHSTTVKIHGSHDGAKIPMCLPLSLWPPPRLLPQPQIVPWPHEAALELKSHSLVMIIRERSSQGLPGPQRRGTEHKEAGGHAWGLGTSPGRVIYGLDLLSAAALLMENIKIICCCRQCEG

SEQ ID NO: 876786 - protein, 84 aa, Homo sapiens
EGDAKGDKAKVKDEPQRRSARLSAKPAPPKPEPKPRKSPVKKGEKVPKGKKGKADAGKEGNNPAENGDAKTDQAQKAEGAGDAK

SEQ ID NO: 876787 - protein, 70 aa, Homo sapiens
PGGVLLQRQLPGEKELNAQGTEVQGMPPGPGTHGAPESPILQQKGLTGLGQYLLPNTGHGLTKKLGACAL

SEQ ID NO: 876788 - protein, 292 aa, Homo sapiens
MSISLSSLILLPIWINMAQIQQGGPDEKEKTTALKDLLSRIDLDELMKKDEPPLDFPDTLEGFEYAFNEKGQLRHIKTGEPFVFNYREDLHRWNQKRYEALGEIITKYVYELLEKDCNLKKVSIPVDATESEPKSFIFMSEDALTNPQKLMVLIHGSGVVRAGQWARRLIINEDLDSGTQIPFIKRAVAEGYGVIVLNPNENYIEVEKPKIHVQSSSDSSDEPAEKRERKDKVSKETKKRRDFYEKYRNPQREKEMMQLYIRVSEITTFLYYFLYLVYILLYVDCFVFLQEY

SEQ ID NO: 876789 - protein, 221 aa, Homo sapiens
NLVGARIPRGKVITTARGSSTGELEGHASSRLPPQPCGWGQSSDLLSRIDLDELMKKDEPPLDFPDTLEGFEYAFNEKGQLRHIKTGEPFVFNYREDLHRWNQKRYEALGEIITKYVYELLEKDCNLKKVSIPVDATESEPKSFIFMSEDALTNPQKLMVLIHGSGVVRAGQWARRLIINEDLDSGTQIPFIKRAVAENGSPEEHAIYVGIIFIAQAAAEN

SEQ ID NO: 876790 - protein, 209 aa, Homo sapiens
MNRLLIFLIPWKDLNMLLMKIITKYVYELLEKDCNLKKVSIPVDATESEPKSFIFMSEDALTNPQKLMVLIHGSGVVRAGQWARRLIINEDLDSGTQIPFIKRAVAEGYGVIVLNPNENYIEVEKPKIHVQSSSDSSDEPAEKRERKDKVSKETKKRRDFYEKYRNPQREKEMMQLYIRVSEITTFLYYFLYLVYILLYVDCFVFLQEY

SEQ ID NO: 876791 - protein, 300 aa, Homo sapiens
NLVGARIPRGKVITTARGSSTGELEGHASSRLPPQPCGWGQSSDLLSRIDLDELMKKDEPPLDFPDTLEGFEYAFNEKGQLRHIKTGEPFVFNYREDLHRWNQKRYEALGEIITKYVYELLEKDCNLKKVSIPVDATESEPKSFIFMSEDALTNPQKLMVLIHGSGVVRAGQWARRLIINEDLDSGTQIPFIKRAVAEGYGVIVLNPNENYIEVEKPKIHVQSSSDSSDEPAEKRERKDKVSKETKKRRDFYEKYRNPQREKEMMQLYIRVSEITTFLYYFLYLVYILLYVDCFVFLQEY

SEQ ID NO: 876792 - protein, 112 aa, Homo sapiens [sequence omitted]

SEQ ID NO: 876793 - protein, 105 aa, Homo sapiens
MAPRWPCVCCDTCGWRPSIWLWQCLVRAALPLDPGKWHPRPCILMAACWSLLAMPTPTGARGLWSQHTPTSQSAGPSQACFPRGPLGACVSVPGPEMWPSSGHLP

SEQ ID NO: 876794 - protein, 70 aa, Homo sapiens
VEAEPRHSRNPARFVQAQGSADVPAPCHLRPLQTFGSDEHKREVEVGLRVAQHWPEGTPQLEQPQQCGHS

SEQ ID NO: 876795 - protein, 130 aa, Homo sapiens
AFPACPPLLSGLSSGAPSALHHMFIQSVSPQILKWLCYQPGTTLNTEFSFPNQRPQLETSEVPSSFNLVSPTWALPSALQPTSTYPAPPHTIPYFHSLSLPASGFSSLHATPACPAEHSSPPCWLLWTHL

SEQ ID NO: 876796 - protein, 123 aa, Homo sapiens
FLCPFRTTPTPAFQLLMLAGLSQTARAPTPNKEEGQALGGRLQADRQHLRPRYLGTPQKSAEQASRHFREPAGPAPFAVADQLPPEDRTLQRRAGSEPQLFLSATALSKMRTSTASCRSTWRM

SEQ ID NO: 876797 - protein, 349 aa, Homo sapiens
EGTVSAKRLLVGTCLVASEGACRWLWLKQAPARVCRRETAMDDQGCPRCKTTKYRNPSLKLMVNVCGHTLCESCVDLLFVRGAGNCPECGTPLRKSNFRVQLFEDPTVDKEVEIRKKVLKIYNKREEDFPSLREYNDFLEEVEEIVFNLTNNVDLDNTKKKMEIYQKENKDVIQKNKLKLTREQEELEEALEVERQENEQRRLFIQKEEQLQQILKRKNKQAFLDELESSDLPVALLLAQHKDRSTQLEMQLEKPKPVKPVTFSTGIKMGQHISLAPIHKLEEALYEYQPLQIETYGPHVPELEMLGRLGYLNHVRAASPQDLAGGYTSSLACHRALQDAFSGLFWQPS

SEQ ID NO: 876798 - protein, 238 aa, Homo sapiens
EGTVSAKRLLVGTCLVASEGACRWLWLKQAPARVCRRETAMDDQGCPRCKTTKYRNPSLKLMVNVCGHTLCESCVDLLFVRGAGNCPECGTPLRKSNFRVQLFEDPTVDKEVEIRKKVLKIYNKREEDFPSLREYNDFLEEVEEIVFNLTNNVDLDNTKKKMEIYQKENKDVIQKNKLKLTREQEELEEALEVERQENEQRRLFIQKEEQLQQILKRKNKQAFLDELEREREISSSSW

SEQ ID NO: 876799 - protein, 85 aa, Homo sapiens
EGTVSAKRLLVGTCLVASEGACRWLWLKQAPARVCRRETAMDDQGCPRCKTTKYRNPSLKLMVNVCGHTLWMIQERDKQKPRCLL

SEQ ID NO: 876800 - protein, 210 aa, Homo sapiens
MCADTLFFNLTNNVDLDNTKKKMEIYQKENKDVIQKNKLKLTREQEELEEALEVERQENEQRRLFIQKEEQLQQILKRKNKQAFLDELESSDLPVALLLAQHKDRSTQLEMQLEKPKPVKPVTFSTGIKMGQHISLAPIHKLEEALYEYQPLQIETYGPHVPELEMLGRLGYLNHVRAASPQDLAGGYTSSLACHRALQDAFSGLFWQPS

SEQ ID NO: 876801 - protein, 344 aa, Homo sapiens
EGTVSAKRLLVGTCLVASEGACRWLWLKQAPARVCRRETAMDDQGCPRCKTTKYRNPSLKLMVNVCGHTLCESCVDLLFVRGAGNCPECGTPLRKSNFRVQLFEDPTVDKEVEIRKKVLKIYNKREEDFPSLREYNDFLEEVEEIVFNLTNNVDLDNTKKKMEIYQKENKDVIQKNKLKLTREQEELEEALEVERQENEQRRLFIQKEEQLQQILKRKNKQAFLDELESSDLPVALLLAQHKDRSTQLEMQLEKPKPVKPVTFSTGIKMGQHISLAPIHKLEEALYEYQPLQIETYGPHVPELEMLGRLGWSLALSPRLECSGVILARCDLHLPGSSDSPASAS

SEQ ID NO: 876802 - protein, 349 aa, Homo sapiens; identical to SEQ ID NO: 876797

SEQ ID NO: 876803 - protein, 307 aa, Homo sapiens
EGTVSAKRLLVGTCLVASEGACRWLWLKQAPARVCRRETAMDDQGCPRCKTTKYRNPSLKLMVNVCGHTLCESCVDLLFVRGAGNCPECGTPLRKSNFRVQLFEDPTVDKEVEIRKKVLKIYNKREEDFPSLREYNDFLEEVEEIVFNLTNNVDLDNTKKKMEIYQKENKDVIQKNKLKLTREQEELEEALEVERQENEQRRLFIQKEEQLQQILKRKNKQAFLDELGQHISLAPIHKLEEALYEYQPLQIETYGPHVPELEMLGRLGYLNHVRAASPQDLAGGYTSSLACHRALQDAFSGLFWQPS

SEQ ID NO: 876804 - protein, 91 aa, Homo sapiens
  misc_feature (9)..(10): Xaa can be any naturally occurring amino acid
GAGGENERXXHVACTGAGSFAWFCASLKKNVFKPCQSCLTTGPCWRLYFFSCLSQSTTGCIQWAFLAAQLTIYKIWTLELNQGASKSKADL

SEQ ID NO: 876805 - protein, 307 aa, Homo sapiens; identical to SEQ ID NO: 876803

SEQ ID NO: 876806 - protein, 303 aa, Homo sapiens
  misc_feature (12)..(12): Xaa can be any naturally occurring amino acid
GCGKSISISTAXLTAATLLLFPATCESCVDLLFVRGAGNCPECGTPLRKSNFRVQLFEDPTVDKEVEIRKKVLKIYNKREEDFPSLREYNDFLEEVEEIVFNLTNNVDLDNTKKKMEIYQKENKDVIQKNKLKLTREQEELEEALEVERQENEQRRLFIQKEEQLQQILKRKNKQAFLDELESSDLPVALLLAQHKDRSTQLEMQLEKPKPVKPVTFSTGIKMGQHISLAPIHKLEEALYEYQPLQIETYGPHVPELEMLGRLGYLNHVRAASPQDLAGGYTSSLACHRALQDAFSGLFWQPS

SEQ ID NO: 876807 - protein, 318 aa, Homo sapiens
EGTVSAKRLLVGTCLVASEGACRWLWLKQAPARVCRRETAMDDQGCPRCKTTKYRNPSLKLMVNVCGHTLCESCVDLLFVRGAGNCPECGTPLRKSNFRVQLFEDPTVDKEVEIRKKVLKIYNKREEDFPSLREYNDFLEEVEEIVFNLTNNVDLDNTKKKMEIYQKENKDVIQKNKLKLTREQEELEEALEVERQENEQRRLFIQKEEQLQQILKRKNKQAFLDELESSDLPVALLLAQHKDRSTQLEMQLEKPKPVKPVTFSTGIKMGQHISLAPIHKLEEALYEYQPLQIETYGPHVPELEMLGRLGGFDTISLI

SEQ ID NO: 876808 - protein, 313 aa, Homo sapiens
EGTVSAKRLLVGTCLVASEGACRWLWLKQAPARVCRRETAMDDQGCPRCKTTKYRNPSLKLMVNVCGHTLCESCVDLLFVRGAGNCPECGTPLRKSNFRVQLFEDPTVDKEVEIRKKVLKIYNKREEDFPSLREYNDFLEEVEEIVFNLTNNVDLDNTKKKMEIYQKENKDVIQKNKLKLTREQEELEEALEVERQENEQRRLFIQKEEQLQQILKRKNKQAFLDELESSDLPVALLLAQHKDRSTQLEMQLEKPKPVKPVTFSTGIKMGQHISLAPIHKLEEALYEYQPLQIETYGPHVPELEMLGRLGYVS

SEQ ID NO: 876809 - protein, 251 aa, Homo sapiens
MPWMSLTQALPNVAHQNPSHLAPGTFSPSRLHAGRGPGVSAGGSGAFAGTWALHPDLLRAWSFRSILNLLQASDSLLCSWPMETGTLRPGLRLRCLGCAGAFGALLVHPTWGPCPAVHCARVLSPCLSVTGCSLPFPSQPQYQPLGIREALPDQPKVHSRGCQFKFLHSNFLVYFGYLSSPSCPLSLPYKLSESRGHISSSCPQLCCLYQPGYAVQRLTVNSCRPRIPSACCALILAYIFGSSEFFSLSPS

SEQ ID NO: 876810 - protein, 103 aa, Homo sapiens
RHSPTTATSPKVQVRPHSLRSAWPTPTPRSESPFIQGNDQQDYHKENHGEKSQRAFWALGRCLSSGTSGKNSKSDPICQAHLITHTAVIFFSDSKMQGFPEPC

SEQ ID NO: 876811 - protein, 408 aa, Homo sapiens
MAGRGFSWGPGHLNEDNARFLLLAALIVLYLLGGAAVFSALELAHERQAKQRWEERLANFSRGHNLSRDELRGFLRHYEEATRAGIRVDNVRPRWDFTGAFYFVGTVVSTIGFGMTTPATVGGKIFLIFYGLVGCSSTILFFNLFLERLITIIAYIMKSCHQRQLRRRGALPQESLKDAGQCEVDSLAGWKPSVYYVMLILCTASILISCCASAMYTPIEGWSYFDSLYFCFVAFSTIGFGDLVSSQNAHYESQGLYRFANFVFILMGVCCIYSLFNVISILIKQSLNWILRKMDSGCCPQCQRGLLRSRRNVVMPGSVRNRCNISIETDGVAESDTDGRRLSGEMISMKDLLAANKASLAILQKQLSEMANGCPHQTSTLARDNEFSGGVGAFAIMNNRLAETSGDR

SEQ ID NO: 876812 - protein, 430 aa, Homo sapiens
MEGEPSQPPNSSWPLSQNGTNTEATPATNLTFSSYYQHTSPVAAMFIVAYALIFLLCMVGNTLVCFIVLKNRHMHTVTNMFILNLAVSDLLVGIFCMPTTLVDNLITGWPFDNATCKMSGLVQGMSVSASVFTLVAIAVERFRCIVHPFREKLTLRKALVTIAVIWALALLIMCPSAVTLTVTREEHHFMVDARNRSYPLYSCWEAWPEKGMRRVYTTVLFSHIYLAPLALIVVMYARIARKLCQAPGPAPGGEEAADPRASRRRARVVHMLVMVALFFTLSWLPLWALLLLIDYGQLSAPQLHLVTVYAFPFAHWLAFFNSSANPIIYGYFNENFRRGFQAAFRARLCPRPSGSHKEAYSERPGGLLHRRVFVVVRPSDSGLPSESGPSSGAPRPGRLPLRNGRVAHHGLPREGPGCSHLPLTIPAWDI

SEQ ID NO: 876813 - protein, 104 aa, Homo sapiens
SHSSGDQKSKIQVSAGPCPSATCRGGFFLPFPGCWWQPATLGGPGPTATGAFLSLCFSFFLRQSRSVIQAGVQWGNLGSLQPPPPGFRQLFCLSHPSSCNCRHL

SEQ ID NO: 876814 - protein, 81 aa, Homo sapiens
RHEARQEAAHLVGLGYESFLAGARWVLSILWPDLLIRLLQHRFTKYSPQASSIIWELRKKPALLSQKLGMWPRQSFTKTSR

SEQ ID NO: 876815 - protein, 121 aa, Homo sapiens
QQGDPHNRLWNQHTEARKKRHTSPRWALWRLMVETRLQRPKGSWYLVISRINCHHVFSRQQRPVSSTCTVSHHSLGHLAHKIDLGEIIQFHFTFSCFGTLPAATSVLPEVRKLWTRHLLLL

SEQ ID NO: 876816 - protein, 158 aa, Homo sapiens
QRSRDMAPGSRGERSSFRSRRGPGVPSPQPDVTMLSRLLKEHQAKQNERKELQEKRRREAITAATCLTEALVDHLNVGVAQAYMNQRKLDHEVKTLQVQAAQFAKQTGQWIGMVENFNQALKEIGDVENWARSIELDMRTIATALEYVYKGQLQSAPS

SEQ ID NO: 876817 - protein, 127 aa, Homo sapiens
LRQTQTISFRSEKIIRLIEKPGGYYSTPPDEEAEETRPLHHLVATSDTLHEAAGKDNSQNLSTKAIPRAAAATTSTFFLSQPPIFSTQPSLWIAFSLKLIPQPTVTLMQQESGTRFFDMEGIFSQSV

SEQ ID NO: 876818 - protein, 112 aa, Homo sapiens
LRQTQTISFRSEKIIRLIEKPGGYYSTPPDEEAEETRPLHHLVATSDTLHEAAGKDNSQNPAPNLLHTALLMDRLLVEINPTAHSNINAAGVGDSVLRHGRDFLPICVVSSP

SEQ ID NO: 876819 - protein, 158 aa, Homo sapiens; identical to SEQ ID NO: 876816

SEQ ID NO: 876820 - protein, 116 aa, Homo sapiens
VYLPLYWQLTFPYSQVTVKYLGTCTKFYKQYKYLRVLIGRPLVLAAGRSDSGGRRVWGTPQRWASWRPETTGTEVGHLFPESGLEISELPILRPSSGERVPGSQESWALPLTSWRP

SEQ ID NO: 876821 - protein, 116 aa, Homo sapiens; identical to SEQ ID NO: 876820

SEQ ID NO: 876822 - protein, 116 aa, Homo sapiens; identical to SEQ ID NO: 876820

SEQ ID NO: 876823 - protein, 74 aa, Homo sapiens
RSRDMAPGSRGERSSFRSRRGPGVPSPQPDVTMLSRLLKEHQAKQNERKELQGAKYPVGRFLFGRGLASARSLD

SEQ ID NO: 876824 - protein, 158 aa, Homo sapiens; identical to SEQ ID NO: 876816

SEQ ID NO: 876825 - protein, 67 aa, Homo sapiens
  misc_feature (52)..(52): Xaa can be any naturally occurring amino acid
LRQTQTISFRSEKIIRLIEKPGGYYSTPPDEEAEETRPLHHLVATSSCPNSXGSCAPVWSKTLPVPF

SEQ ID NO: 876826 - protein, 158 aa, Homo sapiens; identical to SEQ ID NO: 876816

SEQ ID NO: 876827 - protein, 147 aa, Homo sapiens
QRSRDMAPGSRGERSSFRSRRGPGVPSPQPDVTMLSRLLKEHQAKQNERKELQEKRRREAITAATCLTEALVDHLNVGVAQAYMNQRKLDHEVKTLQVQAAQFAKQTGQWIGMVENFNQALKVGHTPYLTTPILGPHWLPPVRLPQV

SEQ ID NO: 876828 - protein, 116 aa, Homo sapiens; identical to SEQ ID NO: 876820

SEQ ID NO: 876829 - protein, 56 aa, Homo sapiens
IEYQGDPELQPIWSYEIASLVHTLFRLSSAINHRVGRRAGLASSERVLDAPAWGAV

SEQ ID NO: 876830 - protein, 81 aa, Homo sapiens
CSPERRAGLGLGAVQECSGLSRRHHSHRLLRTEAETGDQDGTVWLQEATQPQEAASKRPTSPAWGRAWLSSMWSFELYMFH

SEQ ID NO: 876831 - protein, 74 aa, Homo sapiens
AEEQKSAPTDTSRQQQAIEARRCRKFGRGSQRRVQPLDSLTPGEDRLPTPSPFWLPIHLAESNLHHTIKPCTDL

SEQ ID NO: 876832 - protein, 290 aa, Homo sapiens
VKAAPALIDPLYLMAQVRYYSELENAQSILQRCLELDPASVDAHLLMCQIYLAQGNFGMCFHCLELGVSHNFQVRDHPLYHLIKARALNKAGDYPEAIKTLKMVIKLPALKKEEGRKFLRPSVQPSQRASILLELVEALRLNGELHEATKVMQDTINEFGGTPEENRITIANVDLVLSKGNVDVALNMLRNILPKQSCYMEAREKMANIYLQTLRDRRLYIRCYRELCEHLPGPHTSLLLGDALMSILEPEKALEVYDEAYRQNPHDASLASRIGHAYVKAHQYTEVRLG

SEQ ID NO: 876833 - protein, 354 aa, Homo sapiens
VKAAPALIDPLYLMAQVRYYSELENAQSILQRCLELDPASVDAHLLMCQIYLAQGNFGMCFHCLELGVSHNFQVRDHPLYHLIKARALNKAGDYPEAIKTLKMVIKLPALKKEEGRKFLRPSVQPSQRASILLELVEALRLNGELHEATKVMQDTINEFGGTPEENRITIANVDLVLSKGNVDVALNMLRNILPKQSCYMEAREKMANIYLQTLRDRRLYIRCYRELCEHLPGPHTSLLLGDALMSILEPEKALEVYDEAYRQNPHDASLASRIGHAYVKAHQYTEAIEYYEAAQKINGQDFLCCDLGKLLLKLKKVNKAEKVLKQALEHDIVQDIPSMMNDVKCLLLLAKVYK

SEQ ID NO: 876834 - protein, 149 aa, Homo sapiens
QNLSKAKCFISLQSRTGHFAFESWMAGSSKQVSTGVGRRRRTPPANQSAQRPPFPRRRPAPKFQTGYAPLPPSPSAELSEPELCEEKEVSVFPRTLRSGPLYCRPVFLSTLARPPSLYKWEESFEPAVLWWWRGRDRRRRDSGRARCGR

SEQ ID NO: 876835 - protein, 429 aa, Homo sapiens
MCPGALWVALPLLSLLAGSLQGKPLQSWGRGSAGGNAHSPLGVPGGGLPEHTFNLKMFLENVKVDFLRSLNLSGVPSQDKTRVEPPQYMIDLYNRYTSDKSTTPASNIVRSFSMEDAISITATEDFPFQKHILLFNISIPRHEQITRAELRLYVSCQNHVDPSHDLKGSVVIYDVLDGTDAWDSATETKTFLVSQDIQDEGWETLEVSSAVKRWVRSDSTKSKNKLEVTVESHRKGCDTLDISVPPGSRNLPFFVVFSNDHSSGTKETRLELREMISHEQESVLKKLSKDGSTEAGESSHEEDTDGHVAAGSTLARRKRSAGAGSHCQKTSLRVNFEDIGWDSWIIAPKEYEAYECKGGCFFPLADDVTPTKHAIVQTLVHLKFPTKVGKACCVPTKLSPISVLYKDDMGVPTLKYHYEGMSVAECGCR

SEQ ID NO: 876836 - protein, 112 aa, Homo sapiens [sequence omitted]

SEQ ID NO: 876837 - protein, 143 aa, Homo sapiens
IQWLPLRAPTGLGGRRFRRGFYWVSCCRRSMGSPKPRHLFLFVHVWLTHVHVFSPGGPQNQFRLKGETTPQCSPLLGWEGIVASEGIRCSSRTPGVIPPLGEVQVPRGRASIENSHQKTRGNLQMNWLLKTCLQGLQEVGYIG

SEQ ID NO: 876838 - protein, 150 aa, Homo sapiens
KTMLLMSAPRKVICVCLQPWPPFLPHRAAPWAPCFLTNTWSVPECSPVTLCLNDRHRSPECMRRPRGSTKRAAFPPGALAADTVRYCPPAGSLIGSQCKSLSFSLIQPQCASCNHYCLLLTSQPGSPLPSVPKSTFLRTSTIQLHPQQPL

SEQ ID NO: 876839 - protein, 118 aa, Homo sapiens
FSALKELRLEDNLLTHLPENLDSLVNLKVLTLMDNPMEEPPKEVCAEGNEAIWKYLKENRNRNIMATKIQAWWRGTMVQRGFGKFGELLKPQKKGKTSPKDKKGKKDVKGKPGKGKKK

SEQ ID NO: 876840 - protein, 1260 aa, Homo sapiens
GRRSSVGSELGAEPLTVQTPSGSRMSAEASARPLRVGSRVEVIGKGHRGTVAYVGATLFATGKWVGVILDEAKGKNDGTVQGRKYFTCDEGHGIFVRQSQIQVFEDGADTTSPETPDSSASKVLKREGTDTTAKTSKLPTRPASTGVAGASSSLGPSGSASAGELSSSEPSTPAQTPLAAPIIPTPVLTSPGAVPPLPSPSKEEEGLRAQVRDLEEKLETLRLKRAEDKAKLKELEKHKIQLEQVQEWKSKMQEQQADLQRRLKEARKEAKEALEAKERYMEEMADTADAIEMATLDKEMAEERAESLQQEVEALKERVDELTTDLEILKAEIEEKGSDGAASSYQLKQLEEQNARLKDALVRMRDLSSSEKQEHVKLQKLMEKKNQELEVVRQQRERLQEELSQAESTIDELKEQVDAALGAEEMVEMLTDRNLNLEEKVRELRETVGDLEAMNEMNDELQENARETELELREQLDMAGARVREAQKRVEAAQETVADYQQTIKKYRQLTAHLQDVNRELTNQQEASVERQQQPPPETFDFKIKFAETKAHAKAIEMELRQMEVAQANRHMSLLTAFMPDSFLRPGGDHDCVLVLLLMPRLICKAELIRKQAQEKFELSENCSERPGLRGAAGEQLSFAAGLVYSLSLLQATLHRYEHALSQCSVDVYKKVGSLYPEMSAHERSLDFLIELLHKDQLDETVNVEPLTKAIKYYQHLYSIHLAEQPEDCTMQLADHIKFTQSALDCMSVEVGRLRAFLQGGQEATDIALLLRDLETSCSDIRQFCKKIRRRMPGTDAPGIPAALAFGPQVSDTLLDCRKHLTWVVAVLQEVAAAAAQLIAPLAENEGLLVAALEELAFKASEQIYGTPSSSPYECLRQSCNILISTMNKLATAMQEGEYDAERPPSKPPPVELRAAALRAEITDAEGLGLKLEDRETVIKELKKSLKIKGEELSEANVRLSLLEKKLDSAAKDADERIEKVQTRLEETQALLRKKEKEFEETMDALQADIDQLEAEKAELKQRLNSQSKRTIEGLRGPPPSGIATLVSGIAGGAIPGQAPGSVPGPGLVKDSPLLLQQISAMRLHISQLQHENSILKGAQMKASLASLPPLHVAKLSHEGPGSELPAGALYRKTSQLLETLNQLSTHTHVVDITRTSPAAKSPSAQLMEQVAQLKSLSDTVEKLKDEVLKETVSQRPGATVPTDFATFPSSAFLRAKEEQQDDTVYMGKVTFSCAAGFGQRHRLVLTQEQLHQLHSRLIS

SEQ ID NO: 876841 - protein, 118 aa, Homo sapiens
LDHRFMVVGDITRTSPAAKSPSAQLMEQVAQLKSLSDTVEKLKDEVLKETVSQRPGATVPTDFATFPSSAFLRAKEEQQDDTVYMGKVTFSCAAGFGQRHRLVLTQEQLHQLHSRLIS

SEQ ID NO: 876842 - protein, 1260 aa, Homo sapiens; identical to SEQ ID NO: 876840

SEQ ID NO: 876843 - protein, 1009 aa, Homo sapiens
MQEQQADLQRRLKEARKEAKEALEAKERYMEEMADTADAIEMATLDKEMAEERAESLQQEVEALKERVDELTTDLEILKAEIEEKGSDGAASSYQLKQLEEQNARLKDALVRMRDLSSSEKQEHVKLQKLMEKKNQELEVVRQQRERLQEELSQAESTIDELKEQVDAALGAEEMVEMLTDRNLNLEEKVRELRETVGDLEAMNEMNDELQENARETELELREQLDMAGARVREAQKRVEAAQETVADYQQTIKKYRQLTAHLQDVNRELTNQQEASVERQQQPPPETFDFKIKFAETKAHAKAIEMELRQMEVAQANRHMSLLTAFMPDSFLRPGGDHDCVLVLLLMPRLICKAELIRKQAQEKFELSENCSERPGLRGAAGEQLSFAAGLVYSLSLLQATLHRYEHALSQCSVDVYKKVGSLYPEMSAHERSLDFLIELLHKDQLDETVNVEPLTKAIKYYQHLYSIHLAEQPEDCTMQLADHIKFTQSALDCMSVEVGRLRAFLQGGQEATDIALLLRDLETSCSDIRQFCKKIRRRMPGTDAPGIPAALAFGPQVSDTLLDCRKHLTWVVAVLQEVAAAAAQLIAPLAENEGLLVAALEELAFKASEQIYGTPSSSPYECLRQSCNILISTMNKLATAMQEGEYDAERPPSKPPPVELRAAALRAEITDAEGLGLKLEDRETVIKELKKSLKIKGEELSEANVRLSLLEKKLDSAAKDADERIEKVQTRLEETQALLRKKEKEFEETMDALQADIDQLEAEKAELKQRLNSQSKRTIEGLRGPPPSGIATLVSGIAGGAIPGQAPGSVPGPGLVKDSPLLLQQISAMRLHISQLQHENSILKGAQMKASLASLPPLHVAKLSHEGPGSELPAGALYRKTSQLLETLNQLSTHTHVVDITRTSPAAKSPSAQLMEQVAQLKSLSDTVEKLKDEVLKETVSQRPGATVPTDFATFPSSAFLRAKEEQQDDTVYMGKVTFSCAAGFGQRHRLVLTQEQLHQLHSRLIS

SEQ ID NO: 876844 - protein, 1260 aa, Homo sapiens; identical to SEQ ID NO: 876840

SEQ ID NO: 876845 - protein, 1075 aa, Homo sapiens
GRRSSVGSELGAEPLTVQTPSGSRMSAEASARPLRVGSRVEVIGKGHRGTVAYVGATLFATGKWVGVILDEAKGKNDGTVQGRKYFTCDEGHGIFVRQSQIQVFEDGADTTSPETPDSSASKVLKREGTDTTAKTSKLPTRPASTGVAGASSSLGPSGSASAGELSSSEPSTPAQTPLAAPIIPTPVLTSPGAVPPLPSPSKEEEGLRAQVRDLEEKLETLRLKRAEDKAKLKELEKHKIQLEQVQEWKSKMQEQQADLQRRLKEARKEAKEALEAKERYMEEMADTADAIEMATLDKEMAEERAESLQQEVEALKERVDELTTDLEILKAEIEEKGSDGAASSYQLKQLEEQNARLKDALVRMRDLSSSEKQEHVKLQKLMEKKNQELEVVRQQRERLQEELSQAESTIDELKEQVDAALGAEEMVEMLTDRNLNLEEKVRELRETVGDLEAMNEMNDELQENARETELELREQLDMAGARVREAQKRVEAAQETVADYQQTIKKYRQLTAHLQDVNRELTNQQEASVERQQQPPPETFDFKIKFAETKAHAKAIEMELRQMEVAQANRHMSLLTAFMPDSFLRPGGDHDCVLVLLLMPRLICKAELIRKQAQEKFELSENCSERPGLRGAAGEQLSFAAGLVYSLSLLQATLHRYEHALSQCSVDVYKKVGSLYPEMSAHERSLDFLIELLHKDQLDETVNVEPLTKAIKYYQHLYSIHLAEQPEDCTMQLADHIKFTQSALDCMSVEVGRLRAFLQGGQEATDIALLLRDLETSCSDIRQFCKKIRRRMPGTDAPGIPAALAFGPQVSDTLLDCRKHLTWVVAVLQEVAAAAAQLIAPLAENEGLLVAALEELAFKASEQIYGTPSSSPYECLRQSCNILISTMNKLATAMQEGEYDAERPPSKPPPVELRAAALRAEITDAEGLGLKLEDRETVIKELKKSLKIKGEELSEANVRLSLLEKKLDSAAKDADERIEKVQTRLEETQALLRKKEKEFEETMDALQADIDQLEAEKAELKQRLNSQSKRTIEGLRGPPPSGIATLVSGIAGGEGLTTAASADLCHEAAHLPAPA

SEQ ID NO: 876846 - protein, 1288 aa, Homo sapiens
GRRSSVGSELGAEPLTVQTPSGSRMSAEASARPLRVGSRVEVIGKGHRGTVAYVGATLFATGKWVGVILDEAKGKNDGTVQGRKYFTCDEGHGIFVRQSQIQVFEDGADTTSPETPDSSASKVLKREGTDTTAKTSKLPTRPASTGVAGASSSLGPSGSASAGELSSSEPSTPAQTPLAAPIIPTPVLTSPGAVPPLPSPSKEEEGLRAQVRDLEEKLETLRLKRAEDKAKLKELEKHKIQLEQVQEWKSKMQEQQADLQRRLKEARKEAKEALEAKERYMEEMADTADAIEMATLDKEMAEERAESLQQEVEALKERVDELTTDLEILKAEIEEKGSDGAASSYQLKQLEEQNARLKDALVRMRDLSSSEKQEHVKLQKLMEKKNQELEVVRQQRERLQEELSQAESTIDELKEQVDAALGAEEMVEMLTDRNLNLEEKVRELRETVGDLEAMNEMNDELQENARETELELREQLDMAGARVREAQKRVEAAQETVADYQQTIKKYRQLTAHLQDVNRELTNQQEASVERQQQPPPETFDFKIKFAETKAHAKAIEMELRQMEVAQANRHMSLLTAFMPDSFLRPGGDHDCVLVLLLMPRLICKAELIRKQAQEKFELSENCSERPGLRGAAGEQLSFAAGLVYSLSLLQATLHRYEHALSQCSVDVYKKVGSLYPEMSAHERSLDFLIELLHKDQLDETVNVEPLTKAIKYYQHLYSIHLAEQPEDCTMQLADHIKFTQSALDCMSVEVGRLRAFLQGGQEATDIALLLRDLETSCSDIRQFCKKIRRRMPGTDAPGIPAALAFGPQVSDTLLDCRKHLTWVVAVLQEVAAAAAQLIAPLAENEGLLVAALEELAFKASEQVGLDGWVEGVGRVSDQCGAFTSALGFLQIYGTPSSSPYECLRQSCNILISTMNKLATAMQEGEYDAERPPSKPPPVELRAAALRAEITDAEGLGLKLEDRETVIKELKKSLKIKGEELSEANVRLSLLEKKLDSAAKDADERIEKVQTRLEETQALLRKKEKEFEETMDALQADIDQLEAEKAELKQRLNSQSKRTIEGLRGPPPSGIATLVSGIAGGAIPGQAPGSVPGPGLVKDSPLLLQQISAMRLHISQLQHENSILKGAQMKASLASLPPLHVAKLSHEGPGSELPAGALYRKTSQLLETLNQLSTHTHVVDITRTSPAAKSPSAQLMEQVAQLKSLSDTVEKLKDEVLKETVSQRPGATVPTDFATFPSSAFLRAKEEQQDDTVYMGKVTFSCAAGFGQRHRLVLTQEQLHQLHSRLIS

SEQ ID NO: 876847 - protein, 1230 aa, Homo sapiens
GRRSSVGSELGAEPLTVQTPSGSRMSAEASARPLRVGSRVEVIGKGHRGTVAYVGATLFATGKWVGVILDEAKGKNDGTVQGRKYFTCDEGHGIFVRQSQIQVFEDGADTTSPETPDSSASKVLKREGTDTTAKTSKLPTRPASTGVAGASSSLGPSGSASAGELSSSEPSTPAQTPLAAPIIPTPVLTSPGAVPPLPSPSKEEEGLRAQVRDLEEKLETLRLKRAEDKAKLKELEKHKIQLEQVQEWKSKMQEQQADLQRRLKEARKEAKEALEAKERYMEEMADTADAIEMATLDKEMAEERAESLQQEVEALKERVDELTTDLEILKAEIEEKGSDGAASSYQLKQLEEQNARLKDALVRMRDLSSSEKQEHVKLQKLMEKKNQELEVVRQQRERLQEELSQAESTIDELKEQVDAALGAEEMVEMLTDRNLNLEEKVRELRETVGDLEAMNEMNDELQENARETELELREQLDMAGARVREAQKRVEAAQETVADYQQTIKKYRQLTAHLQDVNRELTNQQEASVERQQQPPPETFDFKIKFAETKAHAKAIEMELRQMEVAQANRHMSLLTAFMPDSFLRPGGDHDCVLVLLLMPRLICKAELIRKQAQEKFELSENCSERPGLRGAAGEQLSFAAGLVYSLSLLQATLHRYEHALSQCSVDVYKKVGSLYPEMSAHERSLDFLIELLHKDQLDETVNVEPLTKAIKYYQHLYSIHLAEQPEDCTMQLADHIKFTQSALDCMSVEVGRLRAFLQGGQEATDIALLLRDLETSCSDIRQFCKKIRRRMPGTDAPGIPAALAFGPQVSDTLLDCRKHLTWVVAVLQEVAAAAAQLIAPLAENEGLLVAALEELAFKASEQIYGTPSSSPYECLRQSCNILISTMNKLATAMQEGEYDAERPPSKPPPVELRAAALRAEITDAEGLGLKLEDRETVIKELKKSLKIKGEELSEANVRLSLLEKKLDSAAKDADERIEKVQTRLEETQALLRKKEKEFEETMDALQADIDQLEAEKAELKQRLNSQSKRTIEGLRGPPPSGIATLVSGIAGGAIPGQAPGSVPGPGLVKDSPLLLQQISAMRLHISQLQHENSILKGAQMKASLASLPPLHVAKLSHEGPGSELPAGALYRKTSQLLETLNQLSTHTHVVDITRTSPAAKSPSAQLMEQVAQLKSLSDTVEKLKAKEEQQDDTVYMGKVTFSCAAGFGQRHRLVLTQEQLHQLHSRLIS

SEQ ID NO: 876848 - protein, 1260 aa, Homo sapiens; identical to SEQ ID NO: 876840

SEQ ID NO: 876849 - protein, 1260 aa, Homo sapiens; identical to SEQ ID NO: 876840

SEQ ID NO: 876850 - protein, 1260 aa, Homo sapiens; identical to SEQ ID NO: 876840

SEQ ID NO: 876851 - protein, 1075 aa, Homo sapiens; identical to SEQ ID NO: 876845

SEQ ID NO: 876852 - protein, 1230 aa, Homo sapiens; identical to SEQ ID NO: 876847

SEQ ID NO: 876853 - protein, 1204 aa, Homo sapiens
GRRSSVGSELGAEPLTVQTPSGSRMSAEASARPLRVGSRVEVIGKGHRGTVAYVGATLFATGKWVGVILDEAKGKNDGTVQGRKYFTCDEGHGIFVRQSQIQVFEDGADTTSPETPDSSASKVLKREGTDTTAKTSKLPTRPASTGVAGASSSLGPSGSASAGELSSSEPSTPAQTPLAAPIIPTPVLTSPGAVPPLPSPSKEEEGLRAQVRDLEEKLETLRLKRAEDKAKLKELEKHKIQLEQVQEWKSKMQEQQADLQRRLKEARKEAKEALEAKERYMEEMADTADAIEMATLDKEMAEERAESLQQEVEALKERVDELTTDLEILKAEIEEKGSDGAASSYQLKQLEEQNARLKDALVRMRDLSSSEKQEHVKLQKLMEKKNQELEVVRQQRERLQEELSQAESTIDELKEQVDAALGAEEMVEMLTDRNLNLEEKVRELRETVGDLEAMNEMNDELQENARETELELREQLDMAGARVREAQKRVEAAQETVADYQQTIKKYRQLTAHLQDVNRELTNQQEASVERQQQPPPETFDFKIKFAETKAHAKAIEMELRQMEVAQANRHMSLLTAFMPDSFLRPGGDHDCVLVLLLMPRLICKAELIRKQAQEKFELSENCSERPGLRGAAGEQLSFAAGLVYSLSLLQATLHRYEHALSQCSVDVYKKVGSLYPEMSAHERSLDFLIELLHKDQLDETVNVEPLTKAIKYYQHLYSIHLAEQPEDCTMQLADHIKFTQSALDCMSVEVGRLRAFLQGGQEATDIALLLRDLETSCSDIRQFCKKIRRRMPGTDAPGIPAALAFGPQVSDTLLDCRKHLTWVVAVLQEVAAAAAQLIAPLAENEGLLVAALEELAFKASEQIYGTPSSSPYECLRQSCNILISTMNKLATAMQEGEYDAERPPSKPPPVELRAAALRAEITDAEGLGLKLEDRETVIKELKKSLKIKGEELSEANVRLSLLEKKLDSAAKDADERIEKVQTRLEETQALLRKKEKEFEETMDALQADIDQLEAEKAELKQRLNSQSKRTIEGLRGPPPSGIATLVSGIAGGAIPGQAPGSVPGPGLVKDSPLLLQQISAMRLHISQLQHENSILKGAQMKASLASLPPLHVAKLSHEGPGSELPAGALYRKTSQPHMRRSLCPCRLCDPSGSSSALRKADEGKVAKSVGTVLTFSCAAGFGQRHRLVLTQEQLHQLHSRLIS

SEQ ID NO: 876854 - protein, 1137 aa, Homo sapiens
MKVKEEKAGVGKLDHTNHRRRFPDQKECPPIHIGLPVPTYPQRKTDQKGHLSGLQKVHWGLRPDQPQQELTGPGSGASSQDSSMDLISRTRSPAAEQLQDILGEEDEAPNPTLFTEMDTLQHDGDQMEWKESARWIKFEEKVEEGGERWSKPHVSTLSLHSLFELRTCLQTGTVLLDLDSGSLPQIIDDVIEKQIEDGLLRPELRERVSYVLLRRHRHQTKKPIHRSLADIGKSVSTTNRSPARSPGAGPSLHHSTEDLRMRQSANYGRLCHAQSRSMNDISLTPNTDQRKNKFMKKIPKDSEASNVLVGEVDFLDQPFIAFVRLIQSAMLGGVTEVPVPTRFLFILLGPSGRAKSYNEIGRAIATLMVDDLFSDVAYKARNREDLIAGIDEFLDEVIVLPPGEWDPNIRIEPPKKVPSADKRKSVFSLAELGQMNGSVGGGGGAPGGGNGGGGGGGSGGGAGSGGAGGTSSGDDGEMPAMHEIGEELIWTGRFFGGLCLDIKRKLPWFPSDFYDGFHIQSISAILFIYLGCITNAITFGGLLGDATDNYQGVMESFLGTAMAGSLFCLFSGQPLIILSSTGPILIFEKLLFDFSKGNGLDYMEFRLWIGLHSAVQCLILVATDASFIIKYITRFTEEGFSTLISFIFIYDAIKKMIGAFKYYPINMDFKPNFITTYKCECVAPDTVNTTVFNASAPLAPDTNASLYNLLNLTALDWSLLSKKECLSYGGRLLGNSCKFIPDLALMSFILFFGTYSMTLTLKKFKFSRYFPTKVRALVADFSIVFSILMFCGIDACFGLETPKLHVPSVIKPTRPDRGWFVAPFGKNPWWVYPASILPALLVTILIFMDQQITAVIVNRKENKLKKAAGYHLDLFWVGILMALCSFMGLPWYVAATVISIAHIDSLKMETETSAPGEQPQFLGVREQRVTGIIVFILTGISVFLAPILKCIPLPVLYGVFLYMGVASLNGIQMGTGGSEFKIQKKLTPFWERCKLFLMPAKHQPDHAFLRHVPLRRIHLFTLVQILCLAVLWILKSTVAAIIFPVMILGLIIVRRLLDFIFSQHDLAWIDNILPEKEKKETDKKRKRKKGAHEDCDEEPQFPPPSVIKIPMESVQSDPQNGIHCIARKRSSSWSYSL

SEQ ID NO: 876855 - protein, 1018 aa, Homo sapiens
GRRSSVGSELGAEPLTVQTPSGSRMSAEASARPLRVGSRVEVIGKGHRGTVAYVGATLFATGKWVGVILDEAKGKNDGTVQGRKYFTCDEGHGIFVRQSQIQVFEDGADTTSPETPDSSASKVLKREGTDTTAKTSKLPTRPASTGVAGASSSLGPSGSASAGELSSSEPSTPAQTPLAAPIIPTPVLTSPGAVPPLPSPSKEEEGLRAQVRDLEEKLETLRLKRAEDKAKLKELEKHKIQLEQVQEWKSKMQEQQADLQRRLKEARKEAKEALEAKERYMEEMADTADAIEMATLDKEMAEERAESLQQEVEALKERVDELTTDLEILKAEIEEKGSDGAASSYQLKQLEEQNARLKDALVRMRDLSSSEKQEHVKLQKLMEKKNQELEVVRQQRERLQEELSQAESTIDELKEQVDAALGAEEMVEMLTDRNLNLEEKVRELRETVGDLEAMNEMNDELQENARETELELREQLDMAGARVREAQKRVEAAQETVADYQQTIKKYRQLTAHLQDVNRELTNQQEASVERQQQPPPETFDFKIKFAETKAHAKAIEMELRQMEVAQANRHMSLLTAFMPDSFLRPGGDHDCVLVLLLMPRLICKAELIRKQAQEKFELSENCSERPGLRGAAGEQLSFAAGLVYSLSLLQATLHRYEHALSQCSVDVYKKVGSLYPEMSAHERSLDFLIELLHKDQLDETVNVEPLTKAIKYYQHLYSIHLAEQPEDCTMQLADHIKFTQSALDCMSVEVGRLRAFLQGGQEATDIALLLRDLETSCSDIRQFCKKIRRRMPGTDAPGIPAALAFGPQVSDTLLDCRKHLTWVVAVLQEVAAAAAQLIAPLAENEGLLVAALEELAFKASEQIYGTPSSSPYECLRQSCNILISTMNKLATAMQEGEYDAERPPSKPPPVELRAAALRAEITDAEGLGLKLEDRETVIKELKKSLKIKGEELSEANVRLSLLEKKLDSAAKDADERIEKVQTRLEETQALLRKKEKSGTFPGALLPLILPLLELSAS

SEQ ID NO: 876856 - protein, 1137 aa, Homo sapiens; identical to SEQ ID NO: 876854

SEQ ID NO: 876857 - protein, 1137 aa, Homo sapiens; identical to SEQ ID NO: 876854

SEQ ID NO: 876858 - protein, 559 aa, Homo sapiens
  misc_feature (556)..(556): Xaa can be any naturally occurring amino acid
GRRSSVGSELGAEPLTVQTPSGSRMSAEASARPLRVGSRVEVIGKGHRGTVAYVGATLFATGKWVGVILDEAKGKNDGTVQGRKYFTCDEGHGIFVRQSQIQVFEDGADTTSPETPDSSASKVLKREGTDTTAKTSKLPTRPASTGVAGASSSLGPSGSASAGELSSSEPSTPAQTPLAAPIIPTPVLTSPGAVPPLPSPSKEEEGLRAQVRDLEEKLETLRLKRAEDKAKLKELEKHKIQLEQVQEWKSKMQEQQADLQRRLKEARKEAKEALEAKERYMEEMADTADAIEMATLDKEMAEERAESLQQEVEALKERVDELTTDLEILKAEIEEKGSDGAASSYQLKQLEEQNARLKDALVRMRDLSSSEKQEHVKLQKLMEKKNQELEVVRQQRERLQEELSQAESTIDELKEQVDAALGAEEMVEMLTDRNLNLEEKVRELRETVGDLEAMNEMNDELQENARETELELREQLDMAGARVREAQKRVEAAQETVADYQQTIKKYRQLTAHLQDVNRELTNQQEASVERQQQPPPETFDFKIKFAETKAHAKAXKWN

SEQ ID NO: 876859 - protein, 621 aa, Homo sapiens
GRRSSVGSELGAEPLTVQTPSGSRMSAEASARPLRVGSRVEVIGKGHRGTVAYVGATLFATGKWVGVILDEAKGKNDGTVQGRKYFTCDEGHGIFVRQSQIQVFEDGADTTSPETPDSSASKVLKREGTDTTAKTSKLPTRPASTGVAGASSSLGPSGSASAGELSSSEPSTPAQTPLAAPIIPTPVLTSPGAVPPLPSPSKEEEGLRAQVRDLEEKLETLRLKRAEDKAKLKELEKHKIQLEQVQEWKSKMQEQQADLQRRLKEARKEAKEALEAKERYMEEMADTADAIEMATLDKEMAEERAESLQQEVEALKERVDELTTDLEILKAEIEEKGSDGAASSYQLKQLEEQNARLKDALVRMRDLSSSEKQEHVKLQKLMEKKNQELEVVRQQRERLQEELSQAESTIDELKEQVDAALGAEEMVEMLTDRNLNLEEKVRELRETVGDLEAMNEMNDELQENARETELELREQLDMAGARVREAQKRVEAAQETVADYQQTIKKYRQLTAHLQDVNRELTNQQEASVERQQQPPPETFDFKIKFAETKAHAKAIEMELRQMEVAQANRHMSLLTAFMPDSFLRPGGDHDCVLVLLLMPRLICKVWPINHMFHRNLVNLP

SEQ ID NO: 876860 - protein, 174 aa, Homo sapiens
MQTKSLGGRRQVTEPFPFPEVIKFKTKGGFGKPKFFVEHQPDHAFLRHVPLRRIHLFTLVQILCLAVLWILKSTVAAIIFPVMILGLIIVRRLLDFIFSQHDLAWIDNILPEKEKKETDKKRKRKKGAHEDCDEEPQFPPPSVIKIPMESVQSDPQNGIHCIARKRSSSWSYSL

SEQ ID NO: 876861 - protein, 129 aa, Homo sapiens
MISSLHPHFLTPYRPFLQPPPVELRAAALRAEITDAEGLGLKLEDRETVIKELKKSLKIKGEELSEANVRLSLLEKKLDSAAKDADERIEKVQTRLEETQALLRKKEKSGTFPGALLPLILPLLELSAS

SEQ ID NO: 876862 - protein, 1260 aa, Homo sapiens; identical to SEQ ID NO: 876840

SEQ ID NO: 876863 - protein, 1314 aa, Homo sapiens
GRRSSVGSELGAEPLTVQTPSGSRMSAEASARPLRVGSRVEVIGKGHRGTVAYVGATLFATGKWVGVILDEAKGKNDGTVQGRKYFTCDEGHGIFVRQSQIQVFEDGADTTSPETPDSSASKVLKREGTDTTAKTSKLPTRPASTGVAGASSSLGPSGSASAGELSSSEPSTPAQTPLAAPIIPTPVLTSPGAVPPLPSPSKEEEGLRAQVRDLEEKLETLRLKRAEDKAKLKELEKHKIQLEQVQEWKSKMQEQQADLQRRLKEARKEAKEALEAKERYMEEMADTADAIEMATLDKEMAEERAESLQQEVEALKERVDELTTDLEILKAEIEEKGSDGAASSYQLKQLEEQNARLKDALVRMRDLSSSEKQEHVKLQKLMEKKNQELEVVRQQRERLQEELSQAESTIDELKEQVDAALGAEEMVEMLTDRNLNLEEKVRDTNPANFCIFSRDGVSPCWPAWSRSRPHDPPALTSQSAGITGVNHRRWPTLPFFSPNYGVVSKEAMNEMNDELQENARETELELREQLDMAGARVREAQKRVEAAQETVADYQQTIKKYRQLTAHLQDVNRELTNQQEASVERQQQPPPETFDFKIKFAETKAHAKAIEMELRQMEVAQANRHMSLLTAFMPDSFLRPGGDHDCVLVLLLMPRLICKAELIRKQAQEKFELSENCSERPGLRGAAGEQLSFAAGLVYSLSLLQATLHRYEHALSQCSVDVYKKVGSLYPEMSAHERSLDFLIELLHKDQLDETVNVEPLTKAIKYYQHLYSIHLAEQPEDCTMQLADHIKFTQSALDCMSVEVGRLRAFLQGGQEATDIALLLRDLETSCSDIRQFCKKIRRRMPGTDAPGIPAALAFGPQVSDTLLDCRKHLTWVVAVLQEVAAAAAQLIAPLAENEGLLVAALEELAFKASEQIYGTPSSSPYECLRQSCNILISTMNKLATAMQEGEYDAERPPSKPPPVELRAAALRAEITDAEGLGLKLEDRETVIKELKKSLKIKGEELSEANVRLSLLEKKLDSAAKDADERIEKVQTRLEETQALLRKKEKEFEETMDALQADIDQLEAEKAELKQRLNSQSKRTIEGLRGPPPSGIATLVSGIAGGAIPGQAPGSVPGPGLVKDSPLLLQQISAMRLHISQLQHENSILKGAQMKASLASLPPLHVAKLSHEGPGSELPAGALYRKTSQLLETLNQLSTHTHVVDITRTSPAAKSPSAQLMEQVAQLKSLSDTVEKLKDEVLKETVSQRPGATVPTDFATFPSSAFLRAKEEQQDDTVYMGKVTFSCAAGFGQRHRLVLTQEQLHQLHSRLIS

SEQ ID NO: 876864 - protein, 866 aa, Homo sapiens
MVPPRLWDIVDPRPRLMSSNEQVDAALGAEEMVEMLTDRNLNLEEKVRELRETVGDLEAMNEMNDELQENARETELELREQLDMAGARVREAQKRVEAAQETVADYQQTIKKYRQLTAHLQDVNRELTNQQEASVERQQQPPPETFDFKIKFAETKAHAKAIEMELRQMEVAQANRHMSLLTAFMPDSFLRPGGDHDCVLVLLLMPRLICKAELIRKQAQEKFELSENCSERPGLRGAAGEQLSFAAGLVYSLSLLQATLHRYEHALSQCSVDVYKKVGSLYPEMSAHERSLDFLIELLHKDQLDETVNVEPLTKAIKYYQHLYSIHLAEQPEDCTMQLADHIKFTQSALDCMSVEVGRLRAFLQGGQEATDIALLLRDLETSCSDIRQFCKKIRRRMPGTDAPGIPAALAFGPQVSDTLLDCRKHLTWVVAVLQEVAAAAAQLIAPLAENEGLLVAALEELAFKASEQIYGTPSSSPYECLRQSCNILISTMNKLATAMQEGEYDAERPPSKPPPVELRAAALRAEITDAEGLGLKLEDRETVIKELKKSLKIKGEELSEANVRLSLLEKKLDSAAKDADERIEKVQTRLEETQALLRKKEKEFEETMDALQADIDQLEAEKAELKQRLNSQSKRTIEGLRGPPPSGIATLVSGIAGGAIPGQAPGSVPGPGLVKDSPLLLQQISAMRLHISQLQHENSILKGAQMKASLASLPPLHVAKLSHEGPGSELPAGALYRKTSQLLETLNQLSTHTHVVDITRTSPAAKSPSAQLMEQVAQLKSLSDTVEKLKDEVLKETVSQRPGATVPTDFATFPSSAFLRAKEEQQDDTVYMGKVTFSCAAGFGQRHRLVLTQEQLHQLHSRLIS

SEQ ID NO: 876865 - protein, 1260 aa, Homo sapiens; identical to SEQ ID NO: 876840

SEQ ID NO: 876866 - protein, 1260 aa, Homo sapiens; identical to SEQ ID NO: 876840

SEQ ID NO: 876867 - protein, 1260 aa, Homo sapiens; identical to SEQ ID NO: 876840

SEQ ID NO: 876868 - protein, 1260 aa, Homo sapiens; identical to SEQ ID NO: 876840

SEQ ID NO: 876869 - protein, 1075 aa, Homo sapiens; identical to SEQ ID NO: 876845

SEQ ID NO: 876870 - protein, 1113 aa, Homo sapiens
GRRSSVGSELGAEPLTVQTPSGSRMSAEASARPLRVGSRVEVIGKGHRGTVAYVGATLFATGKWVGVILDEAKGKNDGTVQGRKYFTCDEGHGIFVRQSQIQVFEDGADTTSPETPDSSASKVLKREGTDTTAKTSKLPTRPASTGVAGASSSLGPSGSASAGELSSSEPSTPAQTPLAAPIIPTPVLTSPGAVPPLPSPSKEEEGLRAQVRDLEEKLETLRLKRAEDKAKLKELEKHKIQLEQVQEWKSKMQEQQADLQRRLKEARKEAKEALEAKERYMEEMADTADAIEMATLDKEMAEERAESLQQEVEALKERVDELTTDLEILKAEIEEKGSDGAASSYQLKQLEEQNARLKDALVRMRDLSSSEKQEHVKLQKLMEKKNQELEVVRQQRERLQEELSQAESTIDELKEQVDAALGAEEMVEMLTDRNLNLEEKVRELRETVGDLEAMNEMNDELQENARETELELREQLDMAGARVREAQKRVEAAQETVADYQQTIKKYRQLTAHLQDVNRELTNQQEASVERQQQPPPETFDFKIKFAETKAHAKAIEMELRQMEVAQANRHMSLLTAFMPDSFLRPGGDHDCVLVLLLMPRLICKAELIRKQAQEKFELSENCSERPGLRGAAGEQLSFAAGLVYSLSLLQATLHRYEHALSQCSVDVYKKVGSLYPEMSAHERSLDFLIELLHKDQLDETVNVEPLTKAIKYYQHLYSIHLAEQPEDCTMQLADHIKFTQSALDCMSVEVGRLRAFLQGGQEATDIALLLRDLETSCSDIRQFCKKIRRRMPGTDAPGIPAALAFGPQVSDTLLDCRKHLTWVVAVLQEVAAAAAQLIAPLAENEGLLVAALEELAFKASEQIYGTPSSSPYECLRQSCNILISTMNKLATAMQEGEYDAERPPSKPPPVELRAAALRAEITDAEGLGLKLEDRETVIKELKKSLKIKGEELSEANVRLSLLEKKLDSAAKDADERIEKVQTRLEETQALLRKKEKEFEETMDALQADIDQLEAEKAELKQRLNSQSKRTIEGLRGPPPSGIATLVSGIAGGAIPGQAPGSVPGPGLVKDSPLLLQQISAMRLHISQLQHENSILKGAQMKASFCAYRDHLE

SEQ ID NO: 876871 - protein, 1137 aa, Homo sapiens; identical to SEQ ID NO: 876854

SEQ ID NO: 876872 - protein, 1137 aa, Homo sapiens; identical to SEQ ID NO: 876854

SEQ ID NO: 876873 - protein, 1137 aa, Homo sapiens; identical to SEQ ID NO: 876854

SEQ ID NO: 876874 - protein, 722 aa, Homo sapiens
GRRSSVGSELGAEPLTVQTPSGSRMSAEASARPLRVGSRVEVIGKGHRGTVAYVGATLFATGKWVGVILDEAKGKNDGTVQGRKYFTCDEGHGIFVRQSQIQVFEDGADTTSPETPDSSASKVLKREGTDTTAKTSKLPTRPASTGVAGASSSLGPSGSASAGELSSSEPSTPAQTPLAAPIIPTPVLTSPGAVPPLPSPSKEEEGLRAQVRDLEEKLETLRLKRAEDKAKLKELEKHKIQLEQVQEWKSKMQEQQADLQRRLKEARKEAKEALEAKERYMEEMADTADAIEMATLDKEMAEERAESLQQEVEALKERVDELTTDLEILKAEIEEKGSDGAASSYQLKQLEEQNARLKDALVRMRDLSSSEKQEHVKLQKLMEKKNQELEVVRQQRERLQEELSQAESTIDELKEQVDAALGAEEMVEMLTDRNLNLEEKVRELRETVGDLEAMNEMNDELQENARETELELREQLDMAGARVREAQKRVEAAQETVADYQQTIKKYRQLTAHLQDVNRELTNQQEASVERQQQPPPETFDFKIKFAETKAHAKAIEMELRQMEVAQANRHMSLLTAFMPDSFLRPGGDHDCVLVLLLMPRLICKAELIRKQAQEKFELSENCSERPGLRGAAGEQLSFAAGLVYSLSLLQATLHRYEHALSQCSVDVYKKVGSLYPEMSAHERSLDFLIELLHKDQLDETVNVEPLTKAIKYYQPPQPAPR

SEQ ID NO: 876875 - protein, 486 aa, Homo sapiens
GRRSSVGSELGAEPLTVQTPSGSRMSAEASARPLRVGSRVEVIGKGHRGTVAYVGATLFATGKWVGVILDEAKGKNDGTVQGRKYFTCDEGHGIFVRQSQIQVFEDGADTTSPETPDSSASKVLKREGTDTTAKTSKLPTRPASTGVAGASSSLGPSGSASAGELSSSEPSTPAQTPLAAPIIPTPVLTSPGAVPPLPSPSKEEEGLRAQVRDLEEKLETLRLKRAEDKAKLKELEKHKIQLEQVQEWKSKMQEQQADLQRRLKEARKEAKEALEAKERYMEEMADTADAIEMATLDKEMAEERAESLQQEVEALKERVDELTTDLEILKAEIEEKGSDGAASSYQLKQLEEQNARLKDALVRMRDLSSSEKQEHVKLQKLMEKKNQELEVVRQQRERLQEELSQAESTIDELKEQVDAALGAEEMVEMLTDRNLNLEEKVRELRETVGDLEAMNEMNDELFGLNREQNCVLSLADIKEKSSSRDC

SEQ ID NO: 876876 - protein, 102 aa, Homo sapiens
MEQVAQLKSLSDTVEKLKDEVLKETVSQRPGATVPTDFATFPSSAFLRAKEEQQDDTVYMGKVTFSCAAGFGQRHRLVLTQEQRYQTGNSHVYDERLRARIP

SEQ ID NO: 876877 - protein, 325 aa, Homo sapiens
MQGRVAGSCAPLGLLLVCLHLPGLFARSIGVVEEKVSQNLGTNLPQLGQPSSTGPSNSEHPQPALDPRSNDLARVPLKLSVPASDGFPPAGGSAVQRWPPSWGLPAMDSWPPEDPWQMMAAAAEDRLGEALPEELSYLSSAAALAPGSGPLPGESSPDATGLSPEASLLHQDSESRRLPRSNSLGAGGKILSQRPPWSLIHRVLPDHPWGTLNPSVSWGGGGPGTGWGTRPMPHPEGIWGINNQPPGTSWGNINRYPGGSWGNINRYPGGSWGNINRYPGGSWGNIHLYPGINNPFPPGVLRPPGSSWNIPAGFPNPPSPRLQWG

SEQ ID NO: 876878 - protein, 68 aa, Homo sapiens
STKQFAFAGEGGIKGRVAKAGDGALGWDQRPMGWDDKCLGHIGSCEKLALMPVWGQIWGQEDSPAICD

SEQ ID NO: 876879 - protein, 107 aa, Homo sapiens
MCLWAGRTHRRRQQAQAPLVTRPTTDPELPVRRMHIYRLNTKEFSKKANDRSGGPELLPLIRIKEVYRCLGPGQFPGKSETSSQVCFVEDTAPLAQGCETSSQTSVK

SEQ ID NO: 876880 - protein, 107 aa, Homo sapiens
ELNVAGAFCTSLNTPGEDISGWVVSCSQTCIRASAAALGLRSGSAGAPEKPLAFLHRRAGRCRGEAACGSPRSSSFPEAAIREVLADLRGSGTVPMEFLFRSTPELS

SEQ ID NO: 876881 - protein, 165 aa, Homo sapiens
MCDQTFLVNVFGSCDKCFKQRALRPVFKKSQQLSYCSTCAEIMATEGLHENETLASLKSEAESLKGKLEEERAKLHDVELHQVAERVEALGQFVMKTRRTLKGHGNKVLCMDWCKDKRRIVSSSQDGKVIVWDSFTTNKEHAVTMPCTWVMACAYAPSGCAIACG

SEQ ID NO: 876882 - protein, 353 aa, Homo sapiens
MATEGLHENETLASLKSEAESLKGKLEEERAKLHDVELHQVAERVEALGQFVMKTRRTLKGHGNKVLCMDWCKDKRRIVSSSQDGKVIVWDSFTTNKEHAVTMPCTWVMACAYAPSGCAIACGGLDNKCSVYPLTFDKNENMAAKKKSVAMHTNYLSACSFTNSDMQILTASGDGTCALWDVESGQLLQSFHGHGADVLCLDLAPSETGNTFVSGGCDKKAMVWDMRSGQCVQAFETHESDINSVRYYPSGDAFASGSDDATCRLYDLRADREVAIYSKESIIFGASSVDFSLSGRLLFAGYNDYTINVWDVLKGSRVSILFGHENRVSTLRVSPDGTAFCSGSWDHTLRVWA

SEQ ID NO: 876883 - protein, 353 aa, Homo sapiens; identical to SEQ ID NO: 876882

SEQ ID NO: 876884 - protein, 299 aa, Homo sapiens
MATEGLHENETLASLKSEAESLKGKLEEERAKLHDVELHQVAERVEALGQFVMKTRRTLKGHGNKVLCMDWCKDKRRIVSSSQDGKVIVWDSFTTNKEHAVTMPCTWVMACAYAPSGCAIACGGLDNKCSVYPLTFDKNENMAAKKKSVAMHTNYLSACSFTNSDMQILTASGDGTCALWDVESGQLLQSFHGHGADVLCLDLAPSETGNTFVSGGCDKKAMVWDMRSGQCVQAFETHESDINSVRKTALALYEFPPMGLLSALDHGIIPSESGPNHLLTVHSCIPENLKSSHVNRYYF

SEQ ID NO: 876885 - protein, 299 aa, Homo sapiens; identical to SEQ ID NO: 876884

SEQ ID NO: 876886 - protein, 299 aa, Homo sapiens; identical to SEQ ID NO: 876884

SEQ ID NO: 876887 - protein, 283 aa, Homo sapiens
MATEGLHENETLASLKSEAESLKGKLEEERAKLHDVELHQVAERVEALGQFVMKTRRTLKGHGNKVLCMDWCKDKRRIVSSSQDGKVIVWDSFTTNKILTASGDGTCALWDVESGQLLQSFHGHGADVLCLDLAPSETGNTFVSGGCDKKAMVWDMRSGQCVQAFETHESDINSVRYYPSGDAFASGSDDATCRLYDLRADREVAIYSKESIIFGASSVDFSLSGRLLFAGYNDYTINVWDVLKGSRVSILFGHENRVSTLRVSPDGTAFCSGSWDHTLRVWA

SEQ ID NO: 876888 - protein, 126 aa, Homo sapiens
MATEGLHENETLASLKSEAESLKGKLEEERAKLHDVELHQVAERVEALGQFVMKTRRTLKGHGNKVLCMDWCKDKRRIVSSSQDGKVIVWDSFTTNKVRHCSQPRYRGFRIPAYLKVLWSSCPALS

SEQ ID NO: 876889 - protein, 353 aa, Homo sapiens; identical to SEQ ID NO: 876882

SEQ ID NO: 876890 - protein, 353 aa, Homo sapiens; identical to SEQ ID NO: 876882

SEQ ID NO: 876891 - protein, 395 aa, Homo sapiens
MCDQTFLVNVFGSCDKCFKQRALRPVFKKSQQLSYCSTCAEIMATEGLHENETLASLKSEAESLKGKLEEERAKLHDVELHQVAERVEALGQFVMKTRRTLKGHGNKVLCMDWCKDKRRIVSSSQDGKVIVWDSFTTNKEHAVTMPCTWVMACAYAPSGCAIACGGLDNKCSVYPLTFDKNENMAAKKKSVAMHTNYLSACSFTNSDMQILTASGDGTCALWDVESGQLLQSFHGHGADVLCLDLAPSETGNTFVSGGCDKKAMVWDMRSGQCVQAFETHESDINSVRYYPSGDAFASGSDDATCRLYDLRADREVAIYSKESIIFGASSVDFSLSGRLLFAGYNDYTINVWDVLKGSRVSILFGHENRVSTLRVSPDGTAFCSGSWDHTLRVWA

SEQ ID NO: 876892 - protein, 305 aa, Homo sapiens
MATEGLHENETLASLKSEAESLKGKLEEERAKLHDVELHQVAERVEALGQFVMKTRRTLKGHGNKVLCMDWCKDKRRIVSSSQDGKVIVWDSFTTNKEHAVTMPCTWVMACAYAPSGCAIACGGLDNKCSVYPLTFDKNENMAAKKKSVAMHTNYLSACSFTNSDMQGCDKKAMVWDMRSGQCVQAFETHESDINSVRYYPSGDAFASGSDDATCRLYDLRADREVAIYSKESIIFGASSVDFSLSGRLLFAGYNDYTINVWDVLKGSRVSILFGHENRVSTLRVSPDGTAFCSGSWDHTLRVWA

SEQ ID NO: 876893 - protein, 93 aa, Homo sapiens
IKGLSCKYSIFGFTFQLLAFNTTERAIVSNTAMITAMQISLQEPIFHSVGRSGIADHMPSVKVILKVWSLGQQHQHHLELVRNEDSQALLYTY

SEQ ID NO: 876894 - protein, 49 aa, Homo sapiens
RPLLAQAGQLGAGRGMGWPGQQVGSVILTGRTSSGSWGDGLGCDCGEFR

SEQ ID NO: 876895 - protein, 146 aa, Homo sapiens
MGRTRETGTEKNTSSLELEESLPEQPETGRQEEELPRFPCKKQDYSPSSGEAQEVPFALSLSSDGAVSPVGELAAGGDRDLESQAGSLVESKARDAAEEVAPPLPMGASVPSIDSMMRKLEEMGLNLRKDQKKTKKRVSFSEQLFT

SEQ ID NO: 876896 - protein, 135 aa, Homo sapiens
MTEVVPSSALSEVSLRLLCHDDIDTVKHLCGDWFPIEYPDSWYRDITSNKKFFSLAATYRGAIVGMIVAEIKNRTKIHKARGWRLFYHPNFSVDTTKSGTSLSLGVVKEVQEARNRFLLTLKGSTVTVLTTGPGH

SEQ ID NO: 876897 - protein, 90 aa, Homo sapiens
MTEVVPSSALSEVSLRLLCHDDIDTVKHLCGDWFPIEYPDSWYRDITSNKKFFSLAATYRGAIVGMIVAEIKNRTKIHKDGDILISATII

SEQ ID NO: 876898 - protein, 90 aa, Homo sapiens; identical to SEQ ID NO: 876897

SEQ ID NO: 876899 - protein, 140 aa, Homo sapiens
QVRGWVLNRPRVESAWWLPVEPGLSLVTRTRQLRDGPASSQVHSPVLARRISPFCASLDRLVLWSLFLPPAWILPRAGRPVAETRGTVLLTQLPLVTFAWLWYKIVGITEESPSLRVSTDAVTATCVLVKCPSSPPCVLR

SEQ ID NO: 876900 - protein, 110 aa, Homo sapiens
KTESHSETQATVPWHNLGSLQPPSSGSSNSPASASRVAEITGAHHHAWLIFVFLVETGFHHVGQAGLELLTSDDPPTSASQSAGIIGMSHHAQPTLAFEGNIFMFIGKKA

SEQ ID NO: 876901 - protein, 44 aa, Homo sapiens
MGMYPPLLLKIYLSRHISILFYLKILYKSGIIWLSWYSFILLVL

SEQ ID NO: 876902 - protein, 177 aa, Homo sapiens
LPLQTCQGPGELDPPRHTIAPEMAGDTEVWKQMFQELMREVKPWHRWTPEFTQENISRILKNLVFRILKKCYRGRFQLIEEVPMIKDISLEGPHNSDNCEACLQGFCAGPIQVTSLPPSQTPRVHSIYKVEEVVKPWASGENVYSYACQNHICRNLSIFCCCVILIVIVVIVVKTAI

SEQ ID NO: 876903 - protein, 254 aa, Homo sapiens
LPLQTCQGPGELDPPRHTIAPEMAGDTEVWKQMFQELMREVKPWHRWTLRPDKGLLPNVLKPGWMQYQQWTFARFQCSSCSRNWASAQVLVLFHMNWSEEKSRGQVKMRVFTQRCKKCPQPLFEDPEFTQENISRILKNLVFRILKKCYRGRFQLIEEVPMIKDISLEGPHNSDNCEACLQGFCAGPIQVTSLPPSQTPRVHSIYKVEEVVKPWASGENVYSYACQNHICRNLSIFCCCVILIVIVVIVVKTAI

SEQ ID NO: 876904 - protein, 34 aa, Homo sapiens [sequence omitted]

SEQ ID NO: 876905 - protein, 34 aa, Homo sapiens [sequence omitted]

SEQ ID NO: 876906 - protein, 119 aa, Homo sapiens
YPIGLAQVHNKSYQLIAKCYTFLARENKANFDNIKPSITLCIEFFFSKTESCSVTRLECSGTISAHCNLCPLGSSDSPASASQVAGTTGACHPNQLIFVFLVETGFHHVGQDGLNLLTL

SEQ ID NO: 876907 - protein, 38 aa, Homo sapiens
MYLSVTESDLNEENLASTVPDQTEAPSVMETASRSSGR

SEQ ID NO: 876908 - protein, 124 aa, Homo sapiens
CLLLMRDTSVSLTQNPEAYFSIPPHFLSPPMSPGACPSSWSLISCVILGESIYISGFHVPHPYKGGNGHPIPSIWYALNVHNMFPFTKFSPKFVSLPNPQIYTLKPNPQCDGIRKWGFGEVIRS

SEQ ID NO: 876909 - protein, 111 aa, Homo sapiens
HLVCSLLYMWLAEKGRWSRYFEHDWHNCQHLYLQLDFTGCSLLERNMIWGYFSLKGKLYRRLPYPHYLFYFLGLGPLRTSCGFMVPGIVSPDHESPVLECPLQKSVCFASS

SEQ ID NO: 876910 - protein, 80 aa, Homo sapiens
AVMSGGVGGGLGSTCGLGSGKGSPGSCCTSIVTGGSNIILGSGKDPVLDSCSVSGSSAGSSCHTILKKTVESSLKTSITY

SEQ ID NO: 876911 - protein, 347 aa, Homo sapiens
MALDILAMAPLYQAPAINRIGPKTDPSKRPADPLKPLVLSRTKLTTIEAKRIMSILDEAIYKVELVTLLSYVASNREDMEGMLGEDVMRAVREHEDLCQVLLENVRCLKEKERQLQEQKEAEEEGWLRDRLLSIELQKSSLSPLMQQIKDSTKNVLRLLLSNPQAARLLQMQTQGRSAEAQNFIDSLIELRGFLFEKLLTSPMEARDKAQFLQDISRQNSNNQQIIDTLEKELAERMKNRNAEEELEDLDAVHREEKISLEELRRRHKVLVGEFAQIREEREINSKKRMEAEQEMVRMVRAATLIQALWKGYLVRSLLRSKKKRGKGKAKDKEKGKQKGKEKGKGKK

SEQ ID NO: 876912 - protein, 252 aa, Homo sapiens
MALDILAMAPLYQAPAINRIGPKTDPSKRPADPLKPLVLSRTKLTTIEAKRIMSILDEAIYKVELVTLLSYVASNREDMEGMLGEDVMRAVREHEDLCQVLLENVRCLKEKERQLQEQKEAEEEGWLRDRLLSIELQKSSLSPLMQQIKDSTKNVLRLLLSNPQAARLLQMQTQGRSAEAQNFIDSLIELRGFLFEKLLTSPMEARDKAQFLQDISRQNSNNQQIIDTLEKELAERMKNRNAEVEKENFVIQ

SEQ ID NO: 876913 - protein, 252 aa, Homo sapiens; identical to SEQ ID NO: 876912

SEQ ID NO: 876914 - protein, 347 aa, Homo sapiens; identical to SEQ ID NO: 876911

SEQ ID NO: 876915 - protein, 116 aa, Homo sapiens
LEVAERGGQHSSSQQLPHCSQSWAQWKLWRQRPGFAIWAPLPHWRGTSPIQQSSSPAAEGPAATAAGAVCLPAGGAGEQEKEPVSRGSSRSSCSQRRPPPPGMEVCPQLGIWAICP

SEQ ID NO: 876916 - protein, 84 aa, Homo sapiens
SLQLALRRLGRSCKELPLRQRGVLAGLEMLPPLTLGPRLRSPREVQPSNTETRCLQSSRGPRCSPIAGTRNGDTSDGLFLAGVS

SEQ ID NO: 876917 - protein, 79 aa, Homo sapiens
LGRGEKLLPVENHLSRERLQQIQMFWQRWEPGSSDSEDCWSPQGKSALWWPESVPAVERSSEPRPRLGAEPTADSEVKG

SEQ ID NO: 876918 - protein, 173 aa, Homo sapiens
SYCLVQLGGEDRLSSRVTRKGPQAETQGRYTEAANCDPCGALSWPVCGHYRPLVLGVFRQSSVSLEDGIIPTPSSLIKNYASPVFFPQMTPEREFGVWGPVCPRLALHNSVVSLSGGHTMGGLLAIGISDLFSRDNLCPKQLCSAQGAGVRGYQSCSPLCRPSVSYIRNLQTI

SEQ ID NO: 876919 - protein, 46 aa, Homo sapiens
VLWYLEKGLVVTGPPALVKQTKSFQNNPISIFYGDTRLINQKTIID

SEQ ID NO: 876920 - protein, 226 aa, Homo sapiens
MSSPQAPEDGQGCGDRGDPPGDLRSVLVTTVLNLEPLDEDLFRGRHYWVPAKRLFGGQIVGQALVAAAKSVSEDVHVHSLHCYFVRAGDPKLPVLYQVERTRTGSSFSVRSVKAVQHGKPIFICQASFQQAQPSPMQHQFSMPTVPPPEELLDCETLIDQYLRDPNLQKRYPLALNRIAAQEVPIEIKPVNPSPLSQLQRMEPKQMFWVRARGYIGPELESPGAQG

SEQ ID NO: 876921 - protein, 319 aa, Homo sapiens
MSSPQAPEDGQGCGDRGDPPGDLRSVLVTTVLNLEPLDEDLFRGRHYWVPAKRLFGGQIVGQALVAAAKSVSEDVHVHSLHCYFVRAGDPKLPVLYQVERTRTGSSFSVRSVKAVQHGKPIFICQASFQQAQPSPMQHQFSMPTVPPPEELLDCETLIDQYLRDPNLQKRYPLALNRIAAQEVPIEIKPVNPSPLSQLQRMEPKQMFWVRARGYIGEGDMKMHCCVAAYISDYAFLGTALLPHQWQHKVHFMVSLDHSMWFHAPFRADHWMLYECESPWAGGSRGLVHGRLWRQDGVLAVTCAQEGVIRVKPQVSESKL

SEQ ID NO: 876922 - protein, 241 aa, Homo sapiens
MSSPQAPEDGQGCGDRGDPPGDLRSVLVTTVLNLEPLDEDLFRGRHYWVPAKRLFGGQIVGQALVAAAKSVSEDVHVHSLHCYFVRAGDPKLPVLYQVERTRTGSSFSVRSVKAVQHGKPIFICQASFQQAQPSPMQHQFSMPTVPPPEELLDCETLIDQYLRDPNLQKRYPLALNRIAAQEVPIEIKPVNPSPLSQLQRMEPKQMFWVRARGYIGKSTPWMGGNHSPRGLPLICCVALGT

SEQ ID NO: 876923 - protein, 113 aa, Homo sapiens
MSSPQAPEDGQGCGDRGDPPGDLRSVLVTTVLNLEPLDEDLFRGRHYWVPAKRLFGGQIVGQALVAAAKSVSEDVHVHSLHCYFVRAEQMPSCVLRRSPAEKSLWTFTVCDLY

SEQ ID NO: 876924 - protein, 319 aa, Homo sapiens; identical to SEQ ID NO: 876921

SEQ ID NO: 876925 - protein, 184 aa, Homo sapiens
MQHQFSMPTVPPPEELLDCETLIDQYLRDPNLQKRYPLALNRIAAQEVPIEIKPVNPSPLSQLQRMEPKQMFWVRARGYIGEGDMKMHCCVAAYISDYAFLGTALLPHQWQHKVHFMVSLDHSMWFHAPFRADHWMLYECESPWAGGSRGLVHGRLWRQDGVLAVTCAQEGVIRVKPQVSESKL

SEQ ID NO: 876926 - protein, 226 aa, Homo sapiens; identical to SEQ ID NO: 876920

SEQ ID NO: 876927 - protein, 266 aa, Homo sapiens
MGRAVATAAIPLGTSVASWSRPCSTSSRWTRISSGDPKLPVLYQVERTRTGSSFSVRSVKAVQHGKPIFICQASFQQAQPSPMQHQFSMPTVPPPEELLDCETLIDQYLRDPNLQKRYPLALNRIAAQEVPIEIKPVNPSPLSQLQRMEPKQMFWVRARGYIGEGDMKMHCCVAAYISDYAFLGTALLPHQWQHKVHFMVSLDHSMWFHAPFRADHWMLYECESPWAGGSRGLVHGRLWRQDGVLAVTCAQEGVIRVKPQVSESKL

SEQ ID NO: 876928 - protein, 254 aa, Homo sapiens
MSSPQAPEDGQGCGDRGDPPGDLRSVLVTTVLNLEPLDEDLFRGRHYWVPAKRLFGGQIVGQALVAAAKSVSEDVHVHSLHCYFVRAGDPKLPVLYQVERTRTGSSFSVRSVKAVQHGKPIFICQASFQQAQPSPMQHQFSMPTVPPPEELLDCETLIDQYLRDPNLQKRYPLALNRIAAQEVPIEIKPVNPSPLSQLQRMEPKQMFWVRARGYIGGSRGLVHGRLWRQDGVLAVTCAQEGVIRVKPQVSESKL

SEQ ID NO: 876929 - protein, 132 aa, Homo sapiens
MSSPQAPEDGQGCGDRGDPPGDLRSVLVTTVLNLEPLDEDLFRGRHYWVPAKRLFGGQIVGQALVAAAKSVSEDVHVHSLHCYFVRAEQMPSCVLRRSPAEKSLWTFTGTRSCQYCTKWSGHEQGRASRCAL

SEQ ID NO: 876930 - protein, 163 aa, Homo sapiens
MSSPQAPEDGQGCGDRGDPPGDLRSVLVTTVLNLEPLDEDLFRGRHYWVPAKRLFGGQIVGQALVAAAKSVSEDVHVHSLHCYFVRAGDPKLPVLYQVERTRTGSSFSVRSVKAVQHGKPIFICQASFQQAQPSPMQHQFSMPTVPPPEELLDCETLIDQYLR

SEQ ID NO: 876931 - protein, 319 aa, Homo sapiens; identical to SEQ ID NO: 876921

SEQ ID NO: 876932 - protein, 110 aa, Homo sapiens
MHCCVAAYISDYAFLGTALLPHQWQHKVHFMVSLDHSMWFHAPFRADHWMLYECESPWAGECGAVWDKGTDLEWQEPAFLGDADFPTSCVALHRSLPFLPSQALASSSSK

SEQ ID NO: 876933 - protein, 240 aa, Homo sapiens
MIPPPVPFGDPKLPVLYQVERTRTGSSFSVRSVKAVQHGKPIFICQASFQQAQPSPMQHQFSMPTVPPPEELLDCETLIDQYLRDPNLQKRYPLALNRIAAQEVPIEIKPVNPSPLSQLQRMEPKQMFWVRARGYIGEGDMKMHCCVAAYISDYAFLGTALLPHQWQHKVHFMVSLDHSMWFHAPFRADHWMLYECESPWAGGSRGLVHGRLWRQDGVLAVTCAQEGVIRVKPQVSESKL

SEQ ID NO: 876934 - protein, 340 aa, Homo sapiens
MSSPQAPEDGQGCGDRGDPPGDLRSVLVTTVLNLEPLDEDLFRGRHYWVPAKRLFGGQIVGQALVAAAKSVSEDVHVHSLHCYFVRAEQMPSCVLRRSPAEKEFVDLYRDPKLPVLYQVERTRTGSSFSVRSVKAVQHGKPIFICQASFQQAQPSPMQHQFSMPTVPPPEELLDCETLIDQYLRDPNLQKRYPLALNRIAAQEVPIEIKPVNPSPLSQLQRMEPKQMFWVRARGYIGEGDMKMHCCVAAYISDYAFLGTALLPHQWQHKVHFMVSLDHSMWFHAPFRADHWMLYECESPWAGGSRGLVHGRLWRQDGVLAVTCAQEGVIRVKPQVSESKL

SEQ ID NO: 876935 - protein, 226 aa, Homo sapiens; identical to SEQ ID NO: 876920

SEQ ID NO: 876936 - protein, 147 aa, Homo sapiens
MIPPPVPFGDPKLPVLYQVERTRTGSSFSVRSVKAVQHGKPIFICQASFQQAQPSPMQHQFSMPTVPPPEELLDCETLIDQYLRDPNLQKRYPLALNRIAAQEVPIEIKPVNPSPLSQLQRMEPKQMFWVRARGYIGPELESPGAQG

SEQ ID NO: 876937 - protein, 91 aa, Homo sapiens
GSALIPQPVEKERRRCAVFRGGVSSGPCRKKEPRPGSLFCPFLTPHSVTKRWKQKDTYNVVQPPDFTYEGIVPRKLNNLPDVIMYLLSERI

SEQ ID NO: 876938 - protein, 653 aa, Homo sapiens
MKLLWQVTVHHHTWNAILLPFVYLTAQVWILCAAIAAAASAGPQNCPSVCSCSNQFSKVVCTRRGLSEVPQGIPSNTRYLNLMENNIQMIQADTFRHLHHLEVLQLGRNSIRQIEVGAFNGLASLNTLELFDNWLTVIPSGAFEYLSKLRELWLRNNPIESIPSYAFNRVPSLMRLDLGELKKLEYISEGAFEGLFNLKYLNLGMCNIKDMPNLTPLVGLEELEMSGNHFPEIRPGSFHGLSSLKKLWVMNSQVSLIERNAFDGLASLVELNLAHNNLSSLPHDLFTPLRYLVELHLHHNPWNCDCDILWLAWWLREYIPTNSTCCGRCHAPMHMRGRYLVEVDQASFQCSAPFIMDAPRDLNISEGRMAELKCRTPPMSSVKWLLPNGTVLSHASRHPRISVLNDGTLNFSHVLLSDTGVYTCMVTNVAGNSNASAYLNVSTAELNTSNYSFFTTVTVETTEISPEDTTRKYKPVPTTSTGYQPAYTTSTTVLIQTTRVPKQVAVPATDTTDKMQTSLDEVMKTTKIIIGCFVAVTLLAAAMLIVFYKLRKRHQQRSTVTAARTVEIIQVDEDIPAATSAAATAAPSGVSGEGAVVLPTIHDHINYNTYKPAHGAHWTENSLGNSLHPTVTTISEPYIIQTHTKDKVQETQI

SEQ ID NO: 876939 - protein, 653 aa, Homo sapiens; identical to SEQ ID NO: 876938

SEQ ID NO: 876940 - protein, 73 aa, Homo sapiens
NDTELIRYVTITNCSPLVVKFRWFFLVNDEENQIRYPQHRTLTELCFSFVFSFRLFMGFSVFHVLAIHEYFPF

SEQ ID NO: 876941 - protein, 73 aa, Homo sapiens; identical to SEQ ID NO: 876940

SEQ ID NO: 876942 - protein, 72 aa, Homo sapiens
KDTAPVLEGLKEEEMTKEEISILSNACSKLQEQKKSLTRKKEELELWQGRFSPAVFLVYRSSFLTFYFPPIL

SEQ ID NO: 876943 - protein, 72 aa, Homo sapiens; identical to SEQ ID NO: 876942

SEQ ID NO: 876944 - protein, 101 aa, Homo sapiens
EQSRNPRSVPPGDRWEHMGFTKKGKPPRASPSESLRSFSIRTETHWALRRWILKTQSCGSRRWWPGRPRVKEGFLPVPSPGPLLTEGSSSQAGQKGPAMPL

SEQ ID NO: 876945 - protein, 76 aa, Homo sapiens
QGAAREQAPVNMHFASFSLYRVADEPLANASHKTGPELTWEVTPRMWIQGGMTKSEAITSTISAKKRGFLLFIIST

SEQ ID NO: 876946 - protein, 110 aa, Homo sapiens
TPSPSDPGVQAPAPPPSDPGVQTPNPFSLRPRSPGPSPSSLRPRSPGPQPLHPQIFKWNLGPGTVAHACNSKALGGQVGKTEPRKLRLQGAVIVPQQSSLGDRPRSCLKK

SEQ ID NO: 876947 - protein, 63 aa, Homo sapiens
MDSLSLFQLTNFSLVPVQWRTAYAGVCGFLWATFICFSQQSGDGTFKSAFTILYTKGTSATEG

SEQ ID NO: 876948 - protein, 288 aa, Homo sapiens
MPQNEYIELHRKRYGYRLDYHEKKRKKESREAHERSKKAKKMIGLKAKLYHKQRHAEKIQMKKTIKMHEKRNTKQKNDEKTPQGAVPAYLLDREGQSRAKVLSNMIKQKRKEKAGKWEVPLPKVRAQGETEVLKVIRTGKRKKKAWKRMVTKVCFVGDGFTRKPPKYERFIRPMGLRFKKAHVTHPELKATFCLPILGVKKNPSSPLYTTLGVITKGTVIEVNVSEFGLCTGEYWGNARSPPEMWVLSGLGGRLFLGAPELSGFSPPRGDLFGKKGALVAGLFRASSR

SEQ ID NO: 876949 - protein, 260 aa, Homo sapiens
MPQNEYIELHRKRYGYRLDYHEKKRKKESREAHERSKKAKKMIGLKAKLYHKQRHAEKIQMKKTIKMHEKRNTKQKNDEKTPQGAVPAYLLDREGQSRAKVLSNMIKQKRKEKAGKWEVPLPKVRAQGETEVLKVIRTGKRKKKAWKRMVTKVCFVGDGFTRKPPKYERFIRPMGLRFKKAHVTHPELKATFCLPILGVKKNPSSPLYTTLGVITKGTVIEVNVSELGLVTQGGKVIWGKYAQVTNNPENDGCINAVLLV

SEQ ID NO: 876950 - protein, 260 aa, Homo sapiens; identical to SEQ ID NO: 876949

SEQ ID NO: 876951 - protein, 260 aa, Homo sapiens; identical to SEQ ID NO: 876949

SEQ ID NO: 876952 - protein, 260 aa, Homo sapiens; identical to SEQ ID NO: 876949

SEQ ID NO: 876953 - protein, 156 aa, Homo sapiens
MIKQKRKEKAGKWEVPLPKVRAQGETEVLKVIRTGKRKKKAWKRMVTKVCFVGDGFTRKPPKYERFIRPMGLRFKKAHVTHPELKATFCLPILGVKKNPSSPLYTTLGVITKGTVIEVNVSELGLVTQGGKVIWGKYAQVTNNPENDGCINAVLLV

SEQ ID NO: 876954 - protein, 151 aa, Homo sapiens
MPQNEYIELHRKRYGYRLDYHEKKRKKESREAHERSKKAKKMIGLKAKLYHKQRHAEKIQMKKTIKMHEKRNTKQKNDEKTPQGAVPAYLLDREGQSRAKVLSNMIKQKRKEKAGREWLLKCALLEMALQENHLNMKDSSGQWACVSRKPM

SEQ ID NO: 876955 - protein, 157 aa, Homo sapiens
IPWPRPPEVPGVQMESRSLSAQCQGETEVLKVIRTGKRKKKAWKRMVTKVCFVGDGFTRKPPKYERFIRPMGLRFKKAHVTHPELKATFCLPILGVKKNPSSPLYTTLGVITKGTVIEVNVSELGLVTQGGKVIWGKYAQVTNNPENDGCINAVLLV

SEQ ID NO: 876956 - protein, 193 aa, Homo sapiens
MPQNEYIELHRKRYGYRLDYHEKKRKKESREAHERSKKAKKMIGLKAKLYHKQRHAEKIQMKKTIKMHEKRNTKQKNDEKTPQGAVPAYLLDREGQSRAKVLSNMIKQKRKEKAGKWEVPLPKVRAQGETEVLKVIRTGKRKKKAWKRMVTKVCFVGDGFTRKPPKYERFIRPMRRGFTVLARMVSISVIRPP

SEQ ID NO: 876957 - protein, 260 aa, Homo sapiens; identical to SEQ ID NO: 876949

SEQ ID NO: 876958 - protein, 241 aa, Homo sapiens
LEDTRRDEMKMNEPAAMKAAALHLPQRMRTMRMTKMMRMTMTMRKMTLKYKALSSTLYTSVSPQGAVPAYLLDREGQSRAKVLSNMIKQKRKEKAGKWEVPLPKVRAQGETEVLKVIRTGKRKKKAWKRMVTKVCFVGDGFTRKPPKYERFIRPMGLRFKKAHVTHPELKATFCLPILGVKKNPSSPLYTTLGVITKGTVIEVNVSELGLVTQGGKVIWGKYAQVTNNPENDGCINAVLLV

SEQ ID NO: 876959 - protein, 166 aa, Homo sapiens
MCRERTRAKYFHMLTERQRGGKWEVPLPKVRAQGETEVLKVIRTGKRKKKAWKRMVTKVCFVGDGFTRKPPKYERFIRPMGLRFKKAHVTHPELKATFCLPILGVKKNPSSPLYTTLGVITKGTVIEVNVSELGLVTQGGKVIWGKYAQVTNNPENDGCINAVLLV

SEQ ID NO: 876960 - protein, 246 aa, Homo sapiens
MPQNEYIELHRKRYGYRLDYHEKKRKKESREAHERSKKAKKMIGLKAKLYHKQRHAEKIQMKKTIKMHEKRNTKQKNDEKTPQGAVPAYLLDREGQSRAKVLSNMIKQKRKEKAGKWEVPLPKVRAQGETEVLKVIRTGKRKKKAWKRMVTKVCFVGDGFTRKPPKYERFIRPMGLRFKKAHVTHPELKATFCLPILGVKKNPSSPLYTTLGVITKGTVIEVNVSEFVTQSKYWGNMPGTHLKWRC

SEQ ID NO: 876961 - protein, 184 aa, Homo sapiens
MPQNEYIELHRKRYGYRLDYHEKKRKKESREAHERSKKAKKMIGLKAKLYHKQRHAEKIQMKKTIKMHEKRNTKQKNDEKTPQGAVPAYLLDREGQSRAKVLSNMIKQKRKEKAGKWEVPLPKVRAQGETEVLKVIRTGKRKKKAWKRMVTKVCFVGDGFTRKPPKYERFIRPMQFENLSRTVL

SEQ ID NO: 876962 - protein, 358 aa, Homo sapiens
SLPGLPSTLSRSESWDHMGTLPWLLAFFILGLQAWDTPTIVSRKEWGARPLACRALLTLPVAYIITDQLPGMQCQQQSVCSQMLRGLQSHSVYTIGWCDVAYNFLVGDDGRVYEGVGWNIQGLHTQGYNNISLGIAFFGNKISSSPSPAALSAAEGLISYAIQKGHLSPRYIQPLLLKEETCLDPQHPVMPRKVCPNIIKRSAWEARETHCPKMNLPAKYVIIIHTAGTSCTVSTDCQTVVRNIQSFHMDTRNFCDIGYHFLVGQDGGVYEGVGWHIQGSHTYGFNDIALGIAFIGYFVEKPPNAAALEAAQDLIQCAVVEGYLTPNYLLMGHSDVVNILSPGQALYNIISTWPHFKH

SEQ ID NO: 876963 - protein, 302 aa, Homo sapiens
PSLGRGLGVALPVFWEGRMAAPGLRLGAGRLFEMPAVLERLSRYNSTSQAFAEVLRLPKQQLRKLLYPLQEVERFLAPYGRQDLHLRIFDPSPEDIARADNIFTATERNRIDYVSSAVRIDHAPDLPRPEVCFIGRSNVGKSSLIKALFSLAPEVEVRVSKKPGHTKKMNFFKVGKHFTVVDMPGYGFRAPEDFVDMVETYLKERRNLKRTFLLVDSVVGIQKTDNIAIEMCEEFALPYVIVLTKIDKSSKGHLLKQVLQIQKFVNMKTQGCFPQLFPVSAVTFSGIHLLRCFIASVTGSLD

SEQ ID NO: 876964 - protein, 311 aa, Homo sapiens
RRGSGKSRTRNPGHRSKISLPVFWEGRMAAPGLRLGAGRLFEMPAVLERLSRYNSTSQAFAEVLRLPKQQLRKLLYPLQEVERFLAPYGRQDLHLRIFDPSPEDIARADNIFTATERNRIDYVSSAVRIDHAPDLPRPEVCFIGRSNVGKSSLIKALFSLAPEVEVRVSKKPGHTKKMNFFKVGKHFTVVDMPGYGFRAPEDFVDMVETYLKERRNLKRTFLLVDSVVGIQKTDNIAIEMCEEFALPYVIVLTKIDKSSKGHLLKQVLQIQKFVNMKTQGCFPQLFPVSAVTFSGIHLLRCFIASVTGSLD

SEQ ID NO: 876965 - protein, 173 aa, Homo sapiens
MVCFIGRSNVGKSSLIKALFSLAPEVEVRVSKKPGHTKKMNFFKVGKHFTVVDMPGYGFRAPEDFVDMVETYLKERRNLKRTFLLVDSVVGIQKTDNIAIEMCEEFALPYVIVLTKIDKSSKGHLLKQVLQIQKFVNMKTQGCFPQLFPVSAVTFSGIHLLRCFIASVTGSLD

SEQ ID NO: 876966 - protein, 269 aa, Homo sapiens
PSLGRGLGVALPVFWEGRMAAPGLRLGAGRLFEMPAVLERLSRYNSTSQAFAEVLRLPKQQLRKLLYPLQEVERFLAPYGRQDLHLRIFDPSPEDIARADNIFTATERNRIDYVSSAVRIDHAPDLPRPEGHTKKMNFFKVGKHFTVVDMPGYGFRAPEDFVDMVETYLKERRNLKRTFLLVDSVVGIQKTDNIAIEMCEEFALPYVIVLTKIDKSSKGHLLKQVLQIQKFVNMKTQGCFPQLFPVSAVTFSGIHLLRCFIASVTGSLD

SEQ ID NO: 876967 - protein, 311 aa, Homo sapiens; identical to SEQ ID NO: 876964

SEQ ID NO: 876968 - protein, 144 aa, Homo sapiens
MPAVLERLSRYNSTSQAFAEVLRLPKQQLRKLLYPLQEVERFLAPYGRQDLHLRIFDPSPEDIARADNIFTATERNRIDYVSSAVRIDHAPDLPRPEVRGDSTVHLRAGVTALPLPGRPARGVFYRQKQCWKIISNQGFIFTGP

SEQ ID NO: 876969 - protein, 106 aa, Homo sapiens
MPAVLERLSRYNSTSQAFAEVLRLPKQQLRKLLYPLQEVERFLAPYGRQDLHLRIFDPSPEDIARADNIFTATERNRIDYVSSAVRIDHAPDLPRPELEENIFISG

SEQ ID NO: 876970 - protein, 172 aa, Homo sapiens
PSLGRGLGVALPVFWEGRMAAPGLRLGAGRLFEMPAVLERLSRYNSTSQAFAEVLRLPKQQLRKLLYPLQEVERFLAPYGRQDLHLRIFDPSPEDIARADNIFTATERNRIDYVSSAVRIDHAPDLPRPEVCFIGRSNVGKSSLIKALFSLAPEVEVRVSKKPLEENIFISG

SEQ ID NO: 876971 - protein, 187 aa, Homo sapiens
MLHLRIFDPSPEDIARADNIFTATERNRIDYVSSAVRIDHAPDLPRPEGHTKKMNFFKVGKHFTVVDMPGYGFRAPEDFVDMVETYLKERRNLKRTFLLVDSVVGIQKTDNIAIEMCEEFALPYVIVLTKIDKSSKGHLLKQVLQIQKFVNMKTQGCFPQLFPVSAVTFSGIHLLRCFIASVTGSLD

SEQ ID NO: 876972 - protein, 1053 aa, Homo sapiens
MSSEESYRAILRYLTNEREPYAPGTEGNVKRKIRKAAACYVVRGGTLYYQRRQRHRKTFAELEVVLQPERRRDLIEAAHLGPGGTHHTRHQTWHYLSKTYWWRGILKQVKDYIKQCSKCQEKLDRSRPISDVSEMLEELGLDLESGEESNESEDDLSNFTSSPTTASKPAKKKPVSKHELVFVDTKGVVKRSSPKHCQAVLKQLNEQRLSNQFCDVTLLIEGEEYKAHKSVLSANSEYFRDLFIEKGAVSSHEAVVDLSGFCKASFLPLLEFAYTSVLSFDFCSMADVAILARHLFMSEVLEICESVHKLMEEKQLTVYKKGEVQTVASTQDLRVQNGGTAPPVASSEGTTTSLPTELGDCEIVLLVNGELPEAEQNGEVGRQPEPQVSSEAESALSSVGCIADSHPEMESVDLITKNNQTELETSNNRENNTVSNIHPKLSKENVISSSPEDSGMGNDISAEDICAEDIPKHRQKVDQPLKDQENLVASTAKTDFGPDDDTYRSRLRQRSVNEGAYIRLHKGMEKKLQKRKAVPKSAVQQVAQKLVQRGKKMKQPKRDAKENTEEASHKCGECGMVFQRRYALIMHKLKHERARDYKCPLCKKQFQYSASLRAHLIRHTRKDAPSSSSSNSTSNEASGTSSEKGRTKREFICSICGRTLPKLYSLRIHMLKHTGVKPHACQVCGKTFIYKHGLKLHQSLHQSQKQFQCELCVKSFVTKRSLQEHMSIHTGESKYLCSVCGKSFHRGSGLSKHFKKHQPKPEVRGYHCTQCEKSFFEARDLRQHMNKHLGVKPFQCQFCDKCYSWKKDWYSHVKSHSVTEPYRCNICGKEFYEKALFRRHVKKATHGKKGRAKQNLERVCEKCGRKFTQLREYRRHMNNHEGVKPFECLTCGVAWADARSLKRHVRTHTGERPYVCPVCSEAYIDARTLRKHMTKFHRDYVPCKIMLEKDTLQFHNQGTQVAHAVSILTAGMQEQESSGPQELETVVVTGETMEALEAVAATEEYPSVSTLSDQSIMQVVNYVLAQQQGQKLSEVAEAIQTVKVEVAHISGGE

SEQ ID NO: 876973 - protein, 103 aa, Homo sapiens
VADYSVATSKLGSLEAQDPYLITINRSHGRSAFTQAMFEVGTALWQRQNVGTLLWHETLITQAPKGVLYRPVFICSGFLDQQKWSIPGGLTRYTIPLFRGEKD

SEQ ID NO: 876974 - protein, 300 aa, Homo sapiens [sequence omitted]

SEQ ID NO: 876975 - protein, 738 aa, Homo sapiens
MSSEESYRAILRYLTNEREPYAPGTEGNVKRKIRKAAACYVVRGGTLYYQRRQRHRKTFAELEVVLQPERRRDLIEAAHLGPGGTHHTRHQTWHYLSKTYWWRGILKQVKDYIKQCSKCQEKLDRSRPISDVSEMLEELGLDLESGEESNESEDDLSNFTSSPTTASKPAKKKPVSKHELVFVDTKGVVKRSSPKHCQAVLKQLNEQRLSNQFCDVTLLIEGEEYKAHKSVLSANSEYFRDLFIEKGAVSSHEAVVDLSGFCKASFLPLLEFAYTSVLSFDFCSMADVAILARHLFMSEVLEICESVHKLMEEKQLTVYKKGEVQTVASTQDLRVQNGGTAPPVASSEGTTTSLPTELGDCEIVLLVNGELPEAEQNGEVGRQPEPQVSSEAESALSSVGCIADSHPEMESVDLITKNNQTELETSNNRENNTVSNIHPKLSKENVISSSPEDSGMGNDISAEDICAEDIPKHRQKVDQPLKDQENLVASTAKTDFGPDDDTYRSRLRQRSVNEGAYIRLHKGMEKKLQKRKAVPKSAVQQVAQKLVQRGKKMKQPKRDAKENTEEASHKCGECGMVFQRRYALIMHKLKHERARDYKCPLCKKQFQYSASLRAHLIRHTRKDAPSSSSSNSTSNEASGTSSEKGRTKREFICSICGRTLPKLYSLRIHMLKHTGVKPHACQVCGKTFIYKHGLKLHQSLHQSQKQFQCELCVKSFVTKRSLQEHMSIHTGNEKFILT

SEQ ID NO: 876976 - protein, 563 aa, Homo sapiens
MSSEESYRAILRYLTNEREPYAPGTEGNVKRKIRKAAACYVVRGGTLYYQRRQRHRKTFAELEVVLQPERRRDLIEAAHLGPGGTHHTRHQTWHYLSKTYWWRGILKQVKDYIKQCSKCQEKLDRSRPISDVSEMLEELGLDLESGEESNESEDDLSNFTSSPTTASKPAKKKPVSKHELVFVDTKGVVKRSSPKHCQAVLKQLNEQRLSNQFCDVTLLIEGEEYKAHKSVLSANSEYFRDLFIEKGAVSSHEAVVDLSGFCKASFLPLLEFAYTSVLSFDFCSMADVAILARHLFMSEVLEICESVHKLMEEKQLTVYKKGEVQTVASTQDLRVQNGGTAPPVASSEGTTTSLPTELGDCEIVLLVNGELPEAEQNGEVGRQPEPQVSSEAESALSSVGCIADSHPEMESVDLITKNNQTELETSNNRENNTVSNIHPKLSKENVISSSPEDSGMGNDISAEDICAEDIPKHRQKVDQPLKDQENLVASTAKTDFGPDDDTYRSRLRQRSVNEGAYIRLHKGMEKKLQKRKAVPKSAVQQVALKLVLEDHCFLVPACLLLRC

SEQ ID NO: 876977 - protein, 106 aa, Homo sapiens [sequence omitted]

SEQ ID NO: 876978 - protein, 919 aa, Homo sapiens
MLEELGLDLESGEESNESEDDLSNFTSSPTTASKPAKKKPVSKHELVFVDTKGVVKRSSPKHCQAVLKQLNEQRLSNQFCDVTLLIEGEEYKAHKSVLSANSEYFRDLFIEKGAVSSHEAVVDLSGFCKASFLPLLEFAYTSVLSFDFCSMADVAILARHLFMSEVLEICESVHKLMEEKQLTVYKKGEVQTVASTQDLRVQNGGTAPPVASSEGTTTSLPTELGDCEIVLLVNGELPEAEQNGEVGRQPEPQVSSEAESALSSVGCIADSHPEMESVDLITKNNQTELETSNNRENNTVSNIHPKLSKENVISSSPEDSGMGNDISAEDICAEDIPKHRQKVDQPLKDQENLVASTAKTDFGPDDDTYRSRLRQRSVNEGAYIRLHKGMEKKLQKRKAVPKSAVQQVAQKLVQRGKKMKQPKRDAKENTEEASHKCGECGMVFQRRYALIMHKLKHERARDYKCPLCKKQFQYSASLRAHLIRHTRKDAPSSSSSNSTSNEASGTSSEKGRTKREFICSICGRTLPKLYSLRIHMLKHTGVKPHACQVCGKTFIYKHGLKLHQSLHQSQKQFQCELCVKSFVTKRSLQEHMSIHTGESKYLCSVCGKSFHRGSGLSKHFKKHQPKPEVRGYHCTQCEKSFFEARDLRQHMNKHLGVKPFQCQFCDKCYSWKKDWYSHVKSHSVTEPYRCNICGKEFYEKALFRRHVKKATHGKKGRAKQNLERVCEKCGRKFTQLREYRRHMNNHEGVKPFECLTCGVAWADARSLKRHVRTHTGERPYVCPVCSEAYIDARTLRKHMTKFHRDYVPCKIMLEKDTLQFHNQGTQVAHAVSILTAGMQEQESSGPQELETVVVTGETMEALEAVAATEEYPSVSTLSDQSIMQVVNYVLAQQQGQKLSEVAEAIQTVKVEVAHISGGE

SEQ ID NO: 876979 - protein, 884 aa, Homo sapiens
MSSEESYRAILRYLTNEREPYAPGTEGNVKRKIRKAAACYVVRGGTLYYQRRQRHRKTFAELEVVLQPERRRDLIEAAHLGPGGTHHTRHQTWHYLSKTYWWRGILKQVKDYIKQCSKCQEKLDRSRPISDVSEMLEELGLDLESGEESNESEDDLSNFTSSPTTASKPAKKKPVSKHELVFVDTKGVVKRSSPKHCQAVLKQLNEQRLSNQFCDVTLLIEGEEYKAHKSVLSANSEYFRDLFIEKGAVSSHEAVVDLSGFCKASFLPLLEFAYTSVLSFDFCSMADVAILARHLFMSEVLEICESVHKLMEEKQLTVYKKGEVQTVASTQDLRVQNGGTAPPVASSEGTTTSLPTELGDCEIVLLVNGELPEAEQNGEVGRQPEPQVSSEAESALSSVGCIADSHPEMESVDLITKNNQTELETSNNRENNTVSNIHPKLSKENVISSSPEDSGMGNDISAEDICAEDIPKHRQKVDQPLKDQENLVASTAKTDFGPDDDTYRSRLRQRSVNEGAYIRLHKGMEKKLQKRKAVPKSAVQQVAQKLVQRGKKMKQPKRDAKENTEEASHKCGECGMVFQRRYALIMHKLKHERARDYKCPLCKKQFQYSASLRAHLIRHTRKDAPSSSSSNSTSNEASGTSSEKGRTKREFICSICGRTLPKLYSLRIHMLKHTGVKPHACQVCGKTFIYKHGLKLHQSLHQSQKQFQCELCVKSFVTKRSLQEHMSIHTGESKYLCSVCGKSFHRGSGLSKHFKKHQPKPEVRGYHCTQCEKSFFEARDLRQHMNKHLGVKPFQCQFCDKCYSWKKDWYSHVKSHSVTEPYRCNICGKEFYEKALFRRHVKKATHGKKGRAKQNLERVCEKCGRKFTQLREYRRHMNNHEEQS

SEQ ID NO: 876980 - protein, 112 aa, Homo sapiens
GILKQVKDYIKQCSKCQEKLDRSRPISDVSEMLEELGLDLESGEESNESEDDLSNFTSSPTTASKPAKKKPVSKHELVFVSGTLQSALRFVTSVLVFAALVTYFSQTTKTAY

SEQ ID NO: 876981 - protein, 456 aa, Homo sapiens
MVVLNPMTLGIYLQLFFLSIVSQPTFINSVLPISAALPSLDQKKRGGHKACCLLTPPPPPLFPPPFFRGGRSPLLSPDMKNLMLELETSQSPCMQGSLGSPGPPGPQGPPGLPGKTGPKGEKGELGRPGRKGRPGPPGVPGMPGPIGWPGPEGPRGEKGDLGMMGLPGSRGPMGSKGYPGSRGEKGSRGEKGDLGPKGEKGFPGFPGMLGQKGEMGPKGEPGIAGHRGPTGRPGKRGKQGQKGDSGVMGPPGKPGPSGQPGRPGPPGPPPAGQLIMGPKGERGFPGPPGRCLCGPTMNVNNPSYGESVYGPSSPRVPVIFVVNNQEELERLNTQNAIAFRRDQRSLYFKDSLGWLPIQLTPFYPVDYTADQHGTCGDGLLQPGEECDDGNSDVGDDCIRDCHRAYCGDGHRHEGVEDCDGSDFGYLTCETYLPGSYGDLQCTQYCYIDSTPCRYFT

SEQ ID NO: 876982 - protein, 137 aa, Homo sapiens
MVVLNPMTLGIYLQLFFLSIVSQPTFINSVLPISAALPSLDQKKRGGHKACCLLTPPPPPLFPPPFFRGGRSPLLSPDMKNLMLELETSQSPCMQGSLGSPGPPGPQGPPGLPGKTGPKGEKGELGRPGRKVWSALF

SEQ ID NO: 876983 - protein, 66 aa, Homo sapiens
KLDEDASPNEETGDVPKDTLDDLFPIATIWPNNRLQWLFLFWNVADPGRGLGLEHCLDTHRPAGLF

SEQ ID NO: 876984 - protein, 921 aa, Homo sapiens
MSDPHSSPLLPEPLSSRYKLYEAEFTSPSWPSTSPDTHPALPLLEMPEEKDLRSSNEDSHIVKIEKLNERSKRKDDGVAHRDSAGQRCICLSKAVGYLTGDMKEYRIWLKDKHLALQFIDWVLRGTAQVMFINNPLSGLIIFIGLLIQNPWWTITGGLGTVVSTLTALALGQDRSAIASGLHGYNGMLVGLLMAVFSEKLDYYWWLLFPVTFTAMSCPVLSSALNSIFSKWDLPVFTLPFNIAVTLYLAATGHYNLFFPTTLVEPVSSVPNITWTEMEMPLLLQAIPVGVGQVYGCDNPWTGGVFLVALFISSPLICLHAAIGSIVGLLAALSVATPFETIYTGLWSYNCVLSCIAIGGMFYALTWQTHLLALICALFCAYMEAAISNIMSVVGVPPGTWAFCLATIIFLLLTTNNPAIFRLPLSKVTYPEANRIYYLTVKSGEEEKAPSGGGGEHPPTAGPKVEEGSEAVLSKHRSVFHIEWSSIRRRSKVFLEKANTRKDKTKTHFPIDTGMPTVELLDLDTMEESSEIKVETNISKTSWIRSSMAASGKRVSKALSYITGEMKECGEGLKDKSPVFQFFDWVLRGTSQVMFVNNPLSGILIILGLFIQNPWWAISGCLGTIMSTLTALILSQDKSAIAAGFHGYNGVLVGLLMAVFSDKGDYYWWLLLPVIIMSMSCPILSSALGTIFSKWDLPVFTLPFNITVTLYLAATGHYNLFFPTTLLQPASAMPNITWSEVQVPLLLRAIPVGIGQVYGCDNPWTGGIFLIALFISSPLICLHAAIGSTMGMLAALTIATPFDSIYFGLCGFNSTLACIAIGGMFYVITWQTHLLAIACALFAAYLGAALANMLSVFGLPPCTWPFCLSALTFLLLTTNNPAIYKLPLSKVTYPEANRIYYLSQERNRRASIITKYQAYDVS

SEQ ID NO: 876985 - protein, 408 aa, Homo sapiens
MPTVELLDLDTMEESSEIKVETNISKTSWIRSSMAASGKRVSKALSYITGEMKECGEGLKDKSPVFQFFDWVLRGTSQVMFVNNPLSGILIILGLFIQNPWWAISGCLGTIMSTLTALILSQDKSAIAAGFHGYNGVLVGLLMAVFSDKGDYYWWLLLPVIIMSMSCPILSSALGTIFSKWDLPVFTLPFNITVTLYLAATGHYNLFFPTTLLQPASAMPNITWSEVQVPLLLRAIPVGIGQVYGCDNPWTGGIFLIALFISSPLICLHAAIGSTMGMLAALTIATPFDSIYFGLCGFNSTLACIAIGGMFYVITWQTHLLAIACALFAAYLGAALANMLSVFGLPPCTWPFCLSALTFLLLTTNNPAIYKLPLSKVTYPEANRIYYLSQERNRRASIITKYQAYDVS

SEQ ID NO: 876986 - protein, 35 aa, Homo sapiens
MQVSCPTDQCCFHYPHLPHSEQQLVAAVIDYRQSR

SEQ ID NO: 876987 - protein, 65 aa, Homo sapiens
MGKKKMSLVRDKLNLRWQVEIYRGYLGMSLVSERGMQSHPRKDSWSSENSERAPGECGDVGEEER

SEQ ID NO: 876988 - protein, 181 aa, Homo sapiens
SLGPPLQLFSRATAEKSLSRSQEGLPWLPADSSGPRRSPGILACSPQPSNTRSSRGPDSDIGRVRPLGPAQAPGLKDQRGGCPLVARFGMAGVLKWKDMGKGPTERVPWSRRLAPQDAGLGTPGRRGDPGSRSEVQALPSRVPYWAAQGRECSGFRGGHGIIGRYKKPGLPDRSPPPPCPF

SEQ ID NO: 876989 - protein, 408 aa, Homo sapiens
PGRAAGPAHPGGRNPLRPARPAAMSRPQLRRWRLVSSPPSGVPGLALLALLALLALRLAAGTDCPCPEPELCRPIRHHPDFEVFVFDVGQKTWKSYDWSQITTVATFGKYDSELMCYAHSKGARVVLKGDVSLKDIIDPAFRASWIAQKLNLAKTQYMDGINIDIEQEVNCLSPEYDALTALVKETTDSFHREIEGSQVTFDVAWSPKNIDRRCYNYTGIADACDFLFVMSYDEQSQIWSECIAAANAPYNQTLTGYNDYIKMSINPKKLVMGVPWYGYDYTCLNLSEDHVCTIAKVPFRGAPCSDAAGRQVPYKTIMKQINSSISGNLWDKDQRAPYYNYKDPAGHFHQVWYDNPQSISLKATYIQNYRLRGIGMWNANCLDYSGDAVAKQQTEEMWEVLKPKLLQR

SEQ ID NO: 876990 - protein, 408 aa, Homo sapiens; identical to SEQ ID NO: 876989

SEQ ID NO: 876991 - protein, 131 aa, Homo sapiens
PGRAAGPAHPGGRNPLRPARPAAMSRPQLRRWRLVSSPPSGVPGLALLALLALLALRLAAGTDCPCPEPELCRPIRHHPDFEVFVFDVGQKTWKSYDWSQITTVATFGKYDSELMCYAHSKGARVVLKGNL

SEQ ID NO: 876992 - protein, 383 aa, Homo sapiens
PGRAAGPAHPGGRNPLRPARPAAMSRPQLRRWRLVSSPPSGVPGLALLALLALLALRLAAGTDCPCPEPELCRPIRHHPDFEVFVFDVGQKTWKSYDWSQITTVATFGKYDSELMCYAHSKGARVVLKGDVSLKDIIDPAFRASWIAQKLNLAKTQYMDGINIDIEQEVNCLSPEYDALTALVKETTDSFHREIEGSQVTFDVAWSPKNIDRRCYNYTGIADACDFLFVMSYDEQSQIWSECIAAANAPYNQTLTGYNDYIKMSINPKKLVMGVPWYGYDYTCLNLSEDHVCTIAKVPFRGAPCSDAAGRQVPYKTIMKQINSSISGNLWDKDQRAPYYNYKVSQAAADLKQFCLQNAQHDPLLTGVSSSTNPFRPQKVCSFL

SEQ ID NO: 876993 - protein, 408 aa, Homo sapiens; identical to SEQ ID NO: 876989

SEQ ID NO: 876994 - protein, 179 aa, Homo sapiens
MSYDEQSQIWSECIAAANAPYNQTLTGYNDYIKMSINPKKLVMGVPWYGYDYTCLNLSEDHVCTIAKVPFRGAPCSDAAGRQVPYKTIMKQINSSISGNLWDKDQRAPYYNYKDPAGHFHQVWYDNPQSISLKATYIQNYRLRGIGMWNANCLDYSGDAVAKQQTEEMWEVLKPKLLQR

SEQ ID NO: 876995 - protein, 142 aa, Homo sapiens
LEVTGYNRGREITTLKKKEAIFRVIQQIKEKGFNSGDKGFMTVFVRDVAGRATRAIIEDSTRRPAGFFKGVGKGLVGAVARPTGGIIDMASSTFQGIKRATETSEVESLRPPRFFNEDGVIRPYRLRDGTGNQMLQASKSLI

SEQ ID NO: 876996 - protein, 3201 aa, Homo sapiens
MVFESVVVDVLNRFLGDYVVDLDTSQLSLGIWKGAVALKNLQIKENALSQLDVPFKVKVGHIGNLKLIIPWKNLYTQPVEAVLEEIYLLIVPSSRIKYDPLKEEKQLMEAKQQELKRIEEAKQKVVDQEQHLPEKQDTFAEKLVTQIIKNLQVKISSIHIRYEDDITNRDKPLSFGISLQNLSMQTTDQYWVPCLHDETEKLVRKLIRLDNLFAYWNVKSQMFYLSDYDNSLDDLKNGIVNENIVPEGYDFVFRPISANAKLVMNRRSDFDFSAPKINLEIELHNIAIEFNKPQYFSIMELLESVDMMAQNLPYRKFKPDVPLHHHAREWWAYAIHGVLEVNVCPRLWMWSWKHIRKHRQKVKQYKELYKKKLTSKKPPGELLVSLEELEKTLDVFNITIARQTAEVEVKKAGYKIYKEGVKDPEDNKGWFSWLWSWSEQNTNEQQPDVQPETLEEMLTPEEKALLYEAIGYSETAVDPTLLKTFEALKFFVHLKSMSIVLRENHQKPELVDIVIEEFSTLIVQRPGAQAIKFETKIDSFHITGLPDNSEKPRLLSSLDDAMSLFQITFEINPLDETVSQRCIIEAEPLEIIYDARTVNSIVEFFRPPKEVHLAQLTAATLTKLEEFRSKTATGLLYIIETQKVLDLKINLKASYIIVPQDGIFSPTSNLLLLDLGHLKVTSKSRSELPDVKQGEANLKEIMDRAYDSFDIQLTSVQLLYSRVGDNWREARKLSVSTQHILVPMHFNLELSKAMVFMDVRMPKFKIYGKLPLISLRISDKKLQGIMELIESIPKPEPVTEVSAPVKSFQIQTSTSLGTSQISQKIIPLLELPSVSEDDSEEEFFDAPCSPLEEPLQFPTGVKSIRTRKLQKQDCSVNMTTFKIRFEVPKVLIEFYHLVGDCELSVVEILVLGLGAEIEIRTYDLKANAFLKEFCLKCPEYLDENKKPVYLVTTLDNTMEDLLTLEYVKAEKNVPDLKSTYNNVLQLIKVNFSSLDIHLHTEALLNTINYLHNILPQSEEKSAPVSTTETEDKGDVIKKLALKLSTNEDIITLQILAELSCLQIFIQDQKCNISEIKIEGLDSEMIMRPSETEINAKLRNIIVLDSDITAIYKKAVYITGKEVFSFKMVSYMDATAGSAYTDMNVVDIQVNLIVGCIEVVFVTKFLYSILAFIDNFQAAKQALAEATVQAAGMAATGVKELAQRSSRMALDINIKAPVVVIPQSPVSENVFVADFGLITMTNTFHMITESQSSPPPVIDLITIKLSEMRLYRSRFINDAYQEVLDLLLPLNLEVVVERNLCWEWYQEVPCFNVNAQLKPMEVESIQNVLVMLPTICKCPAAFGGQPSRFILSQEDITTIFKTLHGNIWYEKDGSASPAVTKDQYSATSGVTTNASHHSGGATVVTAAVVEVHSRALLVKTTLNISFKTDDLTMVLYSPGPKQASFTDVRDPSLKLAEFKLENIISTLKMYTDGSTFSSFSLKNCILDDKRPHVKKATPRMIGLTVGFDKKDMMDIKYRKVRDGCVTDAVFQEMYICASVEFLQTVANVFLEAYTTGTAVETSVQTWTAKEEVPTQESVKWEINVIIKNPEIVFVADMTKNDAPALVITTQCEICYKGNLENSTMTAAIKDLQVRACPFLPVKRKGKITTVLQPCDLFYQTTQKGTDPQVIDMSVKSLTLKVSPVIINTMITITSALYTTKETIPEETASSTAHLWEKKDTKTLKMWFLEESNETEKIAPTTELVPKGEMIKMNIDSIFIVLEAGIGHRTVPMLLAKSRFSGEGKNWSSLINLHCQLELEVHYYNEMFGVWEPLLEPLEIDQTEDFRPWNLGIKMKKKAKMAIVESDPEEENYKVPEYKTVISFHSKDQLNITLSKCGLVMLNNLVKAFTEAATGSSADFVKDLAPFMILNSLGLTISVSPSDSFSVLNIPMAKSYVLKNGESLSMDYIRTKDNDHFNAMTSLSSKLFFILLTPVNHSTADKIPLTKVGRRLYTVRHRESGVERSIVCQIDTVEGSKKVTIRSPVQIRNHFSVPLSVYEGDTLLGTASPENEFNIPLGSYRSFIFLKPEDENYQMCEGIDFEEIIKNDGALLKKKCRSKNPSKESFLINIVPEKDNLTSLSVYSEDGWDLPYIMHLWPPILLRNLLPYKIAYYIEGIENSVFTLSEGHSAQICTAQLGKARLHLKLLDYLNHDWKSEYHIKPNQQDISFVSFTCVTEMEKTDLDIAVHMTYNTGQTVVAFHSPYWMVNKTGRMLQYKADGIHRKHPPNYKKPVLFSFQPNHFFNNNKVQLMVTDSELSNQFSIDTVGSHGAVKCKGLKMDYQVGVTIDLSSFNITRIVTFTPFYMIKNKSKYHISVAEEGNDKWLSLDLEQCIPFWPEYASSKLLIQVERSEDPPKRIYFNKQENCILLRLDNELGGIIAEVNLAEHSTVITFLDYHDGAATFLLINHTKNELVQYNQSSLSEIEDSLPPGKAVFYTWADPVGSRRLKWRCRKSHGEVTQKDDMMMPIDLGEKTIYLVSFFEGLQRIILFTEDPRVFKVTYESEKAELAEQEIAVALQDVGISLVNNYTKQEVAYIGITSSDVVWETKPKKKARWKPMSVKHTEKLEREFKEYTESSPSEDKVIQLDTNVPVRLTPTGHNMKILQPHVIALRRNYLPALKVEYNTSAHQSSFRIQIYRIQIQNQIHGAVFPFVFYPVKPPKSVTMDSAPKPFTDVSIVMRSAGHSQISRIKYFKVLIQEMDLRLDLGFIYALTDLMTEAEVTENTEVELFHKDIEAFKEEYKTASLVDQSQVSLYEYFHISPIKLHLSVSLSSGREEAKDSKQNGGLIPVHSLNLLLKSIGATLTDVQDVVFKLAFFELNYQFHTTSDLQSEVIRHYSKQAIKQMYVLILGLDVLGNPFGLIREFSEGVEAFFYEPYQGAIQGPEEFVEGMALGLKALVGGAVGGLAGAASKITGAMAKGVAAMTMDEDYQQKRREAMNKQPAGFREGITRGGKGLVSGFVSGITGIVTKPIKGAQKGGAAGFFKGVGKGLVGAVARPTGGIIDMASSTFQGIKRATETSEVESLRPPRFFNEDGVIRPYRLRDGTGNQMLQVMENGRFAKYKYFTHVMINKTDMLMITRRGVLFVTKGTFGQLTCEWQYSFDEFTKEPFIVHGRRLRIEAKERVKSVFHAREFGKIINFKTPEDARWILTKLQEAREPSPSL

SEQ ID NO: 876997 - protein, 3201 aa, Homo sapiens; identical to SEQ ID NO: 876996

SEQ ID NO: 876998 - protein, 319 aa, Homo sapiens [sequence omitted]

SEQ ID NO: 876999 - protein, 3096 aa, Homo sapiens
MVFESVVVDVLNRFLGDYVVDLDTSQLSLGIWKGAVALKNLQIKENALSQLDVPFKVKVGHIGNLKLIIPWKNLYTQPVEAVLEEIYLLIVPSSRIKYDPLKEEKQLMEAKQQELKRIEEAKQKVVDQEQHLPEKQDTFAEKLVTQIIKNLQVKISSIHIRYEDDITNRDKPLSFGISLQNLSMQTTDQYWVPCLHDETEKLVRKLIRLDNLFAYWNVKSQMFYLSDYDNSLDDLKNGIVNENIVPEGYDFVFRPISANAKLVMNRRSDFDFSAPKINLEIELHNIAIEFNKPQYFSIMELLESVDMMAQNLPYRKFKPDVPLHHHAREWWAYAIHGVLEVNVCPRLWMWSWKHIRKHRQKVKQYKELYKKKLTSKKPPGELLVSLEELEKTLDVFNITIARQTAEVEVKKAGYKIYKEGVKDPEDNKGWFSWLWSWSEQNTNEQQPDVQPETLEEMLTPEEKALLYEAIGYSETAVDPTLLKTFEALKFFVHLKSMSIVLRENHQKPELVDIVIEEFSTLIVQRPGAQAIKFETKIDSFHITGLPDNSEKPRLLSSLDDAMSLFQITFEINPLDETVSQRCIIEAEPLEIIYDARTVNSIVEFFRPPKEVHLAQLTAATLTKLEEFRSKTATGLLYIIETQKVLDLKINLKASYIIVPQDGIFSPTSNLLLLDLGHLKVTSKSRSELPDVKQGEANLKEIMDRAYDSFDIQLTSVQLLYSRVGDNWREARKLSVSTQHILVPMHFNLELSKAMVFMDVRMPKFKIYGKLPLISLRISDKKLQGIMELIESIPKPEPVTEVSAPVKSFQIQTSTSLGTSQISQKIIPLLELPSVSEDDSEEEFFDAPCSPLEEPLQFPTGVKSIRTRKLQKQDCSVNMTTFKIRFEVPKVLIEFYHLVGDCELSVVEILVLGLGAEIEIRTYDLKANAFLKEFCLKCPEYLDENKKPVYLVTTLDNTMEDLLTLEYVKAEKNVPDLKSTYNNVLQLIKVNFSSLDIHLHTEALLNTINYLHNILPQSEEKSAPVSTTETEDKGDVIKKLALKLSTNEDIITLQILAELSCLQIFIQDQKCNISEIKIEGLDSEMIMRPSETEINAKLRNIIVLDSDITAIYKKAVYITGKEVFSFKMVSYMDATAGSAYTDMNVVDIQVNLIVGCIEVVFVTKFLYSILAFIDNFQAAKQALAEATVQAAGMAATGVKELAQRSSRMALDINIKAPVVVIPQSPVSENVFVADFGLITMTNTFHMITESQSSPPPVIDLITIKLSEMRLYRSRFINDAYQEVLDLLLPLNLEVVVERNLCWEWYQEVPCFNVNAQLKPMEVESIQNVLVMLPTICKCPAAFGGQPSRFILSQEDITTIFKTLHGNIWYEKDGSASPAVTKDQYSATSGVTTNASHHSGGATVVTAAVVEVHSRALLVKTTLNISFKTDDLTMVLYSPGPKQASFTDVRDPSLKLAEFKLENIISTLKMYTDGSTFSSFSLKNCILDDKRPHVKKATPRMIGLTVGFDKKDMMDIKYRKVRDGCVTDAVFQEMYICASVEFLQTVANVFLEAYTTGTAVETSVQTWTAKEEVPTQESVKWEINVIIKNPEIVFVADMTKNDAPALVITTQCEICYKGNLENSTMTAAIKDLQVRACPFLPVKRKGKITTVLQPCDLFYQTTQKGTDPQVIDMSVKSLTLKVSPVIINTMITITSALYTTKETIPEETASSTAHLWEKKDTKTLKMWFLEESNETEKIAPTTELVPKGEMIKMNIDSIFIVLEAGIGHRTVPMLLAKSRFSGEGKNWSSLINLHCQLELEVHYYNEMFGVWEPLLEPLEIDQTEDFRPWNLGIKMKKKAKMAIVESDPEEENYKVPEYKTVISFHSKDQLNITLSKCGLVMLNNLVKAFTEAATGSSADFVKDLAPFMILNSLGLTISVSPSDSFSVLNIPMAKSYVLKNGESLSMDYIRTKDNDHFNAMTSLSSKLFFILLTPVNHSTADKIPLTKVGRRLYTVRHRESGVERSIVCQIDTVEGSKKVTIRSPVQIRNHFSVPLSVYEGDTLLGTASPENEFNIPLGSYRSFIFLKPEDENYQMCEGIDFEEIIKNDGALLKKKCRSKNPSKESFLINIVPEKDNLTSLSVYSEDGWDLPYIMHLWPPILLRNLLPYKIAYYIEGIENSVFTLSEGHSAQICTAQLGKARLHLKLLDYLNHDWKSEYHIKPNQQDISFVSFTCVTEMEKTDLDIAVHMTYNTGQTVVAFHSPYWMVNKTGRMLQYKADGIHRKHPPNYKKPVLFSFQPNHFFNNNKVQLMVTDSELSNQFSIDTVGSHGAVKCKGLKMDYQVGVTIDLSSFNITRIVTFTPFYMIKNKSKYHISVAEEGNDKWLSLDLEQCIPFWPEYASSKLLIQVERSEDPPKRIYFNKQENCILLRLDNELGGIIAEVNLAEHSTVITFLDYHDGAATFLLINHTKNELVQYNQSSLSEIEDSLPPGKAVFYTWADPVGSRRLKWRCRKSHGEVTQKDDMMMPIDLGEKTIYLVSFFEGLQRIILFTEDPRVFKVTYESEKAELAEQEIAVALQDVGISLVNNYTKQEVAYIGITSSDVVWETKPKKKARWKPMSVKHTEKLEREFKEYTESSPSEDKVIQLDTNVPVRLTPTGHNMKILQPHVIALRRNYLPALKVEYNTSAHQSSFRIQIYRIQIQNQIHGAVFPFVFYPVKPPKSVTMDSAPKPFTDVSIVMRSAGHSQISRIKYFKVLIQEMDLRLDLGFIYALTDLMTEAEVTENTEVELFHKDIEAFKEEYKTASLVDQSQVSLYEYFHISPIKLHLSVSLSSGREEAKDSKQNGGLIPVHSLNLLLKSIGATLTDVQDVVFKLAFFELNYQFHTTSDLQSEVIRHYSKQAIKQMYVLILGLDVLGNPFGLIREFSEGVEAFFYEPYQGAIQGPEEFVEGMALGLKALVGGAVGGLAGAASKITGAMAKGVAAMTMDEDYQQKRREAMNKQPAGFREGITRGGKGLVSGFVSGITGIVTKPIKGAQKGGAAGFFKGVGKGLVGAVARPTGGIIDMASSTFQGIKRATETSEVESLRPPRFFNEDGVIRPYRLRDGTGNQMLQASKSLI

SEQ ID NO: 877000 - protein, 3174 aa, Homo sapiens
MVFESVVVDVLNRFLGDYVVDLDTSQLSLGIWKGAVALKNLQIKENALSQLDVPFKVKVGHIGNLKLIIPWKNLYTQPVEAVLEEIYLLIVPSSRIKYDPLKEEKQLMEAKQQELKRIEEAKQKVVDQEQHLPEKQDTFAEKLVTQIIKNLQVKISSIHIRYEDDITNRDKPLSFGISLQNLSMQTTDQYWVPCLHDETEKLVRKLIRLDNLFAYWNVKSQMFYLSDYDNSLDDLKNGIVNENIVPEGYDFVFRPISANAKLVMNRRSDFDFSAPKINLEIELHNIAIEFNKPQYFSIMELLESVDMMAQNLPYRKFKPDVPLHHHAREWWAYAIHGVLEVNVCPRLWMWSWKHIRKHRQKVKQYKELYKKKLTSKKPPGELLVSLEELEKTLDVFNITIARQTAEVEVKKAGYKIYKEGVKDPEDNKGWFSWLWSWSEQNTNEQQPDVQPETLEEMLTPEEKALLYEAIGYSETAVDPTLLKTFEALKFFVHLKSMSIVLRENHQKPELVDIVIEEFSTLIVQRPGAQAIKFETKIDSFHITGLPDNSEKPRLLSSLDDAMSLFQITFEINPLDETVSQRCIIEAEPLEIIYDARTVNSIVEFFRPPKEVHLAQLTAATLTKLEEFRSKTATGLLYIIETQKVLDLKINLKASYIIVPQDGIFSPTSNLLLLDLGHLKVTSKSRSELPDVKQGEANLKEIMDRAYDSFDIQLTSVQLLYSRVGDNWREARKLSVSTQHILVPMHFNLELSKAMVFMDVRMPKFKIYGKLPLISLRISDKKLQGIMELIESIPKPEPVTEVSAPVKSFQIQTSTSLGTSQISQKIIPLLELPSVSEDDSEEEFFDAPCSPLEEPLQFPTGVKSIRTRKLQKQDCSVNMTTFKIRFEVPKVLIEFYHLVGDCELSVVEILVLGLGAEIEIRTYDLKANAFLKEFCLKCPEYLDENKKPVYLVTTLDNTMEDLLTLEYVKAEKNVPDLKSTYNNVLQLIKVNFSSLDIHLHTEALLNTINYLHNILPQSEEKSAPVSTTETEDKGDVIKKLALKLSTNEDIITLQILAELSCLQIFIQDQKCNISEIKIEGLDSEMIMRPSETEINAKLRNIIVLDSDITAIYKKAVYITGKEVFSFKMVSYMDATAGSAYTDMNVVDIQVNLIVGCIEVVFVTKFLYSILAFIDNFQAAKQALAEATVQAAGMAATGVKELAQRSSRMALDINIKAPVVVIPQSPVSENVFVADFGLITMTNTFHMITESQSSPPPVIDLITIKLSEMRLYRSRFINDAYQEVLDLLLPLNLEVVVERNLCWEWYQEVPCFNVNAQLKPMEFILSQEDITTIFKTLHGNIWYEKDGSASPAVTKDQYSATSGVTTNASHHSGGATVVTAAVVEVHSRALLVKTTLNISFKTDDLTMVLYSPGPKQASFTDVRDPSLKLAEFKLENIISTLKMYTDGSTFSSFSLKNCILDDKRPHVKKATPRMIGLTVGFDKKDMMDIKYRKVRDGCVTDAVFQEMYICASVEFLQTVANVFLEAYTTGTAVETSVQTWTAKEEVPTQESVKWEINVIIKNPEIVFVADMTKNDAPALVITTQCEICYKGNLENSTMTAAIKDLQVRACPFLPVKRKGKITTVLQPCDLFYQTTQKGTDPQVIDMSVKSLTLKVSPVIINTMITITSALYTTKETIPEETASSTAHLWEKKDTKTLKMWFLEESNETEKIAPTTELVPKGEMIKMNIDSIFIVLEAGIGHRTVPMLLAKSRFSGEGKNWSSLINLHCQLELEVHYYNEMFGVWEPLLEPLEIDQTEDFRPWNLGIKMKKKAKMAIVESDPEEENYKVPEYKTVISFHSKDQLNITLSKCGLVMLNNLVKAFTEAATGSSADFVKDLAPFMILNSLGLTISVSPSDSFSVLNIPMAKSYVLKNGESLSMDYIRTKDNDHFNAMTSLSSKLFFILLTPVNHSTADKIPLTKVGRRLYTVRHRESGVERSIVCQIDTVEGSKKVTIRSPVQIRNHFSVPLSVYEGDTLLGTASPENEFNIPLGSYRSFIFLKPEDENYQMCEGIDFEEIIKNDGALLKKKCRSKNPSKESFLINIVPEKDNLTSLSVYSEDGWDLPYIMHLWPPILLRNLLPYKIAYYIEGIENSVFTLSEGHSAQICTAQLGKARLHLKLLDYLNHDWKSEYHIKPNQQDISFVSFTCVTEMEKTDLDIAVHMTYNTGQTVVAFHSPYWMVNKTGRMLQYKADGIHRKHPPNYKKPVLFSFQPNHFFNNNKVQLMVTDSELSNQFSIDTVGSHGAVKCKGLKMDYQVGVTIDLSSFNITRIVTFTPFYMIKNKSKYHISVAEEGNDKWLSLDLEQCIPFWPEYASSKLLIQVERSEDPPKRIYFNKQENCILLRLDNELGGIIAEVNLAEHSTVITFLDYHDGAATFLLINHTKNELVQYNQSSLSEIEDSLPPGKAVFYTWADPVGSRRLKWRCRKSHGEVTQKDDMMMPIDLGEKTIYLVSFFEGLQRIILFTEDPRVFKVTYESEKAELAEQEIAVALQDVGISLVNNYTKQEVAYIGITSSDVVWETKPKKKARWKPMSVKHTEKLEREFKEYTESSPSEDKVIQLDTNVPVRLTPTGHNMKILQPHVIALRRNYLPALKVEYNTSAHQSSFRIQIYRIQIQNQIHGAVFPFVFYPVKPPKSVTMDSAPKPFTDVSIVMRSAGHSQISRIKYFKVLIQEMDLRLDLGFIYALTDLMTEAEVTENTEVELFHKDIEAFKEEYKTASLVDQSQVSLYEYFHISPIKLHLSVSLSSGREEAKDSKQNGGLIPVHSLNLLLKSIGATLTDVQDVVFKLAFFELNYQFHTTSDLQSEVIRHYSKQAIKQMYVLILGLDVLGNPFGLIREFSEGVEAFFYEPYQGAIQGPEEFVEGMALGLKALVGGAVGGLAGAASKITGAMAKGVAAMTMDEDYQQKRREAMNKQPAGFREGITRGGKGLVSGFVSGITGIVTKPIKGAQKGGAAGFFKGVGKGLVGAVARPTGGIIDMASSTFQGIKRATETSEVESLRPPRFFNEDGVIRPYRLRDGTGNQMLQVMENGRFAKYKYFTHVMINKTDMLMITRRGVLFVTKGTFGQLTCEWQYSFDEFTKEPFIVHGRRLRIEAKERVKSVFHAREFGKIINFKTPEDARWILTKLQEAREPSPSL

SEQ ID NO: 877001 - protein, 147 aa, Homo sapiens [sequence omitted]

SEQ ID NO: 877002 - protein, 3095 aa, Homo sapiens
MVFESVVVDVLNRFLGDYVVDLDTSQLSLGIWKGAVALKNLQIKENALSQLDVPFKVKVGHIGNLKLIIPWKNLYTQPVEAVLEEIYLLIVPSSRIKYDPLKEEKQLMEAKQQELKRIEEAKQKVVDQEQHLPEKQDTFAEKLVTQIIKNLQVKISSIHIRYEDDITNRDKPLSFGISLQNLSMQTTDQYWVPCLHDETEKLVRKLIRLDNLFAYWNVKSQMFYLSDYDNSLDDLKNGIVNENIVPEGYDFVFRPISANAKLVMNRRSDFDFSAPKINLEIELHNIAIEFNKPQYFSIMELLESVDMMAQNLPYRKFKPDVPLHHHAREWWAYAIHGVLEVNVCPRLWMWSWKHIRKHRQKVKQYKELYKKKLTSKKPPGELLVSLEELEKTLDVFNITIARQTAEVEVKKAGYKIYKEGVKDPEDNKGWFSWLWSWSEQNTNEQQPDVQPETLEEMLTPEEKALLYEAIGYSETAVDPTLLKTFEALKFFVHLKSMSIVLRENHQKPELVDIVIEEFSTLIVQRPGAQAIKFETKIDSFHITGLPDNSEKPRLLSSLDDAMSLFQITFEINPLDETVSQRCIIEAEPLEIIYDARTVNSIVEFFRPPKEVHLAQLTAATLTKLEEFRSKTATGLLYIIETQKVLDLKINLKASYIIVPQDGIFSPTSNLLLLDLGHLKVTSKSRSELPDVKQGEANLKEIMDRAYDSFDIQLTSVQLLYSRVGDNWREARKLSVSTQHILVPMHFNLELSKAMVFMDVRMPKFKIYGKLPLISLRISDKKLQGIMELIESIPKPEPVTEVSAPVKSFQIQTSTSLGTSQISQKIIPLLELPSVSEDDSEEEFFDAPCSPLEEPLQFPTGVKSIRTRKLQKQDCSVNMTTFKIRFEVPKVLIEFYHLVGDCELSVVEILVLGLGAEIEIRTYDLKANAFLKEFCLKCPEYLDENKKPVYLVTTLDNTMEDLLTLEYVKAEKNVPDLKSTYNNVLQLIKVNFSSLDIHLHTEALLNTINYLHNILPQSEEKSAPVSTTETEDKGDVIKKLALKLSTNEDIITLQILAELSCLQIFIQDQKCNISEIKIEGLDSEMIMRPSETEINAKLRNIIVLDSDITAIYKKAVYITGKEVFSFKMVSYMDATAGSAYTDMNVVDIQVNLIVGCIEVVFVTKFLYSILAFIDNFQAAKQALAEATVQAAGMAATGVKELAQRSSRMALDINIKAPVVVIPQSPVSENVFVADFGLITMTNTFHMITESQSSPPPVIDLITIKLSEMRLYRSRFINDAYQEVLDLLLPLNLEVVVERNLCWEWYQEVPCFNVNAQLKPMEFILSQEDITTIFKTLHGNIWYEKDGSASPAVTKDQYSATSGVTTNASHHSGGATVVTAAVVEVHSRALLVKTTLNISFKTDDLTMVLYSPGPKQASFTDVRDPSLKLAEFKLENIISTLKMYTDGSTFSSFSLKNCILDDKRPHVKKATPRMIGLTVGFDKKDMMDIKYRKVRDGCVTDAVFQEMYICASVEFLQTVANVFLEAYTTGTAVETSVQTWTAKEEVPTQESVKWEINVIIKNPEIVFVADMTKNDAPALVITTQCEICYKGNLENSTMTAAIKDLQVRACPFLPVKRKGKITTVLQPCDLFYQTTQKGTDPQVIDMSVKSLTLKVSPVIINTMITITSALYTTKETIPEETASSTAHLWEKKDTKTLKMWFLEESNETEKIAPTTELVPKGEMIKMNIDSIFIVLEAGIGHRTVPMLLAKSRFSGEGKNWSSLINLHCQLELEVHYYNEMFGVWEPLLEPLEIDQTEDFRPWNLGIKMKKKAKMAIVESDPEEENYKVPEYKTVISFHSKDQLNITLSKCGLVMLNNLVKAFTEAATGSSADFVKDLAPFMILNSLGLTISVSPSDSFSVLNIPMAKSYVLKNGESLSMDYIRTKDNDHFNAMTSLSSKLFFILLTPVNHSTADKIPLTKVGRRLYTVRHRESGVERSIVCQIDTVEGSKKVTIRSPVQIRNHFSVPLSVYEGDTLLGTASPENEFNIPLGSYRSFIFLKPEDENYQMCEGIDFEEIIKNDGALLKKKCRSKNPSKESFLINIVPEKDNLTSLSVYSEDGWDLPYIMHLWPPILLRNLLPYKIAYYIEGIENSVFTLSEGHSAQICTAQLGKARLHLKLLDYLNHDWKSEYHIKPNQQDISFVSFTCVTEMEKTDLDIAVHMTYNTGQTVVAFHSPYWMVNKTGRMLQYKADGIHRKHPPNYKKPVLFSFQPNHFFNNNKVQLMVTDSELSNQFSIDTVGSHGAVKCKGLKMDYQVGVTIDLSSFNITRIVTFTPFYMIKNKSKYHISVAEEGNDKWLSLDLEQCIPFWPEYASSKLLIQVERSEDPPKRIYFNKQENCILLRLDNELGGIIAEVNLAEHSTVITFLDYHDGAATFLLINHTKNELVQYNQSSLSEIEDSLPPGKAVFYTWADPVGSRRLKWRCRKSHGEVTQKDDMMMPIDLGEKTIYLVSFFEGLQRIILFTEDPRVFKVTYESEKAELAEQEIAVALQDVGISLVNNYTKQEVAYIGITSSDVVWETKPKKKARWKPMSVKHTEKLEREFKEYTESSPSEDKVIQLDTNVPVRLTPTGHNMKILQPHVIALRRNYLPALKVEYNTSAHQSSFRIQIYRIQIQNQIHGAVFPFVFYPVKPPKSVTMDSAPKPFTDVSIVMRSAGHSQISRIKYFKVLIQEMDLRLDLGFIYALTDLMTEAEVTENTEVELFHKDIEAFKEEYKTASLVDQSQVSLYEYFHISPIKLHLSVSLSSGREEAKDSKQNGGLIPVHSLNLLLKSIGATLTDVQDVVFKLAFFELNYQFHTTSDLQSEVIRHYSKQAIKQMYVLILGLDVLGNPFGLIREFSEGVEAFFYEPYQGAIQGPEEFVEGMALGLKALVGGAVGGLAGAASKITGAMAKGVAAMTMDEDYQQKRREAMNKQPAGFREGITRGGKGLVSGFVSGITGIVTKPIKGAQKGGAAGFFKGVGKGLVGAVARPTGGIIDMASSTFQGIKRATETSEVESLRPPRFFNEDGVIRPYRLRDGTGNQMLQKIQFYREWIMTHSSSSDDDDDDDDDDESDLNH

SEQ ID NO: 877003 - protein, 3194 aa, Homo sapiens
MVFESVVVDVLNRFLGDYVVDLDTSQLSLGIWKGAVALKNLQIKENALSQLDVPFKVKVGHIGNLKLIIPWKNLYTQPVEAVLEEIYLLIVPSSRIKYDPLKEEKQLMEAKQQELKRIEEAKQKVVDQEQHLPEKQDTFAEKLVTQIIKNLQVKISSIHIRYEDDITNRDKPLSFGISLQNLSMQTTDQYWVPCLHDETEKLVRKLIRLDNLFAYWNVKSQMFYLSDYDNSLDDLKNGIVNENIVPEGYDFVFRPISANAKLVMNRRSDFDFSAPKINLEIELHNIAIEFNKPQYFSIMELLESVDMMAQNLPYRKFKPDVPLHHHAREWWAYAIHGVLEVNVCPRLWMWSWKHIRKHRQKVKQYKELYKKKLTSKKPPGELLVSLEELEKTLDVFNITIARQTAEVEVKKAGYKIYKEGVKDPEDNKGWFSWLWSWSEQNTNEQQPDVQPETLEEMLTPEEKALLYEAIGYSETAVDPTLLKTFEALKFFVHLKSMSIVLRENHQKPELVDIVIEEFSTLIVQRPGAQAIKFETKIDSFHITGLPDNSEKPRLLSSLDDAMSLFQITFEINPLDETVSQRCIIEAEPLEIIYDARTVNSIVEFFRPPKEVHLAQLTAATLTKLEEFRSKTATGLLYIIETQKVLDLKINLKASYIIVPQDGIFSPTSNLLLLDLGHLKVTSKSRSELPDVKQGEANLKEIMDRAYDSFDIQLTSVQLLYSRVGDNWREARKLSVSTQHILVPMHFNLELSKAMVFMDVRMPKFKIYGKLPLISLRISDKKLQGIMELIESIPKPEPVTEVSAPVKSFQIQTSTSLGTSQISQKIIPLLELPSVSEDDSEEEFFDAPCSPLEEPLQFPTGVKSIRTRKLQKQDCSVNMTTFKIRFEVPKVLIEFYHLVGDCELSVVEILVLGLGAEIEIRTYDLKANAFLKEFCLKCPEYLDENKKPVYLVTTLDNTMEDLLTLEYVKAEKNVPDLKSTYNNVLQLIKVNFSSLDIHLHTEALLNTINYLHNILPQSEEKSAPVSTTETEDKGDVIKKLALKLSTNEDIITLQILAELSCLQIFIQDQKCNISEIKIEGLDSEMIMRPSETEINAKLRNIIVLDSDITAIYKKAVYITGKEVFSFKMVSYMDATAGSAYTDMNVVDIQVNLIVGCIEVVFVTKFLYSILAFIDNFQAAKQALAEATVQAAGMAATGVKELAQRSSRMALDINIKAPVVVIPQSPVSENVFVADFGLITMTNTFHMITESQSSPPPVIDLITIKLSEMRLYRSRFINDAYQEVLDLLLPLNLEVVVERNLCWEWYQEVPCFNVNAQLKPMEVESIQNVLVMLPTICKCPAAFGGQPSRFILSQEDITTIFKTLHGNIWYEKDGSASPAVTKDQYSATSGVTTNASHHSGGATVVTAAVVEVHSRALLVKTTLNISFKTDDLTMVLYSPGPKQASFTDVRDPSLKLAEFKLENIISTLKMYTDGSTFSSFSLKNCILDDKRPHVKKATPRMIGLTVGFDKKDMMDIKYRKVRDGCVTDAVFQEMYICASVEFLQTVANVFLEAYTTGTAVETSVQTWTAKEEVPTQESVKWEINVIIKNPEIVFVADMTKNDAPALVITTQCEICYKGNLENSTMTAAIKDLQVRACPFLPVKRKGKITTVLQPCDLFYQTTQKGTDPQVIDMSVKSLTLKVSPVIINTMITITSALYTTKETIPEETASSTAHLWEKKDTKTLKMWFLEESNETEKIAPTTELVPKGEMIKMNIDSIFIVLEAGIGHRTVPMLLAKSRFSGEGKNWSSLINLHCQLELEVHYYNEMFGVWEPLLEPLEIDQTEDFRPWNLGIKMKKKAKMAIVESDPEEENYKVPEYKTVISFHSKDQLNITLSKCGLVMLNNLVKAFTEAATGSSADFVKDLAPFMILNSLGLTISVSPSDSFSVLNIPMAKSYVLKNGESLSMDYIRTKDNDHFNAMTSLSSKLFFILLTPVNHSTADKIPLTKVGRRLYTVRHRESGVERSIVCQIDTVEGSKKVTIRSPVQIRNHFSVPLSVYEGDTLLGTASPENEFNIPLGSYRSFIFLKPEDENYQMCEGIDFEEIIKNDGALLKKKCRSKNPSKESFLINIVPEKDNLTSLSVYSEDGWDLPYIMHLWPPILLRNLLPYKIAYYIEGIENSVFTLSEGHSAQICTAQLGKARLHLKLLDYLNHDWKSEYHIKPNQQDISFVSFTCVTEMEKTDLDIAVHMTYNTGQTVVAFHSPYWMVNKTGRMLQYKADGIHRKHPPNYKKPVLFSFQPNHFFNNNKVQLMVTDSELSNQFSIDTVGSHGAVKCKGLKMDYQVGVTIDLSSFNITRIVTFTPFYMIKNKSKYHISVAEEGNDKWLSLDLEQCIPFWPEYASSKLLIQVERSEDPPKRIYFNKQENCILLRLDNELGGIIAEVNLAEHSTVITFLDYHDGAATFLLINHTKNELVQYNQSSLSEIEDSLPPGKAVFYTWADPVGSRRLKWRCRKSHGEVTQKDDMMMPIDLGEKTIYLVSFFEGLQRIILFTEDPRVFKVTYESEKAELAEQEIAVALQDVGISLVNNYTKQEVAYIGITSSDVVWETKPKKKARWKPMSVKHTEKLEREFKEYTESSPSEDKVIQLDTNVPVRLTPTGHNMKILQPHVIALRRNYLPALKVEYNTSAHQSSFRIQIYRIQIQNQIHGAVFPFVFYPVKPPKSVTMDSAPKPFTDVSIVMRSAGHSQISRIKYFKVLIQEMDLRLDLGFIYALTDLMTEAEVTENTEVELFHKDIEAFKEEYKTASLVDQSQVSLYEYFHISPIKLHLSVSLSSGREEAKDSKQNGGLIPVHSLNLLLKSIGATLTDVQDVVFKLAFFELNYQFHTTSDLQSEVIRHYSKQAIKQMYVLILGLDVLGNPFGLIREFSEGVEAFFYEPYQGAIQGPEEFVEGMALGLKALVGGAVGGLAGAASKITGAMAKGVAAMTMDEDYQQKRREAMNKQPAGFREGITRGGKGLVSGFVSGITGIVTKPIKGAQKGGAAGFFKGVGKGLVGAVARPTGGIIDMASSTFQGIKRATETSEVESLRPPRFFNEDGVIRPYRLRDGTGNQMLQVMENGRFAKYKYFTHVMINKTDMLMITRRGVLFVTKGTFGQLTCEWQYSFDEFTKEPFIVHGRRLRIEAKERVKSVFHAREFGKIINFKTPEDARVNIINLLFK

SEQ ID NO: 877004 - protein, 186 aa, Homo sapiens [sequence omitted]

SEQ ID NO: 877005 - protein, 108 aa, Homo sapiens
SWRRSAALRSPRAPAGWARDAGLGLSPRDLEHPRDHPEASGGHSADEEADAWVQNPGPPDSEPRSSRASAQTCARSKSPPSQHSSETRGVPTVPASSAGYIVGQPLKK

SEQ ID NO: 877006 - protein, 136 aa, Homo sapiens [sequence omitted]

SEQ ID NO: 877007 - protein, 255 aa, Homo sapiens
NEHVLSAGFDINTPDNLGRTCLHAAASGGNVECLNLLLSSGADLRRRDKFGRTPLHYAAANGSYQCAVTLVTAGAGVNEADCKGCSPLHYAAASDTYRRAEPHTPSSHDAEEDEPLKESRRKEAFFCLEFLLDNGADPSLRDRQGYTAVHYAAAYGNRQNLELLLEMSFNCLEDVESTIPVSPLHLAAYNGHCEALKTLAETLVNLDVRDHKGRTALFLATERGSTECVEVLTAHGASALIKERKRKWTPLHAAG

SEQ ID NO: 877008 - protein, 84 aa, Homo sapiens
IRSSKSAEDLTDGSYDDVLNAEQLQKLLYLLESTEDPVIIERALITLGNNAAFSVNQAIIRELGGIPIVANKINHSNQSIKDKA

SEQ ID NO: 877009 - protein, 76 aa, Homo sapiens
MESHGKSCLKAAAAKLRDSSFRGFYECIYESLRDTQGPGAGSKALHLSSCSESQVNVIEHSSTGPGQQQSSKEAMG

SEQ ID NO: 877010 - protein, 274 aa, Homo sapiens
RLGTRLGLIRPRLGPGRGPARSGGGRRRGSYGGGGLCREVRQRRRGESRVLWSELEGEAGGAGGWASSLNARMDNRFATAFVIACVLSLISTIYMAASIGTDFWYEYRSPVQENSSDLNKSIWDEFISDEADEKTYNDALFRYNGTVGLWRRCITIPKNMHWYSPPERTESFDVVTKCVSFTLTEQFMEKFVDPGNHNSGIDLLRTYLWRCQFLLPFVSLGLMCFGALIGLCACICRSLYPTIATGILHLLAGLCTLGLSKVVMLLELNYSTRN

SEQ ID NO: 877011 - protein, 274 aa, Homo sapiens; identical to SEQ ID NO: 877010

SEQ ID NO: 877012 - protein, 274 aa, Homo sapiens; identical to SEQ ID NO: 877010

SEQ ID NO: 877013 - protein, 274 aa, Homo sapiens; identical to SEQ ID NO: 877010

SEQ ID NO: 877014 - protein, 274 aa, Homo sapiens; identical to SEQ ID NO: 877010

SEQ ID NO: 877015 - protein, 103 aa, Homo sapiens
MGGSERDLRRRAGVASRFHVPGGLKRGPLPGRGRAGRVPSGGFVPGPSPLGRGLVGYRGTLARGRARLPRPSPGLLRPRREAQEVAAAGVRLGRTAVPSAGTL

SEQ ID NO: 877016 - protein, 202 aa, Homo sapiens
MDNRFATAFVIACVLSLISTIYMAASIGTDFWYEYRSPVQENSSDLNKSIWDEFISDEADEKTYNDALFRYNGTVGLWRRCITIPKNMHWYSPPERTESFDVVTKCVSFTLTEQFMEKFVDPGNHNSGIDLLRTYLWRCQFLLPFVSLGLMCFGALIGLCACICRSLYPTIATGILHLLAGLCTLGLSKVVMLLELNYSTRN

SEQ ID NO: 877017 - protein, 274 aa, Homo sapiens; identical to SEQ ID NO: 877010

SEQ ID NO: 877018 - protein, 172 aa, Homo sapiens
MLGTRLGLIRPRLGPGRGPARSGGGRRRGSYGGGGLCREVRQRRRGESRVLWSELEGEAGGAGGWASSLNARMDNRFATAFVIACVLSLISTIYMAASIGTDFWYEYRSPVQENSSDLNKSIWDEFISDEADEKTYNDALFRYNGTVGLWRRCITIPKNMHWYSPPERTEIC

SEQ ID NO: 877019 - protein, 103 aa, Homo sapiens; identical to SEQ ID NO: 877015

SEQ ID NO: 877020 - protein, 256 aa, Homo sapiens
RLGTRLGLIRPRLGPGRGPARSGGGRRRGSYGGGGLCREVRQRRRGESRVLWSELEGEAGGAGGWASSLNARMDNRFATAFVIACVLSLISTIYMAASIGTDFWYEYRSPVQENSSDLNKSIWDEFISDEADEKTYNDALFRYNGTVGLWRRCITIPKNMHWYSPPERTESFDVVTKCVSFTLTEQFMEKFVDPGNHNSGIDLLRTYLWRCQFLLPFVSLGLMCFGALIGLCACICRSLYPTIATGILHLLADTML

SEQ ID NO: 877021 - protein, 274 aa, Homo sapiens
MLGTRLGLIRPRLGPGRGPARSGGGRRRGSYGGGGLCREVRQRRRGESRVLWSELEGEAGGAGGWASSLNARMDNRFATAFVIACVLSLISTIYMAASIGTDFWYEYRSPVQENSSDLNKSIWDEFISDEADEKTYNDALFRYNGTVGLWRRCITIPKNMHWYSPPERTESFDVVTKCVSFTLTEQFMEKFVDPGNHNSGIDLLRTYLWRCQFLLPFVSLGLMCFGALIGLCACICRSLYPTIATGILHLLAAQYYKERFTIMTLQSWETYHKI

SEQ ID NO: 877022 - protein, 233 aa, Homo sapiens
MLGTRLGLIRPRLGPGRGPARSGGGRRRGSYGGGGLCREVRQRRRGESRVLWSELEGEAGGAGGWASSLNARMDNRFATAFVIACVLSLISTIYMAASIGTDFWYEYRSPVQENSSDLNKSIWDEFISDEADEKTYNDALFRYNGTVGLWRRCITIPKNMHWYSPPERTESFDVVTKCVSFTLTEQFMEKFVDPGNHNSGIDLLRTCEYFDFTRTVGGTKIILFVSFWTMFLE

SEQ ID NO: 877023 - protein, 189 aa, Homo sapiens
MLGTRLGLIRPRLGPGRGPARSGGGRRRGSYGGGGLCREVRQRRRGESRVLWSELEGEAGGAGGWASSLNARMDNRFATAFVIACVLSLISTIYMAASIGTDFWYEYRSPVQENSSDLNKSIWDEFISDEADEKTYNDALFRYNGTVGLWRRCITIPKNMHWYSPPERTGISLILTSVFFTWLIIDKTT

SEQ ID NO: 877024 - protein, 274 aa, Homo sapiens; identical to SEQ ID NO: 877010

SEQ ID NO: 877025 - protein, 274 aa, Homo sapiens; identical to SEQ ID NO: 877010

SEQ ID NO: 877026 - protein, 274 aa, Homo sapiens; identical to SEQ ID NO: 877010

SEQ ID NO: 877027 - protein, 202 aa, Homo sapiens; identical to SEQ ID NO: 877016

SEQ ID NO: 877028 - protein, 217 aa, Homo sapiens
EHRVIHCRGCLKCQRGSVVYATAFVIACVLSLISTIYMAASIGTDFWYEYRSPVQENSSDLNKSIWDEFISDEADEKTYNDALFRYNGTVGLWRRCITIPKNMHWYSPPERTESFDVVTKCVSFTLTEQFMEKFVDPGNHNSGIDLLRTYLWRCQFLLPFVSLGLMCFGALIGLCACICRSLYPTIATGILHLLAGLCTLGLSKVVMLLELNYSTRN

SEQ ID NO: 877029 - protein, 331 aa, Homo sapiens
RLGTRLGLIRPRLGPGRGPARSGGGRRRGSYGGGGLCREVRQRRRGESRVLWSELEGEAGGAGGWASSLNARMDNRFATAFVIACVLSLISTIYMAASIGTDFWYEYRSPVQENSSDLNKSIWDEFISDEADEKTYNDALFRYNGTVGLWRRCITIPKNMHWYSPPERTESFDVVTKCVSFTLTEQFMEKFVDPGNHNSGIDLLRTYLWRCQFLLPFVSLGLMCFGALIGLCACICRSLYPTIATGILHLLAGRFCHHTYLLASSCLFRDQRVINLKCSRINCPVTLPEKLFTVLLSSHVLFCFLNFPPSLCTLGLSKVVMLLELNYSTRN

SEQ ID NO: 877030 - protein, 274 aa, Homo sapiens; identical to SEQ ID NO: 877010

SEQ ID NO: 877031 - protein, 263 aa, Homo sapiens
MLGTRLGLIRPRLGPGRGPARSGGGRRRGSYGGGGLCREVRQRRRGESRVLWSELEGEAGGAGGWASSLNARMDNRFATAFVIACVLSLISTIYMAASIGTDFWYEYRSPVQENSSDLNKSIWDEFISDEADEKTYNDALFRYNGTVGLWRRCITIPKNMHWYSPPERTESFDVVTKCVSFTLTEQFMEKFVDPGNHNSGIDLLRTYLWRCQFLLPFVSLGLMCFGALIGLCACICRSLYPTIATGILHLLAGDKGEHASSWS

SEQ ID NO: 877032 - protein, 103 aa, Homo sapiens; identical to SEQ ID NO: 877015

SEQ ID NO: 877033 - protein, 644 aa, Homo sapiens
VFCPSADTVCQPKLCLRAHRLHRVPNSFFPRLAMASRGARQRLKGSGASSGDTAPAADKLRELLGSREAGGAEHRTELSGNKAGQVWAPEGSTAFKCLLSARLCAALLSNISDCDETFNYWEPTHYLIYGEGFQTWEYSPAYAIRSYAYLLLHAWPAAFHARILQTNKILVFYFLRCLLAFVSCICELYFYKAVCKKFGLHVSRMMLAFLVLSTGMFCSSSAFLPSSFCMYTTLIAMTGWYMDKTSIAVLGVAAGAILGWPFSAALGLPIAFDLLVMKHRWKSFFHWSLMALILFLVPVVVIDSYYYGKLVIAPLNIVLYNVFTPHGPDLYGTEPWYFYLINGFLNFNVAFALALLVLPLTSLMEYLLQRFHVQNLGHPYWLTLAPMYIWFIIFFIQPHKEERFLFPVYPLICLCGAVALSALQKCYHFVFQRYRLEHYTVTSNWLALGTVFLFGLLSFSRSVALFRGYHGPLDLYPEFYRIATDPTIHTVPEGRPVNVCVGKEWYRFPSSFLLPDNWQLQFIPSEFRGQLPKPFAEGPLATRIVPTDMNDQNLEEPSRYIDISKCHYLVDLDTMRETPREPKYSSNKEEWISLAYRPFLDASRSSKLLRAFYVPFLSDQYTVYVNYTILKPRKAKQIRKKSGG

SEQ ID NO: 877034 - protein, 650 aa, Homo sapiens
VFCPSADTVCQPKLCLRAHRLHRVPNSFFPRLAMASRGARQRLKGSGASSGDTAPAADKLRELLGSREAGGAEHRTELSGNKAGQVWAPEGSTAFKCLLSARLCAALLSNISDCDETFNYWEPTHYLIYGEGFQTWEYSPAYAIRSYAYLLLHAWPAAFHARILQTNKILVFYFLRCLLAFVSCICELYFYKAVCKKFGLHVSRMMLAFLVLSTGMFCSSSAFLPSSFCMYTTLIAMTGWYMDKTSIAVLGVAAGAILGWPFSAALGLPIAFDLLVMKHRWKSFFHWSLMALILFLVPVVVIDSYYYGKLVIAPLNIVLYNVFTPHGPDLYGTEPWYFYLINGFLNFNVAFALALLVLPLTSLMEYLLQRFHVQNLGHPYWLTLAPMYIWFIIFFIQPHKEERFLFPVYPLICLCGAVALSALQHSFLYFQKCYHFVFQRYRLEHYTVTSNWLALGTVFLFGLLSFSRSVALFRGYHGPLDLYPEFYRIATDPTIHTVPEGRPVNVCVGKEWYRFPSSFLLPDNWQLQFIPSEFRGQLPKPFAEGPLATRIVPTDMNDQNLEEPSRYIDISKCHYLVDLDTMRETPREPKYSSNKEEWISLAYRPFLDASRSSKLLRAFYVPFLSDQYTVFFNSGIRYWLKLPLSLTQFY

SEQ ID NO: 877035 - protein, 651 aa, Homo sapiens
VFCPSADTVCQPKLCLRAHRLHRVPNSFFPRLAMASRGARQRLKGSGASSGDTAPAADKLRELLGSREAGGAEHRTELSGNKAGQVWAPEGSTAFKCLLSARLCAALLSNISDCDETFNYWEPTHYLIYGEGFQTWEYSPAYAIRSYAYLLLHAWPAAFHARILQTNKILVFYFLRCLLAFVSCICELYFYKAVCKKFGLHVSRMMLAFLVLSTGMFCSSSAFLPSSFCMYTTLIAMTGWYMDKTSIAVLGVAAGAILGWPFSAALGLPIAFDLLVMKHRWKSFFHWSLMALILFLVPVVVIDSYYYGKLVIAPLNIVLYNVFTPHGPDLYGTEPWYFYLINGFLNFNVAFALALLVLPLTSLMEYLLQRFHVQNLGHPYWLTLAPMYIWFIIFFIQPHKEERFLFPVYPLICLCGAVALSALQHSFLYFQKCYHFVFQRYRLEHYTVTSNWLALGTVFLFGLLSFSRSVALFRGYHGPLDLYPEFYRIATDPTIHTVPEGRPVNVCVGKEWYRFPSSFLLPDNWQLQFIPSEFRGQLPKPFAEGPLATRIVPTDMNDQNLEEPSRYIDISKCHYLVDLDTMRETPREPKYSSNKEEWISLAYRPFLDASRSSKLLRAFYVPFLSDQYTVYVNYTILKPRKAKQIRKKSGG

SEQ ID NO: 877036 - protein, 623 aa, Homo sapiens
VFCPSADTVCQPKLCLRAHRLHRVPNSFFPRLAMASRGARQRLKGSGASSGDTAPAADKLRELLGSREAGGAEHRTELSGNKAGQVWAPEGSTAFKCLLSARLCAALLSNISDCDETFNYWEPTHYLIYGEGFQTWEYSPAYAIRSYAYLLLHAWPAAFHARILQTNKILVFYFLRCLLAFVSCICELYFYKAVCKKFGLHVSRMMLAFLVLSTGMFCSSSAFLPSSFCMYTTLIAMTGWYMDKTSIAVLGVAAGAILGWPFSAALGLPIAFDLLVMKHRWKSFFHWSLMALILFLVPVVVIDSYYYGKLVIAPLNIVLYNVFTPHGPDLYGTEPWYFYLINGFLNFNVAFALALLVLPLTSLMEYLLQRFHVQNLGHPYWLTLAPMYIWFIIFFIQPHKEERFLFPVYPLICLCGAVALSALQHSFLYFQKCYHFVFQRYRLEHYTVTSNWLALGTVFLFGLLSFSRSVALFRGYHGPLDLYPEFYRIATDPTIHTVPEGRPVNVCVGKEWYRFPSSFLLPDNWQLQFIPSEFRGQLPKPFAEGPLATRIVPTDMNDQNLEEPSRYIDISKCHYLVDLDTMRETPREPKYSSNKEEWISLAYRPFLDASSFEGWKTKITMPV

SEQ ID NO: 877037 - protein, 316 aa, Homo sapiens
MAEAALEAVRSELREFPAAARELCVPLAVPYLDKPPTPLHFYRDWVCPNRPCIIRNALQHWPALQKWSLPYFRATVGSTEVSVAVTPDGYADAVRGDRFMMPAERRLPLSFVLDVLEGRAQHPGVLYVQKQCSNLPSELPQLLPDLESHVPWASEALGKMPDAVNFWLGEAAAVTSLHKDHYENLYCVVSGEKHFLFHPPSDRPFIPYELYTPATYQLTEEGTFKVVDEEAMEKVPWIPLDPLAPDLARYPSYSQAQALRCTVRAGEMLYLPALWFHHVQQSQGCIAVNFWYDMEYDLKYSYFQLLDSLTKASGLD

SEQ ID NO: 877038 - protein, 216 aa, Homo sapiens
MPAERRLPLSFVLDVLEGRAQHPGVLYVQKQCSNLPSELPQLLPDLESHVPWASEALGKMPDAVNFWLGEAAAVTSLHKDHYENLYCVVSGEKHFLFHPPSDRPFIPYELYTPATYQLTEEGTFKVVDEEAMEKVPWIPLDPLAPDLARYPSYSQAQALRCTVRAGEMLYLPALWFHHVQQSQGCIAVNFWYDMEYDLKYSYFQLLDSLTKASGLD

SEQ ID NO: 877039 - protein, 1360 aa, Homo sapiens
MFLMGAVVFSRGREEEFIDHKTRVAGRSQGRRRLGDEGSVLSVFCPGNGLLAELPGTTDLGPGDSEAPSCRPEALEASGSSMLLCLSCLECEGPGLTLVDEALQHCPGPGCSLDLTCLGSLWRQVEGRKEAVGTGFPGPGAPARLHSQNQGHGFGGSYRGTIFSLTWQDLEDMTACEGSELGAASPAQERAHFQDALLTRVEGGYESSSAWGPRPCCATSPPSIAYVPCHPRPAGKLLSWGVGWGCGVESLKDTSPRRWKQVCVRHEIWSQPARAPTPIVDLRQVTASLCLSFLVEWAIVNSICAEGGCAINELMYAKPLAQSRRRALCKVLAGVMMEISCLLLLIQDSDEMEDGPGVQDKALRHCSSLLCGPCHPWLHRPVAGLPSPTLQAEVSRTCLLTVRVLQAHRLPSKDLVTPSDCYVTLWLPTACSHRLQTRTVKNSSSPVWNQSFHFRIHRQLKNVMELKVFDQDLVTGDDPVLSVLFDAGTLRAGEFRRESFSLSPQGEGRLEVEFRLQSLADRGEWLVSNGVLVARELSCLHVQLEETGDQKSSEHRVQLVVPGSCEGPQEASVGTGTFRFHCPACWEQELSIRLQDAPEEQLKAPLSALPSGQVVRLVFPTSQEPLMRVELKKEAGLECNGVILAHCNLRLWGSSDSPASASRVSWDYRLRELAVRLGFGPCAEEQAFLSRRKQVVAAALRQALQLDGDLQEDEIPVVAIMATGGGIRAMTSLYGQLAGLKELGLLDCVSYITGASGSTWALANLYEDPEWSQKDLAGPTELLKTQVTKNKLGVLAPSQLQRYRQELAERARLGYPSCFTNLWALINEALLHDEPHDHKLSDQREALSHGQNPLPIYCALNTKGQSLTTFEFGGEWPKSWDLCPCSWWNKGRTRTVCRLQMSHPPLLSQVPCFLETGTLPGSLSPLGRRQGPEVLCTKPRPQGLGLLVLSCPKAKPWVGVGVWVPKGSATMRLRRGLLTEWCEFSPYEVGFPKYGAFIPSELFGSEFFMGQLMKRLPESRICFLEGIWSNLYAANLQDSLYWASEPSQFWDRWVRNQANLGKCSGPFIRVPRGSQLGLHQGAGGSHLFPLQGHHQGGDKGAGVPISPTLPVYDKEQVPLLKIEEPPSTAGRIAEFFTDLLTWRPLAQATHNFLRGLHFHKDYFQHPHFSTWKATTLDGLPNQLTPSEPHLCLLDVGYLINTSCLPLLQPTRDVDLILSLDYNLHGAFQQLQLLGRFCQEQGIPFPPISPSPEEQLQPRECHTFSDPTCPGAPAVLHFPLVSDSFREYSAPGVRRTPEEAAAGEVNLSSSDSPYHYTKVTYSQEDVDKLLHLTHYNVCNNQEQLLEALRQAVQRRRQRRPH

SEQ ID NO: 877040 - protein, 739 aa, Homo sapiens
MELKVFDQDLVTGDDPVLSVLFDAGTLRAGEFRRESFSLSPQGEGRLEVEFRLQSLADRGEWLVSNGVLVARELSCLHVQLEETGDQKSSEHRVQLVVPGSCEGPQEASVGTGTFRFHCPACWEQELSIRLQDAPEEQLKAPLSALPSGQVVRLVFPTSQEPLMRVELKKEAGLECNGVILAHCNLRLWGSSDSPASASRVSWDYRLRELAVRLGFGPCAEEQAFLSRRKQVVAAALRQALQLDGDLQEDEIPVVAIMATGGGIRAMTSLYGQLAGLKELGLLDCVSYITGASGSTWALANLYEDPEWSQKDLAGPTELLKTQVTKNKLGVLAPSQLQRYRQELAERARLGYPSCFTNLWALINEALLHDEPHDHKLSDQREALSHGQNPLPIYCALNTKGQSLTTFEFGEWCEFSPYEVGFPKYGAFIPSELFGSEFFMGQLMKRLPESRICFLEGIWSNLYAANLQDSLYWASEPSQFWDRWVRNQANLDKEQVPLLKIEEPPSTAGRIAEFFTDLLTWRPLAQATHNFLRGLHFHKDYFQHPHFSTWKATTLDGLPNQLTPSEPHLCLLDVGYLINTSCLPLLQPTRDVDLILSLDYNLHGAFQQLQLLGRFCQEQGIPFPPISPSPEEQLQPRECHTFSDPTCPGAPAVLHFPLVSDSFREYSAPGVRRTPEEAAAGEVNLSSSDSPYHYTKVTYSQEDVDKLLHLTHYNVCNNQEQLLEALRQAVQRRRQRRPH

SEQ ID NO: 877041 - protein, 1202 aa, Homo sapiens
MFLMGAVVFSRGREEEFIDHKTRVAGRSQGRRRLGDEGSVLSVFCPGNGLLAELPGTTDLGPGDSEAPSCRPEALEASGSSMLLCLSCLECEGPGLTLVDEALQHCPGPGCSLDLTCLGSLWRQVEGRKEAVGTGFPGPGAPARLHSQNQGHGFGGSYRGTIFSLTWQDLEDMTACEGSELGAASPAQERAQFPGCSSDQGGGRVREQLSLGPKALMCYFPSLDSLCPLPPKTSRKAACWGVGWGCGVESLKDTSPRRWKQVCVRHEIWSQPARAPTPIVDLRQVTASLCLSFLVEWAIVNSICAEGGCAINELMYAKPLAQSRRRALCKVLAGVMMEISCLLLLIQDSDEMEDGPGVQDKALRHCSSLLCGPCHPWLHRPVAGLPSPTLQAEVSRTCLLTVRVLQAHRLPSKDLVTPSDCYVTLWLPTACSHRLQTRTVKNSSSPVWNQSFHFRIHRQLKNVMELKVFDQDLVTGDDPVLSVLFDAGTLRAGEFRRESFSLSPQGEGRLEVEFRLQSLADRGEWLVSNGVLVARELSCLHVQLEETGDQKSSEHRVQLVVPGSCEGPQEASVGTGTFRFHCPACWEQELSIRLQDAPEEQLKAPLSALPSGQVVRLVFPTSQEPLMRVELKKEAGLECNGVILAHCNLRLWGSSDSPASASRVSWDYRLRELAVRLGFGPCAEEQAFLSRRKQVVAAALRQALQLDGDLQEDEIPVVAIMATGGGIRAMTSLYGQLAGLKELGLLDCVSYITGASGSTWALANLYEDPEWSQKDLAGPTELLKTQVTKNKLGVLAPSQLQRYRQELAERARLGYPSCFTNLWALINEALLHDEPHDHKLSDQREALSHGQNPLPIYCALNTKGQSLTTFEFGEWCEFSPYEVGFPKYGAFIPSELFGSEFFMGQLMKRLPESRICFLEGIWSNLYAANLQDSLYWASEPSQFWDRWVRNQANLDKEQVPLLKIEEPPSTAGRIAEFFTDLLTWRPLAQATHNFLRGLHFHKDYFQHPHFSTWKATTLDGLPNQLTPSEPHLCLLDVGYLINTSCLPLLQPTRDVDLILSLDYNLHGAFQQLQLLGRFCQEQGIPFPPISPSPEEQLQPRECHTFSDPTCPGAPAVLHFPLVSDSFREYSAPGVRRTPEEAAAGEVNLSSSDSPYHYTKVTYSQEDVDKLLHLTHYNVCNNQEQLLEALRQAVQRRRQRRPH

SEQ ID NO: 877042 - protein, 739 aa, Homo sapiens; identical to SEQ ID NO: 877040

SEQ ID NO: 877043 - protein, 739 aa, Homo sapiens; identical to SEQ ID NO: 877040

SEQ ID NO: 877044 - protein, 305 aa, Homo sapiens
WPWGRVGWDKSRGPSSLTAALSGIWSNLYAANLQDSLYWASEPSQFWDRWVRNQANLDKEQVPLLKIEEPPSTAGRIAEFFTDLLTWRPLAQATHNFLRGLHFHKDYFQHPHFSTWKATTLDGLPNQLTPSEPHLCLLDVGYLINTSCLPLLQPTRDVDLILSLDYNLHGAFQQLQLLGRFCQEQGIPFPPISPSPEEQLQPRECHTFSDPTCPGAPAVLHFPLVSDSFREYSAPGVRRTPEEAAAGEVNLSSSDSPYHYTKVTYSQEDVDKLLHLTHYNVCNNQEQLLEALRQAVQRRRQRRPH

SEQ ID NO: 877045 - protein, 76 aa, Homo sapiens
FDSSCHLFAACLHAIEGSQHHEGLDLLYPLPGREGLWQPLSSLQWGKEAKPICVITQNPPACACFPFCATLSSWST

SEQ ID NO: 877046 - protein, 73 aa, Homo sapiens
PHLCLLDVGYLINTSCLPLLQPTRDVDLILSLDYNLHGAFQVGKGGQPTREAVGGPCPLKRGALESSVWFSFL

SEQ ID NO: 877047 - protein, 1012 aa, Homo sapiens
MAEAALEAVRSELREFPAAARELCVPLAVPYLDKPPTPLHFYRDWVCPNRPCIIRNALQHWPALQKWSLPYFRATVGSTEVSVAVTPDGYADAVRGDRFMMPAERRLPLSFVLDVLEGRAQHPGVLYVQKQCSNLPSELPQLLPDLESHVPWASEALGKMPDAVNFWLGEAAAVTSLHKDHYENLYCVVSGEKHFLFHPPSDRPFIPYELYTPATYQLTEEGTFKVVDEEAMEKAEVSRTCLLTVRVLQAHRLPSKDLVTPSDCYVTLWLPTACSHRLQTRTVKNSSSPVWNQSFHFRIHRQLKNVMELKVFDQDLVTGDDPVLSVLFDAGTLRAGEFRRESFSLSPQGEGRLEVEFRLQSLADRGEWLVSNGVLVARELSCLHVQLEETGDQKSSEHRVQLVVPGSCEGPQEASVGTGTFRFHCPACWEQELSIRLQDAPEEQLKAPLSALPSGQVVRLVFPTSQEPLMRVELKKEAGLRELAVRLGFGPCAEEQAFLSRRKQVVAAALRQALQLDGDLQEDEIPVVAIMATGGGIRAMTSLYGQLAGLKELGLLDCVSYITGASGSTWALANLYEDPEWSQKDLAGPTELLKTQVTKNKLGVLAPSQLQRYRQELAERARLGYPSCFTNLWALINEALLHDEPHDHKLSDQREALSHGQNPLPIYCALNTKGQSLTTFEFGEWCEFSPYEVGFPKYGAFIPSELFGSEFFMGQLMKRLPESRICFLEGIWSNLYAANLQDSLYWASEPSQFWDRWVRNQANLDKEQVPLLKIEEPPSTAGRIAEFFTDLLTWRPLAQATHNFLRGLHFHKDYFQHPHFSTWKATTLDGLPNQLTPSEPHLCLLDVGYLINTSCLPLLQPTRDVDLILSLDYNLHGAFQQLQLLGRFCQEQGIPFPPISPSPEEQLQPRECHTFSDPTCPGAPAVLHFPLVSDSFREYSAPGVRRTPEEAAAGEVNLSSSDSPYHYTKVTYSQEDVDKLLHLTHYNVCNNQEQLLEALRQAVQRRRQRRPH

SEQ ID NO: 877048 - protein, 1202 aa, Homo sapiens
MFLMGAVVFSRGREEEFIDHKTRVAGRSQGRRRLGDEGSVLSVFCPGNGLLAELPGTTDLGPGDSEAPSCRPEALEASGSSMLLCLSCLECEGPGLTLVDEALQHCPGPGCSLDLTCLGSLWRQVEGRKEAVGTGFPGPGAPARLHSQNQGHGFGGSYRGTIFSLTWQDLEDMTACEGSELGAASPAQERAHFQDALLTRVEGGYESSSAWGPRPCCATSPPSIAYVPCHPRPAGKLLSWGVGWGCGVESLKDTSPRRWKQVCVRHEIWSQPARAPTPIVDLRQVTASLCLSFLVEWAIVNSICAEGGCAINELMYAKPLAQSRRRALCKVLAGVMMEISCLLLLIQDSDEMEDGPGVQDKALRHCSSLLCGPCHPWLHRPVAGLPSPTLQAEVSRTCLLTVRVLQAHRLPSKDLVTPSDCYVTLWLPTACSHRLQTRTVKNSSSPVWNQSFHFRIHRQLKNVMELKVFDQDLVTGDDPVLSVLFDAGTLRAGEFRRESFSLSPQGEGRLEVEFRLQSLADRGEWLVSNGVLVARELSCLHVQLEETGDQKSSEHRVQLVVPGSCEGPQEASVGTGTFRFHCPACWEQELSIRLQDAPEEQLKAPLSALPSGQVVRLVFPTSQEPLMRVELKKEAGLECNGVILAHCNLRLWGSSDSPASASRVSWDYRLRELAVRLGFGPCAEEQAFLSRRKQVVAAALRQALQLDGDLQEDEIPVVAIMATGGGIRAMTSLYGQLAGLKELGLLDCVSYITGASGSTWALANLYEDPEWSQKDLAGPTELLKTQVTKNKLGVLAPSQLQRYRQELAERARLGYPSCFTNLWALINEALLHDEPHDHKLSDQREALSHGQNPLPIYCALNTKGQSLTTFEFGEWCEFSPYEVGFPKYGAFIPSELFGSEFFMGQLMKRLPESRICFLEGIWSNLYAANLQDSLYWASEPSQFWDRWVRNQANLDKEQVPLLKIEEPPSTAGRIAEFFTDLLTWRPLAQATHNFLRGLHFHKDYFQHPHFSTWKATTLDGLPNQLTPSEPHLCLLDVGYLINTSCLPLLQPTRDVDLILSLDYNLHGAFQQLQLLGRFCQEQGIPFPPISPSPEEQLQPRECHTFSDPTCPGAPAVLHFPLVSDSFREYSAPGVRRTPEEAAAGEVNLSSSDSPYHYTKVTYSQEDVDKLLHLTHYNVCNNQEQLLEALRQAVQRRRQRRPH

SEQ ID NO: 877049 - protein, 1202 aa, Homo sapiens
MFLMGAVVFSRGREEEFIDHKTRVAGRSQGRRRLGDEGSVLSVFCPGNGLLAELPGTTDLGPGDSEAPSCRPEALEASGSSMLLCLSCLECEGPGLTLVDEALQHCPGPGCSLDLTCLGSLWRQVEGRKEAVGTGFPGPGAPARLHSQNQGHGFGGSYRGTIFSLTWQDLEDMTACEGSELGAASPAQERAQFPGCSSDQGGGRVREQLSLGPKALMCYFPSLDSLCPLPPKTSRKAACWGVGWGCGVESLKDTSPRRWKQVCVRHKIWSQPARAPTPIVDLRQVTASLCLSFLVEWAIVNSICAEGGCAINELMYAKPLAQSRRRALCKVLAGVMMEISCLLLLIQDSDEMEDGPGVQDKALRHCSSLLCGPCHPWLHRPVAGLPSPTLQAEVSRTCLLTVRVLQAHRLPSKDLVTPSDCYVTLWLPTACSHRLQTRTVKNSSSPVWNQSFHFRIHRQLKNVMELKVFDQDLVTGDDPVLSVLFDAGTLRAGEFRRESFSLSPQGEGRLEVEFRLQSLADRGEWLVSNGVLVARELSCLHVQLEETGDQKSSEHRVQLVVPGSCEGPQEASVGTGTFRFHCPACWEQELSIRLQDAPEEQLKAPLSALPSGQVVRLVFPTSQEPLMRVELKKEAGLECNGVILAHCNLRLWGSSDSPASASRVSWDYRLRELAVRLGFGPCAEEQAFLSRRKQVVAAALRQALQLDGDLQEDEIPVVAIMATGGGIRAMTSLYGQLAGLKELGLLDCVSYITGASGSTWALANLYEDPEWSQKDLAGPTELLKTQVTKNKLGVLAPSQLQRYRQELAERARLGYPSCFTNLWALINEALLHDEPHDHKLSDQREALSHGQNPLPIYCALNTKGQSLTTFEFGEWCEFSPYEVGFPKYGAFIPSELFGSEFFMGQLMKRLPESRICFLEGIWSNLYAANLQDSLYWASEPSQFWDRWVRNQANLDKEQVPLLKIEEPPSTAGRIAEFFTDLLTWRPLAQATHNFLRGLHFHKDYFQHPHFSTWKATTLDGLPNQLTPSEPHLCLLDVGYLINTSCLPLLQPTRDVDLILSLDYNLHGAFQQLQLLGRFCQEQGIPFPPISPSPEEQLQPRECHTFSDPTCPGAPAVLHFPLVSDSFREYSAPGVRRTPEEAAAGEVNLSSSDSPYHYTKVTYSQEDVDKLLHLTHYNVCNNQEQLLEALRQAVQRRRQRRPH

SEQ ID NO: 877050 - protein, 739 aa, Homo sapiens; identical to SEQ ID NO: 877040

SEQ ID NO: 877051 - protein, 1081 aa, Homo sapiens
MFLMGAVVFSRGREEEFIDHKTRVAGRSQGRRRLGDEGSVLSVFCPGNGLLAELPGTTDLGPGDSEAPSCRPEALEASGSSMLLCLSCLECEGPGLTLVDEALQHCPGPGCSLDLTCLGSLWRQVEGRKEAVGTGFPGPGAPARLHSQNQGHGFGGSYRGTIFSLTWQDLEDMTACEGSELGAASPAQERAHFQDALLTRVEGGYESSSAWGPRPCCATSPPSIAYVPCHPRPAGKLLSWGVGWGCGVESLKDTSPRRWKQVCVRHEIWSQPARAPTPIVDLRQVTASLCLSFLVEWAIVNSICAEGGCAINELMYAKPLAQSRRRALCKVLAGVMMEISCLLLLIQDSDEMEDGPGVQDKALRHCSSLLCGPCHPWLHRPVAGLPSPTLQAEVSRTCLLTVRVLQAHRLPSKDLVTPSDCYVTLWLPTACSHRLQTRTVKNSSSPVWNQSFHFRIHRQLKNVMELKVFDQDLVTGDDPVLSVLFDAGTLRAGEFRRESFSLSPQGEGRLEVEFRLQSLADRGEWLVSNGVLVARELSCLHVQLEETGDQKSSEHRVQLVVPGSCEGPQEASVGTGTFRFHCPACWEQELSIRLQDAPEEQLKAPLSALPSGQVVRLVFPTSQEPLMRVELKKEAGLECNGVILAHCNLRLWGSSDSPASASRVSWDYRLRELAVRLGFGPCAEEQAFLSRRKQVVAAALRQALQLDGDLQEDEIPVVAIMATGGGIRAMTSLYGQLAGLKELGLLDCVSYITGASGSTWALANLYEDPEWSQKDLAGPTELLKTQVTKNKLGVLAPSQLQRYRQELAERARLGYPSCFTNLWALINEALLHDEPHDHKLSDQREALSHGQNPLPIYCALNTKGQSLTTFEFGEWCEFSPYEVGFPKYGAFIPSELFGSEFFMGQLMKRLPESRICFLEGIWSNLYAANLQDSLYWASEPSQFWDRWVRNQANLDKEQVPLLKIEEPPSTAGRIAEFFTDLLTWRPLAQATHNFLRGLHFHKDYFQHPHFSTWKATTLDGLPNQLTPSEPHLCLLDVGYLINTSCLPLLQPTRDVDLILSLDYNLHGAFQQLQLLGRFCHP

SEQ ID NO: 877052 - protein, 265 aa, Homo sapiens
MAEAALEAVRSELREFPAAARELCVPLAVPYLDKPPTPLHFYRDWVCPNRPCIIRNALQHWPALQKWSLPYFRATVGSTEVSVAVTPDGYADAVRGDRFMMPAERRLPLSLLQPTRDVDLILSLDYNLHGAFQQLQLLGRFCQEQGIPFPPISPSPEEQLQPRECHTFSDPTCPGAPAVLHFPLVSDSFREYSAPGVRRTPEEAAAGEVNLSSSDSPYHYTKVTYSQEDVDKLLHLTHYNVCNNQEQLLEALRQAVQRRRQRRPH

SEQ ID NO: 877053 - protein, 136 aa, Homo sapiens
WGAAPWHLMCSQVPWIPLDPLAPDLARYPSYSQAQALRCTVRAGEMLYLPALWFHHVQQSQGCIAGEELPRPPGEEPCQGPAGPLGGGLGGSRSEEGSSCSDPRSSHMNFWYDMEYDLKYSYFQLLDSLTKASGLD

SEQ ID NO: 877054 - protein, 155 aa, Homo sapiens
MTKDMFPGPYPRTPEERAAAAKKYNMRVEDYEPYPDDGMGYGDYPKLPDRSQHERDPWYSWDQPGLRLNWGEPMHWHLDMYNRNRVDTSPTPVSWHVMCMQLFGFLAFMIFMCWVGDVYPVYQPVGPKQYPYNNLYLERGGDPSKEPERVVHYEI

SEQ ID NO: 877055 - protein, 186 aa, Homo sapiens
MAVARAGVLGVQWLQRASRNVMPLGARTASHMTKDMFPGPYPRTPEERAAAAKKYNMRVEDYEPYPDDGMGYGDYPKLPDRSQHERDPWYSWDQPGLRLNWGEPMHWHLDMYNRNRVDTSPTPVSWHVMCMQLFGFLAFMIFMCWVGDVYPVYQPVGPKQYPYNNLYLERGGDPSKEPERVVHYEI

SEQ ID NO: 877056 - protein, 127 aa, Homo sapiens
  misc_feature (4)..(5): Xaa can be any naturally occurring amino acid
AAGXXTRDDGMGYGDYPKLPDRSQHERDPWYSWDQPGLRLNWGEPMHWHLDMYNRNRVDTSPTPVSWHVMCMQLFGFLAFMIFMCWVGDVYPVYQPVGPKQYPYNNLYLERGGDPSKEPERVVHYEI

SEQ ID NO: 877057 - protein, 127 aa, Homo sapiens; identical to SEQ ID NO: 877056
  misc_feature (4)..(5): Xaa can be any naturally occurring amino acid

SEQ ID NO: 877058 - protein, 130 aa, Homo sapiens [sequence omitted]

SEQ ID NO: 877059 - protein, 186 aa, Homo sapiens; identical to SEQ ID NO: 877055

SEQ ID NO: 877060 - protein, 186 aa, Homo sapiens; identical to SEQ ID NO: 877055

SEQ ID NO: 877061 - protein, 164 aa, Homo sapiens
MAVARAGVLGVQWLQRASRNVMPLGARTASHMTKDMFPGPYPRTPEERAAAAKKYNMRVEDYEPYPDDGMGYGDYPKLPDRSQHERDPWYSWDQPGLRLNWGEPMHWHLDMYNRNRVDTSPTPVSWHVMCMQLFGFLAFMIFMCWVGDVYPVYQPVVSIREVLP

SEQ ID NO: 877062 - protein, 186 aa, Homo sapiens; identical to SEQ ID NO: 877055

SEQ ID NO: 877063 - protein, 186 aa, Homo sapiens; identical to SEQ ID NO: 877055

SEQ ID NO: 877064 - protein, 155 aa, Homo sapiens; identical to SEQ ID NO: 877054

SEQ ID NO: 877065 - protein, 74 aa, Homo sapiens
AAAYYYYCSNSSFYRCTGTCAGWGTCTLSTSLWDQSSILTIICTWNEAVIPPKNQSGWFTMRSEEASWAFGSSN

SEQ ID NO: 877066 - protein, 186 aa, Homo sapiens; identical to SEQ ID NO: 877055

SEQ ID NO: 877067 - protein, 186 aa, Homo sapiens; identical to SEQ ID NO: 877055

SEQ ID NO: 877068 - protein, 119 aa, Homo sapiens
MTGSLRHRWVLGDRGWSFNSVLDPDGEERGFSSAHTEAHSACGGKRLTSAPSFKQAELSGLVVWVGLSPPRKLRVVNTCFSSAVSRVAWGVKASGSRTGSGPSRLTFSSLWGALASLVA

SEQ ID NO: 877069 - protein, 108 aa, Homo sapiens [sequence omitted]

SEQ ID NO: 877070 - protein, 231 aa, Homo sapiens [sequence omitted]

SEQ ID NO: 877071 - protein, 236 aa, Homo sapiens
GDDRVFFFNPTMHLSVWEKPMDLKDRGDLNRIIEDPPHKRKLEAPATDNSDGSSSEDNREDQDVKTKRNRTEGCGSPKPEEAKREDKGTRTPPPQILLPLEERVTHFRDMLLERGVSAFSTWEKELHKIVFDPRYLLLNSEERKQIFEQFVKTRIKEEYKEKKSKLLLAKEEFKKLLEESKVSPRTTFKEFAEKYGRDQRFRLVQKRKDQEHFFNQFILILKKRDKENRLRLRKMR

SEQ ID NO: 877072 - protein, 236 aa, Homo sapiens; identical to SEQ ID NO: 877071

SEQ ID NO: 877073 - protein, 178 aa, Homo sapiens
TTDHTPATQPSQASHLVAFLRVHLLCLGPVHTCSMSLRPYCHLPHLDILHFLPELPANALCQVSAFRPHLLLPFCSHIPLIPTAGREIMPEPNISSQLPLALFSLSGVGKQIRSNLCQDSRNCGTIFFSLVQTGGWNYGGKMYNIFLSEIGTEHNTLVDSSVMLVNGIEYNSKERQWL

SEQ ID NO: 877074 - protein, 576 aa, Homo sapiens
FLSHKQDIPVLNHHVIALLEQWKEPEVTVRKDGRRWCTDLQLEDDTIGCKEMPTSENCPSFALHQKISRQKPRECQEYGKTLCQDSKPVQHERIHSSEKPNRCKECGKNFSNGHQLTIHQRLHVGEKPYKYEKCGKAFISGSAFVKHGRIHTGEKPLKCKQCGKTISGSYQLTVHKSIHTGKKPYECGECGKAFLVYGKLTRHQSTHTGEKPFGCEECGKAFSTFSYLVQHQRIHTSEKPYECKECGKAFSTSSPLAKHQRIHTGEKPYECKECGKSFTVYGQLTRHQSIHTGEKPFECKECGKAFRLSSFLHAHQRIHAEIKPYGCKECGKTFSRASYLVQHGRLHTGEKPYECKECGKAFSTGSYLVQHQRIHTGEKPYECKECGKAFISRHQLTVHQRVHTGEKPYECKECGKAFRVHVHLTQHRKIHTDVKPYECKECGKTFSRASYLVQHSRIHTGKKPYECKECGKAFSSGSYLVQHQRIHTGEKPYECNKCGKAFTVYGQLIGHQSVHTGEKPFECKECGKAFRLNSFLTEHQRVHTGEKPFKCKKCGKTFRYSSALKVHLRKHMSVIP

SEQ ID NO: 877075 - protein, 525 aa, Homo sapiens
MPTSENCPSFALHQKISRQKPRECQEYGKTLCQDSKPVQHERIHSSEKPNRCKECGKNFSNGHQLTIHQRLHVGEKPYKYEKCGKAFISGSAFVKHGRIHTGEKPLKCKQCGKTISGSYQLTVHKSIHTGKKPYECGECGKAFLVYGKLTRHQSTHTGEKPFGCEECGKAFSTFSYLVQHQRIHTSEKPYECKECGKAFSTSSPLAKHQRIHTGEKPYECKECGKSFTVYGQLTRHQSIHTGEKPFECKECGKAFRLSSFLHAHQRIHAEIKPYGCKECGKTFSRASYLVQHGRLHTGEKPYECKECGKAFSTGSYLVQHQRIHTGEKPYECKECGKAFISRHQLTVHQRVHTGEKPYECKECGKAFRVHVHLTQHRKIHTDVKPYECKECGKTFSRASYLVQHSRIHTGKKPYECKECGKAFSSGSYLVQHQRIHTGEKPYECNKCGKAFTVYGQLIGHQSVHTGEKPFECKECGKAFRLNSFLTEHQRVHTGEKPFKCKKCGKTFRYSSALKVHLRKHMSVIP

SEQ ID NO: 877076 - protein, 121 aa, Homo sapiens
QIIPMIPGGKMDAQSGQSTHPGIPQADGSGKNRVKPRLLTLMLVRARYPPPPALVIWPPSPAAQGRVSWKAQAVWREGRLLVLSFCLLSPVCAWKLRREFLQGGLPRPGPAFSPRSDPASR

SEQ ID NO: 877077 - protein, 127 aa, Homo sapiens
FLRSGFSNCISAAGVSSSVRNRSGNSMNQREEAAALAKLGPGPHGCPDPRQHCQPLTVLGAGFIPRRLCLPSLQSRAHLQVGSVNVPRHRAHPWMPPEFTDSTATPEPWAPALPIGSPQNALHLRGW

SEQ ID NO: 877078 - protein, 134 aa, Homo sapiens
RRSGLTRHQRIHSGEKPYECIECGKTFCWSTNLIRHSIIHTGEKPYECSECGKAFSRSSSLTQHQRMHTGRNPISVTDVGRPFTSGQTSVNIQELLLGKNFLNVTTEENLLQEEASYMASDRTYQRETPQVSSL

SEQ ID NO: 877079 - protein, 1550 aa, Homo sapiens
SRGVWRLSERRTQEAQGAGGDPQAARTPRKGVSPADSCAAPRAGLLLGGSACTQAAAQRQLLHAELKLVLQQKGERTQEPGVQVPPSNAMEARSRSAEELRRAELVEIIVETEAQTGVSGINVAGGGKEGIFVRELREDSPAARSLSLQEGDQLLSARVFFENFKYEDALRLLQCAEPYKVSFCLKRTVPTGDLALRPGTVSGYEIKGPRAKVAKLNIQSLSPVKKKKMVPGALGVPADLAPVDVEFSFPKFSRLRRGLKAEAVKGPVPAAPARRRLQLPRLRVREVAEEAQAARLAAAAPPPRKAKVEAEVAAGARFTAPQVELVGPRLPGAEVGVPQVSAPKAAPSAEAAGGFALHLPTLGLGAPAPPAVEAPAVGIQVPQVELPALPSLPTLPTLPCLETREGAVSVVVPTLDVAAPTVGVDLALPGAEVEARGEAPEVALKMPRLSFPRFGARAKEVAEAKVAKVSPEARVKGPRLRMPTFGLSLLEPRPAAPEVVESKLKLPTIKMPSLGIGVSGPEVKVPKGPEVKLPKAPEVKLPKVPEAALPEVRLPEVELPKVSEMKLPKVPEMAVPEVRLPEVELPKVSEMKLPKVPEMAVPEVRLPEVQLLKVSEMKLPKVPEMAVPEVRLPEVQLPKVSEMKLPEVSEVAVPEVRLPEVQLPKVPEMKVPEMKLPKVPEMKLPEMKLPEVQLPKVPEMAVPDVHLPEVQLPKVPEMKLPEMKLPEVKLPKVPEMAVPDVHLPEVQLPKVPEMKLPKMPEMAVPEVRLPEVQLPKVSEMKLPKVPEMAVPDVHLPEVQLPKVCEMKVPDMKLPEIKLPKVPEMAVPDVHLPEVQLPKVSEIRLPEMQVPKVPDVHLPKAPEVKLPRAPEVQLKATKAEQAEGMEFGFKMPKMTMPKLGRAESPSRGKPGEAGAEVSGKLVTLPCLQPEVDGEAHVGVPSLTLPSVELDLPGALGLQGQVPAAKMGKGERVEGPEVAAGVREVGFRVPSVEIVTPQLPAVEIEEGRLEMIETKVKPSSKFSLPKFGLSGPKVAKAEAEGAGRATKLKVSKFAISLPKARVGAEAEAKGAGEAGLLPALDLSIPQLSLDAHLPSGKVEVAGADLKFKGPRFALPKFGVRGRDTEAAELVPGVAELEGKGWGWDGRVKMPKLKMPSFGLARGKEAEVQGDRASPGEKAESTAVQLKIPEVELVTLGAQEEGRAEGAVAVSGMQLSGLKVSTARQVVTEGHDAGLRMPPLGISLPQVELTGFGEAGTPGQQAQSTVPSAEGTAGYRVQVPQVTLSLPGAQVAGGELLVGEGVFKMPTVTVPQLELDVGLSREAQAGEAATGEGGLRLKLPTLGARARVGGEGAEEQPPGAERTFCLSLPDVELSPSGGNHAEYQVAEGEGEAGHKLKVRLPRFGLVRAKEGAEEGEKAKSPKLRLPRVGFSQSEMVTGEGSPSPEEEEEEEEEGSGEGASGRRGRVRVRLPRVGLAAPSKASRGQEGDAAPKSPVREKSPKFRFPRVSLSPKARSGSGDQEEGGLRVRLPSVGFSETGAPGPARMEGAQAAAV

SEQ ID NO: 877080 - protein, 1767 aa, Homo sapiens
SRGVWRLSERRTQEAQGAGGDPQAARTPRKGVSPADSCAAPRAGLLLGGSACTQAAAQRQLLHAELKLVLQQKGERTQEPGVQVPPSNAMEARSRSAEELRRAELVEIIVETEAQTGVSGINVAGGGKEGIFVRELREDSPAARSLSLQEGDQLLSARVFFENFKYEDALRLLQCAEPYKVSFCLKRTVPTGDLALRPGTVSGYEIKGPRAKVAKLVRVLSPAPALDCPSDPGLCAVSPIPRHRGPALPSVLSLTQANSTLCPFLSAPELFPGKGDRPTPAQGPHPPRRGVPTIGSRLARGPEPGYFEPGKPDSSLSAGPITAEWPWTKLFLSLGLSFPISRMRMLGKIPDQDLEVLGPRPYTPVDSFGDPRWLPAFLGTHGEMTGKKWGGCLGNKILDPAHPPPGPIPGGALPVHSQPPTVPPPPASLLSPQNIQSLSPVKKKKMVPGALGVPADLAPVDVEFSFPKFSRLRRGLKAEAVKGPVPAAPARRRLQLPRLRVREVAEEAQAARLAAAAPPPRKAKVEAEVAAGARFTAPQVELVGPRLPGAEVGVPQVSAPKAAPSAEAAGGFALHLPTLGLGAPAPPAVEAPAVGIQVPQVELPALPSLPTLPTLPCLETREGAVSVVVPTLDVAAPTVGVDLALPGAEVEARGEAPEVALKMPRLSFPRFGARAKEVAEAKVAKVSPEARVKGPRLRMPTFGLSLLEPRPAAPEVVESKLKLPTIKMPSLGIGVSGPEVKVPKGPEVKLPKAPEVKLPKVPEAALPEVRLPEVELPKVSEMKLPKVPEMAVPEVRLPEVELPKVSEMKLPKVPEMAVPEVRLPEVQLLKVSEMKLPKVPEMAVPEVRLPEVQLPKVSEMKLPEVSEVAVPEVRLPEVQLPKVPEMKVPEMKLPKVPEMKLPEMKLPEVQLPKVPEMAVPDVHLPEVQLPKVPEMKLPEMKLPEVKLPKVPEMAVPDVHLPEVQLPKVPEMKLPKMPEMAVPEVRLPEVQLPKVSEMKLPKVPEMAVPDVHLPEVQLPKVCEMKVPDMKLPEIKLPKVPEMAVPDVHLPEVQLPKVSEIRLPEMQVPKVPDVHLPKAPEVKLPRAPEVQLKATKAEQAEGMEFGFKMPKMTMPKLGRAESPSRGKPGEAGAEVSGKLVTLPCLQPEVDGEAHVGVPSLTLPSVELDLPGALGLQGQVPAAKMGKGERVEGPEVAAGVREVGFRVPSVEIVTPQLPAVEIEEGRLEMIETKVKPSSKFSLPKFGLSGPKVAKAEAEGAGRATKLKVSKFAISLPKARVGAEAEAKGAGEAGLLPALDLSIPQLSLDAHLPSGKVEVAGADLKFKGPRFALPKFGVRGRDTEAAELVPGVAELEGKGWGWDGRVKMPKLKMPSFGLARGKEAEVQGDRASPGEKAESTAVQLKIPEVELVTLGAQEEGRAEGAVAVSGMQLSGLKVSTARQVVTEGHDAGLRMPPLGISLPQVELTGFGEAGTPGQQAQSTVPSAEGTAGYRVQVPQVTLSLPGAQVAGGELLVGEGVFKMPTVTVPQLELDVGLSREAQAGEAATGEGGLRLKLPTLGARARVGGEGAEEQPPGAERTFCLSLPDVELSPSGGNHAEYQVAEGEGEAGHKLKVRLPRFGLVRAKEGAEEGEKAKSPKLRLPRVGFSQSEMVTGEGSPSPEEEEEEEEEGSGEGASGRRGRVRVRLPRVGLAAPSKASRGQEGDAAPKSPVREKSPKFRFPRVSLSPKARSGSGDQEEGGLRVRLPSVGFSETGAPGPARMEGAQAAAV

SEQ ID NO: 877081 - protein, 1408 aa, Homo sapiens
MAGSGRGPALEPQRDTSPPSEELRRAELVEIIVETEAQTGVSGINVAGGGKEGIFVRELREDSPAARSLSLQEGDQLLSARVFFENFKYEDALRLLQCAEPYKVSFCLKRTVPTGDLALRPGTVSGYEIKGPRAKVAKLNIQSLSPVKKKKMVPGALGVPADLAPVDVEFSFPKFSRLRRGLKAEAVKGPVPAAPARRRLQLPRLRVREVAEEAQAARLAAAAPPPRKAKVEAEVAAGARFTAPQVELVGPRLPGAEVGVPQVSAPKAAPSAEAAGGFALHLPTLGLGAPAPPAVEAPAVGIQVPQVELPALPSLPTLPTLPCLETREGAVSVVVPTLDVAAPTVGVDLALPGAEVEARGEAPEVALKMPRLSFPRFGARAKEVAEAKVAKVSPEARVKGPRLRMPTFGLSLLEPRPAAPEVVESKLKLPTIKMPSLGIGVSGPEVKVPKGPEVKLPKAPEVKLPKVPEAALPEVRLPEVELPKVSEMKLPKVPEMAVPEVRLPEVELPKVSEMKLPKVPEMAVPEVRLPEVQLLKVSEMKLPKVPEMAVPEVRLPEVQLPKVSEMKLPEVSEVAVPEVRLPEVQLPKVPEMKVPEMKLPKVPEMKLPEMKLPEVQLPKVPEMAVPDVHLPEVQLPKVPEMKLPEMKLPEVKLPKVPEMAVPDVHLPEVQLPKVPEMKLPKMPEMAVPEVRLPEVQLPKVSEMKLPKVPEMAVPDVHLPEVQLPKVCEMKVPDMKLPEIKLPKVPEMAVPDVHLPEVQLPKVSEIRLPEMQVPKVPDVHLPKAPEVKLPRAPEVQLKATKAEQAEGMEFGFKMPKMTMPKLGRAESPSRGKPGEAGAEVSGKLVTLPCLQPEVDGEAHVGVPSLTLPSVELDLPGALGLQGQVPAAKMGKGERVEGPEVAAGVREVGFRVPSVEIVTPQLPAVEIEEGRLEMIETKVKPSSKFSLPKFGLSGPKVAKAEAEGAGRATKLKVSKFAISLPKARVGAEAEAKGAGEAGLLPALDLSIPQLSLDAHLPSGKVEVAGADLKFKGPRFALPKFGVRGRDTEAAELVPGVAELEGKGWGWDGRVKMPKLKVSTARQVVTEGHDAGLRMPPLGISLPQVELTGFGEAGTPGQQAQSTVPSAEGTAGYRVQVPQVTLSLPGAQVAGGELLVGEGVFKMPTVTVPQLELDVGLSREAQAGEAATGEGGLRLKLPTLGARARVGGEGAEEQPPGAERTFCLSLPDVELSPSGGNHAEYQVAEGEGEAGHKLKVRLPRFGLVRAKEGAEEGEKAKSPKLRLPRVGFSQSEMVTGEGSPSPEEEEEEEEEGSGEGASGRRGRVRVRLPRVGLAAPSKASRGQEGDAAPKSPVREKSPKFRFPRVSLSPKARSGSGDQEEGGLRVRLPSVGFSETGAPGPARMEGAQAAAV

SEQ ID NO: 877082 - protein, 1032 aa, Homo sapiens
MGFCRSALHPLSLLVQAIMLAMTLALGTLPAFLPCELQPHGLVNCNWLFLKSVPHFSMAAPRGNVTSLSLSSNRIHHLHDSDFAHLPSLRHLNLKWNCPPVGLSPMHFPCHMTIEPSTFLAVPTLEELNLSYNNIMTVPALPKSLISLSLSHTNILMLDSASLAGLHALRFLFMDGNCYYKNPCRQALEVAPGALLGLGNLTHLSLKYNNLTVVPRNLPSSLEYLLLSYNRIVKLAPEDLANLTALRVLDVGGNCRRCDHAPNPCMECPRHFPQLHPDTFSHLSRLEGLVLKDSSLSWLNASWFRGLGNLRVLDLSENFLYKCITKTKAFQGLTQLRKLNLSFNYQKRVSFAHLSLAPSFGSLVALKELDMHGIFFRSLDETTLRPLARLPMLQTLRLQMNFINQAQLGIFRAFPGLRYVDLSDNRISGASELTATMGEADGGEKVWLQPGDLAPAPVDTPSSEDFRPNCSTLNFTLDLSRNNLVTVQPEMFAQLSHLQCLRLSHNCISQAVNGSQFLPLTGLQVLDLSHNKLDLYHEHSFTELPRLEALDLSYNSQPFGMQGVGHNFSFVAHLRTLRHLSLAHNNIHSQVSQQLCSTSLRALDFSGNALGHMWAEGDLYLHFFQGLSGLIWLDLSQNRLHTLLPQTLRNLPKSLQVLRLRDNYLAFFKWWSLHFLPKLEVLDLAGNQLKALTNGSLPAGTRLRRLDVSCNSISFVAPGFFSKAKELRELNLSANALKTVDHSWFGPLASALQILDVSANPLHCACGAAFMDFLLEVQAAVPGLPSRVKCGSPGQLQGLSIFAQDLRLCLDEALSWDCFALSLLAVALGLGVPMLHHLCGWDLWYCFHLCLAWLPWRGRQSGRDEDALPYDAFVVFDKTQSAVADWVYNELRGQLEECRGRWALRLCLEERDWLPGKTLFENLWASVYGSRKTLFVLAHTDRVSGLLRASFLLAQQRLLEDRKDVVVLVILSPDGRRSRYVRLRQRLCRQSVLLWPHQPSGQRSFWAQLGMALTRDNHHFYNRNFCQGPTAE

SEQ ID NO: 877083 - protein, 1079 aa, Homo sapiens
GDPLESVVFIYSMPGYKCSIKERMLYSSCKSRLLDSVEQDFHLEIAKKGFCRSALHPLSLLVQAIMLAMTLALGTLPAFLPCELQPHGLVNCNWLFLKSVPHFSMAAPRGNVTSLSLSSNRIHHLHDSDFAHLPSLRHLNLKWNCPPVGLSPMHFPCHMTIEPSTFLAVPTLEELNLSYNNIMTVPALPKSLISLSLSHTNILMLDSASLAGLHALRFLFMDGNCYYKNPCRQALEVAPGALLGLGNLTHLSLKYNNLTVVPRNLPSSLEYLLLSYNRIVKLAPEDLANLTALRVLDVGGNCRRCDHAPNPCMECPRHFPQLHPDTFSHLSRLEGLVLKDSSLSWLNASWFRGLGNLRVLDLSENFLYKCITKTKAFQGLTQLRKLNLSFNYQKRVSFAHLSLAPSFGSLVALKELDMHGIFFRSLDETTLRPLARLPMLQTLRLQMNFINQAQLGIFRAFPGLRYVDLSDNRISGASELTATMGEADGGEKVWLQPGDLAPAPVDTPSSEDFRPNCSTLNFTLDLSRNNLVTVQPEMFAQLSHLQCLRLSHNCISQAVNGSQFLPLTGLQVLDLSHNKLDLYHEHSFTELPRLEALDLSYNSQPFGMQGVGHNFSFVAHLRTLRHLSLAHNNIHSQVSQQLCSTSLRALDFSGNALGHMWAEGDLYLHFFQGLSGLIWLDLSQNRLHTLLPQTLRNLPKSLQVLRLRDNYLAFFKWWSLHFLPKLEVLDLAGNQLKALTNGSLPAGTRLRRLDVSCNSISFVAPGFFSKAKELRELNLSANALKTVDHSWFGPLASALQILDVSANPLHCACGAAFMDFLLEVQAAVPGLPSRVKCGSPGQLQGLSIFAQDLRLCLDEALSWDCFALSLLAVALGLGVPMLHHLCGWDLWYCFHLCLAWLPWRGRQSGRDEDALPYDAFVVFDKTQSAVADWVYNELRGQLEECRGRWALRLCLEERDWLPGKTLFENLWASVYGSRKTLFVLAHTDRVSGLLRASFLLAQQRLLEDRKDVVVLVILSPDGRRSRYVRLRQRLCRQSVLLWPHQPSGQRSFWAQLGMALTRDNHHFYNRNFCQGPTAE

SEQ ID NO: 877084 - protein, 1017 aa, Homo sapiens
MAIMLAMTLALGTLPAFLPCELQPHGLVNCNWLFLKSVPHFSMAAPRGNVTSLSLSSNRIHHLHDSDFAHLPSLRHLNLKWNCPPVGLSPMHFPCHMTIEPSTFLAVPTLEELNLSYNNIMTVPALPKSLISLSLSHTNILMLDSASLAGLHALRFLFMDGNCYYKNPCRQALEVAPGALLGLGNLTHLSLKYNNLTVVPRNLPSSLEYLLLSYNRIVKLAPEDLANLTALRVLDVGGNCRRCDHAPNPCMECPRHFPQLHPDTFSHLSRLEGLVLKDSSLSWLNASWFRGLGNLRVLDLSENFLYKCITKTKAFQGLTQLRKLNLSFNYQKRVSFAHLSLAPSFGSLVALKELDMHGIFFRSLDETTLRPLARLPMLQTLRLQMNFINQAQLGIFRAFPGLRYVDLSDNRISGASELTATMGEADGGEKVWLQPGDLAPAPVDTPSSEDFRPNCSTLNFTLDLSRNNLVTVQPEMFAQLSHLQCLRLSHNCISQAVNGSQFLPLTGLQVLDLSHNKLDLYHEHSFTELPRLEALDLSYNSQPFGMQGVGHNFSFVAHLRTLRHLSLAHNNIHSQVSQQLCSTSLRALDFSGNALGHMWAEGDLYLHFFQGLSGLIWLDLSQNRLHTLLPQTLRNLPKSLQVLRLRDNYLAFFKWWSLHFLPKLEVLDLAGNQLKALTNGSLPAGTRLRRLDVSCNSISFVAPGFFSKAKELRELNLSANALKTVDHSWFGPLASALQILDVSANPLHCACGAAFMDFLLEVQAAVPGLPSRVKCGSPGQLQGLSIFAQDLRLCLDEALSWDCFALSLLAVALGLGVPMLHHLCGWDLWYCFHLCLAWLPWRGRQSGRDEDALPYDAFVVFDKTQSAVADWVYNELRGQLEECRGRWALRLCLEERDWLPGKTLFENLWASVYGSRKTLFVLAHTDRVSGLLRASFLLAQQRLLEDRKDVVVLVILSPDGRRSRYVRLRQRLCRQSVLLWPHQPSGQRSFWAQLGMALTRDNHHFYNRNFCQGPTAE

SEQ ID NO: 877085 - protein, 1053 aa, Homo sapiens [sequence omitted]

SEQ ID NO: 877086 - protein, 120 aa, Homo sapiens
GDPLESVVFIYSMPGYKCSIKERMLYSSCKSRLLDSVEQDFHLEIAKKGFCRSALHPLSLLVQAIMLAMTLALGTLPAFLPCELQPHGLVNCNWLFLKSKEKSADASKESETKSEVNDKQ

SEQ ID NO: 877087 - protein, 109 aa, Homo sapiens
MLREEAAQKRKGKEPGMALPQGRLTFRDVAIEFSLAEWKCLNPSQRALYREVMLENYRNLEAVGRVSLHLKQTKNNKKRPQKCFSSRIMDFLLFLSGSSSFLSLFFIYL

SEQ ID NO: 877088 - protein, 117 aa, Homo sapiens
PASGPSGALGYVKAAVPSWPMGGAESSWLACDMFLTYCVVNEAGTGGAEQGPSLALQLPDLAAIQRDPAKCYFLNTLSFHNNLTTLLSFTSALKTRELDSFWLIYTDYIWKPSETEL

SEQ ID NO: 877089 - protein, 72 aa, Homo sapiens
MREPPEGLNDAPILTGPQLTLKNAHLRSLPEHSGSTDNSYACTKEHDFKRLWPNCLLQAESLHAKVGLNEVC

SEQ ID NO: 877090 - protein, 91 aa, Homo sapiens
PLGTHFQSSWDYRFETSIIFCGEEKSSDFSGEKKVGRKSLQVQQHSKRTEIIPPFLKLSKEKVTRKENSLCKLPNQYSVHKTSSPLCTSSA

SEQ ID NO: 877091 - protein, 298 aa, Homo sapiens
AGSGSQASPLCATCGPALLRAPTRAAMTRSLFKGNFWSADILSTIGYDNIIQHLNNGRKNCKEFEDFLKERAAIEERYGKDLLNLSRKKPCGQSEINTLKRALEVFKQQVDNVAQCHIQLAQSLREEARKMEEFREKKQKTQQKKKLFGGARAPRKNFLNPILVGGRGPRVRGPWAKPGFHKKNRATDTLGRWASSPNKKRGGEHERVRKQTPEGGRGGTTGPIQKGSRGAPNNKSRRPAMITQSTRKGQQRTHAPAAERTKTDKSRRTTRNADDNDRHQNTTNTRNRHCTTHEYTHD

SEQ ID NO: 877092 - protein, 193 aa, Homo sapiens
AGSGSQASPLCATCGPALLRAPTRAAMTRSLFKGNFWSADILSTIGYDNIIQHLNNGRKNCKEFEDFLKERAAIEERYGKDLLNLSRKKPCGQSEIKYVSSFFLVSRLVNNAWELPRFSRQSYQEVEVCWLKKNFFGDGISLFCPGWAQTQDPQSGAVAHASNPSTLGGRGRWIAWAQEFKTSLGNLAKPHPY

SEQ ID NO: 877093 - protein, 177 aa, Homo sapiens
MTRSLFKGNFWSADILSTIGYDNIIQHLNNGRKNCKEFEDFLKERAAIEERYGKDLLNLSRKKPCGQSEINTLKRALEVFKQQVDNVAQCHIQLAQSLREEARKMEEFREKQKLQRKKMESHSVTQAGAQWHDLGSLQALPPGFMPFSCLSLPSSWNYRLPPPPRLAEPRNQDHGVA

SEQ ID NO: 877094 - protein, 236 aa, Homo sapiens
MTRSLFKGNFWSADILSTIGYDNIIQHLNNGRKNCKEFEDFLKERAAIEERYGKDLLNLSRKKPCGQSEINTLKRALEVFKQQVDNVAQCHIQLAQSLREEARKMEEFREKQKLQRKKTELIMDAIHKQKSLQFKKTMDAKKNYEQKCRDKDEAEQAVSRSANLVNPKQQEKLFVKLATSKTAVEDSDKAYMLHIGTLDKVREEWQSEHIKACEAFEAQECERINFFRNALWLHVN

SEQ ID NO: 877095 - protein, 137 aa, Homo sapiens
MPPDGKKFHFIIRDPPLPGLNENPGVKWSQKPDQPLTSSVAGWPLPPSLSKPAVVTKSPATLWCFHAIQWVWKSLLSLRTLKYLLQFFGCKQQKPVPGPAQWLTPITLPLSEAEVGRLLKSSNLKPAWATWQNTIST

SEQ ID NO: 877096 - protein, 209 aa, Homo sapiens
FFLIQSLALSPRLECSDAISAHYKLRLPGSCHSPASASRVAGTTGAHHHAWLIFVVFLVETEFHHVSQDGLDLLTSGSAHLGLPKYWDYRREPPRPAALNPHRSLKTSPSAPCPWKNFLPQNWSLVPKRLETTALQHPCKVQTIILQLNRMQLREVPVTCSAEERQSWESPSRSVSPTPARTLEMEGLSLDSSYSNHGKGVCNSHNSDF

SEQ ID NO: 877097 - protein, 151 aa, Homo sapiens
GNTIMTSQPISNETIIMLPSNVINFSQAEKPEPTNQGQDSLKKRLQAKVKVIGVHSSLAGSILSALSALVGFILLSVNPAALNPASLQCKLDEKDIPTRLLLSYDYHSPYTMDCHRAKASLAGTLSLMLVSTVLEFCLAVLTAVLQWKQTV

SEQ ID NO: 877098 - protein, 233 aa, Homo sapiens
HLLQTAGTCGVSDDSLGSLLGPRTAAVFRPRPGDSLPSRETRYVELYVVVDNAEFQMLGSEAAVRHRVLEVVNHVDKLYQKLNFRVVLVGLEIWNSQDRFHVSPDPSVTLENLLTWQARQRTRRHLHDNVQLITGVDFTGTTVGFARVSAMCSHSSGAVNQDHSKNPVGVACTMAHEMGHNLGMDHDENVQGCRCQERFEAGRCIMAGSIGSSFPRMFSDCSQAYLESFLERP

SEQ ID NO: 877099 - protein, 168 aa, Homo sapiens
MLPASLLRHPGLRRLMLQARTYAEAAAAPAPAAGPGQMSFTFASPTQVFFDSANVKQVDVPTLTGAFGILASHVPTLQVLRPGLVVVHTEDGTTTKYFVSSGSVTVNADSSVQLLAEEAVTLDMLDLGAARANLEKAQSELSGAADEAARAEIQIRIEANEALVKALE

SEQ ID NO: 877100 - protein, 206 aa, Homo sapiens
AGLLSAFGEREYTIKKETERREKVRRETEGKGREQKGPERAGEHRARGRHCRAGSAAAWAGAAAAARRRHVTRGRSCPRAERSQTPERTPRGHRCHRGSPGSSSVRRGRSSASGKTGDELKGGSGQGGTIFKDSRSLNAEPEETKGRWSGRHPRTGQARRPAWDSHLERSCQKEGLCCFGPGSELRCKPLPWQREPTQSIAACYKI

SEQ ID NO: 877101 - protein, 105 aa, Homo sapiens
LGVHRKPSFLALPGHLVKSEETVILQCWSDVMFEHFLLHREGKFNNTLHLIGEHHDGVSKANFSIGPMMPVLAGTYRCFGSFRDAPYEWSNSSDPLLVSVTGEET

SEQ ID NO: 877102 - protein, 87 aa, Homo sapiens
AVVRPPQRKKCPPEETHKFYSGGPTARPGRKGRPGPKAASPSQTRELVRGKVNRAAGRCKGKPKPVLPAKVNFNRGGWMRRRGGRTC

SEQ ID NO: 877103 - protein, 463 aa, Homo sapiens
MFASTFFMQDGTHNSSDLWSSSNGMSQPGFGGILGTSTSHMSQSSSYGNLHSHDRLSYPPHSVSPTDINTSLPPMSSFHRGSTSSSPYVAASHTPPINGSDSILGTRGNAAGSSQTGDALGKALASIYSPDHTSSSFPSNPSTPVGSPSPLTGTSQWPRPGGQAPSSPSYENSLHSLQSRMEDRLDRLDDAIHVLRNHAVGPSTSLPAGHSDIHSLLGPSHNAPIGSLNSNYGGSSLVASSRSASMVGTHREDSVSLNGNHSVLSSTVTTSSTDLNHKTQENYRGGLQSQSGTVVTTEIKTENKEKDENLHEPPSSDDMKSDDESSQKDIKVSSRGRTSSTNEDEDLNPEQKIEREKERRMANNARERLRVRDINEAFKELGRMCQLHLKSEKPQTKLLILHQAVAVILSLEQQVRERNLNPKAACLKRREEEKVSAVSAEPPTTLPGTHPGLSETTNPMGHM

SEQ ID NO: 877104 - protein, 521 aa, Homo sapiens
SRLYAAYAISRPRRRCSGIGSNSMMYEDNGKTVYAPSPNSDDFNRESPSYPSPKPPTSMFASTFFMQDGTHNSSDLWSSSNGMSQPGFGGILGTSTSHMSQSSSYGNLHSHDRLSYPPHSVSPTDINTSLPPMSSFHRGSTSSSPYVAASHTPPINGSDSILGTRGNAAGSSQTGDALGKALASIYSPDHTSSSFPSNPSTPVGSPSPLTGTSQWPRPGGQAPSSPSYENSLHSLQSRMEDRLDRLDDAIHVLRNHAVGPSTSLPAGHSDIHSLLGPSHNAPIGSLNSNYGGSSLVASSRSASMVGTHREDSVSLNGNHSVLSSTVTTSSTDLNHKTQENYRGGLQSQSGTVVTTEIKTENKEKDENLHEPPSSDDMKSDDESSQKDIKVSSRGRTSSTNEDEDLNPEQKIEREKERRMANNARERLRVRDINEAFKELGRMCQLHLKSEKPQTKLLILHQAVAVILSLEQQVRERNLNPKAACLKRREEEKVSAVSAEPPTTLPGTHPGLSETTNPMGHM

SEQ ID NO: 877105 - protein, 474 aa, Homo sapiens
RVATRRPRVADAWVDPRVRGSNSMMYETMGKRYMHHPQIQMISTVNLLVIHLLSHQPVCSLALSLCKSYPPHSVSPTDINTSLPPMSSFHRGSTSSSPYVAASHTPPINGSDSILGTRGNAAGSSQTGDALGKALASIYSPDHTSSSFPSNPSTPVGSPSPLTGTSQWPRPGGQAPSSPSYENSLHSLQSRMEDRLDRLDDAIHVLRNHAVGPSTSLPAGHSDIHSLLGPSHNAPIGSLNSNYGGSSLVASSRSASMVGTHREDSVSLNGNHSVLSSTVTTSSTDLNHKTQENYRGGLQSQSGTVVTTEIKTENKEKDENLHEPPSSDDMKSDDESSQKDIKVSSRGRTSSTNEDEDLNPEQKIEREKERRMANNARERLRVRDINEAFKELGRMCQLHLKSEKPQTKLLILHQAVAVILSLEQQVRERNLNPKAACLKRREEEKVSAVSAEPPTTLPGTHPGLSETTNPMGHM

SEQ ID NO: 877106 - protein, 536 aa, Homo sapiens
MYCAYPVPGMGSNSLMYYYNGKTVYAPSPNSDDFNRESPSYPSPKPPTSMFASTFFMQDGTHNSSDLWSSSNGMSQPGFGGILGTSTSHMSQSSSYGNLHSHDRLSYPPHSVSPTDINTSLPPMSSFHRGSTSSSPYVAASHTPPINGSDSILGTRGNAAGSSQTGDALGKALASIYSPDHTSSSFPSNPSTPVGSPSPLTGTSQWPRPGGQAPSSPSYENSLHSLKNRVEQQLHEHLQDAMSFLKDVCEQSRMEDRLDRLDDAIHVLRNHAVGPSTSLPAGHSDIHSLLGPSHNAPIGSLNSNYGGSSLVASSRSASMVGTHREDSVSLNGNHSVLSSTVTTSSTDLNHKTQENYRGGLQSQSGTVVTTEIKTENKEKDENLHEPPSSDDMKSDDESSQKDIKVSSRGRTSSTNEDEDLNPEQKIEREKERRMANNARERLRVRDINEAFKELGRMCQLHLKSEKPQTKLLILHQAVAVILSLEQQVRERNLNPKAACLKRREEEKVSAVSAEPPTTLPGTHPGLSETTNPMGHM

SEQ ID NO: 877107 - protein, 340 aa, Homo sapiens
MSSNSSTSQWPRPGGQAPSSPSYENSLHSLKNRVEQQLHEHLQDAMSFLKDVCEQSRMEDRLDRLDDAIHVLRNHAVGPSTSLPAGHSDIHSLLGPSHNAPIGSLNSNYGGSSLVASSRSASMVGTHREDSVSLNGNHSVLSSTVTTSSTDLNHKTQENYRGGLQSQSGTVVTTEIKTENKEKDENLHEPPSSDDMKSDDESSQKDIKVSSRGRTSSTNEDEDLNPEQKIEREKERRMANNARERLRVRDINEAFKELGRMCQLHLKSEKPQTKLLILHQAVAVILSLEQQVRERNLNPKAACLKRREEEKVSAVSAEPPTTLPGTHPGLSETTNPMGHM

SEQ ID NO: 877108 - protein, 295 aa, Homo sapiens
MSFLKDVCEQSRMEDRLDRLDDAIHVLRNHAVGPSTSLPAGHSDIHSLLGPSHNAPIGSLNSNYGGSSLVASSRSASMVGTHREDSVSLNGNHSVLSSTVTTSSTDLNHKTQENYRGGLQSQSGTVVTTEIKTENKEKDENLHEPPSSDDMKSDDESSQKDIKVSSRGRTSSTNEDEDLNPEQKIEREKERRMANNARERLRVRDINEAFKELGRMCQLHLKSEKPQTKLLILHQAVAVILSLEQQVRERNLNPKAACLKRREEEKVSAVSAEPPTTLPGTHPGLSETTNPMGHM

SEQ ID NO: 877109 - protein, 536 aa, Homo sapiens; identical to SEQ ID NO: 877106

SEQ ID NO: 877110 - protein, 280 aa, Homo sapiens
MNPQQQRMAAIGTDKELSDLLDFSAMFSPPVNSGKTRPTTLGSSQFSGSGIDERGGTTSWGTSGQPSPSYDSSRGFTDSPHYSDHLNDSRLGAHEGLSPTPFMNSNLMGKTSERGSFSLYSRDTGLPGCQSSLLRQDLGLGSPAQLSSSGKPGTAYYSFSATSSRRRPLHDSAALDPLQAKKVRKVPPGLPSSVYAPSPNSDDFNRESPSYPSPKPPTSMFASTFFMQDGTHNSSDLWSSSNGMSQPGFGGILGTSTSHMSQSSSYGNLHSHDRLVGYNT

SEQ ID NO: 877111 - protein, 116 aa, Homo sapiens
MNPQQQRMAAIGTDKELSDLLDFSAMFSPPVNSGKTRPTTLGSSQFSGSGIDERGGTTSWGTSGQPSPSYDSSRGFTDSPHYSDHLNDSRLGAHEGLSPTPFMNSNLMGKLVILCK

SEQ ID NO: 877112 - protein, 69 aa, Homo sapiens
EQKIEREKERRMANNARERLRVRDINEAFKELGRMCQLHLKSEKPQTKLLILHQAVAVILSLEQQVRGK

SEQ ID NO: 877113 - protein, 682 aa, Homo sapiens
MNPQQQRMAAIGTDKELSDLLDFSAMFSPPVNSGKTRPTTLGSSQFSGSGIDERGGTTSWGTSGQPSPSYDSSRGFTDSPHYSDHLNDSRLGAHEGLSPTPFMNSNLMGKTSERGSFSLYSRDTGLPGCQSSLLRQDLGLGSPAQLSSSGKPGTAYYSFSATSSRRRPLHDSAALDPLQAKKVRKVPPGLPSSVYAPSPNSDDFNRESPSYPSPKPPTSMFASTFFMQDGTHNSSDLWSSSNGMSQPGFGGILGTSTSHMSQSSSYGNLHSHDRLSYPPHSVSPTDINTSLPPMSSFHRGSTSSSPYVAASHTPPINGSDSILGTRGNAAGSSQTGDALGKALASIYSPDHTSSSFPSNPSTPVGSPSPLTGTSQWPRPGGQAPSSPSYENSLHSLQSRMEDRLDRLDDAIHVLRNHAVGPSTSLPAGHSDIHSLLGPSHNAPIGSLNSNYGGSSLVASSRSASMVGTHREDSVSLNGNHSVLSSTVTTSSTDLNHKTQENYRGGLQSQSGTVVTTEIKTENKEKDENLHEPPSSDDMKSDDESSQKDIKVSSRGRTSSTNEDEDLNPEQKIEREKERRMANNARERLRVRDINEAFKELGRMCQLHLKSEKPQTKLLILHQAVAVILSLEQQVRERNLNPKAACLKRREEEKVSAVSAEPPTTLPGTHPGLSETTNPMGHM

SEQ ID NO: 877114 - protein, 512 aa, Homo sapiens
MYCAYPVPGMGSNSLMYYYNGKTVYAPSPNSDDFNRESPSYPSPKPPTSMFASTFFMQDGTHNSSDLWSSSNGMSQPGFGGILGTSTSHMSQSSSYGNLHSHDRLSYPPHSVSPTDINTSLPPMSSFHRGSTSSSPYVAASHTPPINGSDSILGTRGNAAGSSQTGDALGKALASIYSPDHTSSSFPSNPSTPVGSPSPLTGTSQWPRPGGQAPSSPSYENSLHSLQSRMEDRLDRLDDAIHVLRNHAVGPSTSLPAGHSDIHSLLGPSHNAPIGSLNSNYGGSSLVASSRSASMVGTHREDSVSLNGNHSVLSSTVTTSSTDLNHKTQENYRGGLQSQSGTVVTTEIKTENKEKDENLHEPPSSDDMKSDDESSQKDIKVSSRGRTSSTNEDEDLNPEQKIEREKERRMANNARERLRVRDINEAFKELGRMCQLHLKSEKPQTKLLILHQAVAVILSLEQQVRERNLNPKAACLKRREEEKVSAVSAEPPTTLPGTHPGLSETTNPMGHM

SEQ ID NO: 877115 - protein, 589 aa, Homo sapiens
MCYFTLDGVMECPDPRKTSERGSFSLYSRDTGLPGCQSSLLRQDLGLGSPAQLSSSGKPGTAYYSFSATSSRRRPLHDSAALDPLQAKKVRKVPPGLPSSVYAPSPNSDDFNRESPSYPSPKPPTSMFASTFFMQDGTHNSSDLWSSSNGMSQPGFGGILGTSTSHMSQSSSYGNLHSHDRLSYPPHSVSPTDINTSLPPMSSFHRGSTSSSPYVAASHTPPINGSDSILGTRGNAAGSSQTGDALGKALASIYSPDHTSSSFPSNPSTPVGSPSPLTGTSQWPRPGGQAPSSPSYENSLHSLQSRMEDRLDRLDDAIHVLRNHAVGPSTSLPAGHSDIHSLLGPSHNAPIGSLNSNYGGSSLVASSRSASMVGTHREDSVSLNGNHSVLSSTVTTSSTDLNHKTQENYRGGLQSQSGTVVTTEIKTENKEKDENLHEPPSSDDMKSDDESSQKDIKVSSRGRTSSTNEDEDLNPEQKIEREKERRMANNARERLRVRDINEAFKELGRMCQLHLKSEKPQTKLLILHQAVAVILSLEQQVRERNLNPKAACLKRREEEKVSAVSAEPPTTLPGTHPGLSETTNPMGHM

SEQ ID NO: 877116 - protein, 362 aa, Homo sapiens
MNPQQQRMAAIGTDKELSDLLDFSAMFSPPVNSGKTRPTTLGSSQFSGSGIDERGGTTSWGTSGQPSPSYDSSRGFTDSPHYSDHLNDSRLGAHEGLSPTPFMNSNLMGKTSERGSFSLYSRDTGLPGCQSSLLRQDLGLGSPAQLSSSGKPGTAYYSFSATSSRRRPLHDSAALDPLQAKKVRKVPPGLPSSVYAPSPNSDDFNRESPSYPSPKPPTSMFASTFFMQDGTHNSSDLWSSSNGMSQPGFGGILGTSTSHMSQSSSYGNLHSHDRLSYPPHSVSPTDINTSLPPMSSFHRGSTSSSPYVAASHTPPINGSDSILGTRGNAAGSSQTGDALGKALASIYFPDHTSCTFGKIKLY

SEQ ID NO: 877117 - protein, 161 aa, Homo sapiens
MNPQQQRMAAIGTDKELSDLLDFSAMFSPPVNSGKTRPTTLGSSQFSGSGIDERGGTTSWGTSGQPSPSYDSSRGFTDSPHYSDHLNDSRLGAHEGLSPTPFMNSNLMDMPCVQAQYSPSPPGSSYAAQTYSSEYTTEIMNPDYTKLTMDLGSTEITATAT

SEQ ID NO: 877118 - protein, 67 aa, Homo sapiens
TTRPPTGLRLQPPPCSQRALTSRSHPINLPSNINHKTRSEFSADTPSVTTAFHTSPQPGKSGSLGNC

SEQ ID NO: 877119 - protein, 161 aa, Homo sapiens
PLSPFPSSQRLGACAVGLIAVGVGAQLVLSQTIIQGATPGSLLPVVIIAVGVFLFLVAFVGCCGACKENYCLMITFAIFLSLIMLVEVAAAIAGYVFRDKVMSEFNNNFRQQMENYPKNNHTASILDRMQADFKCCGAANYTDWEKIPSMSKNRVPDSLLH

SEQ ID NO: 877120 - protein, 117 aa, Homo sapiens
KTFVSVQDRLCQNGPLYCIDSKLDFCPLLLQFAIFLSLIMLVEVAAAIAGYVFRDKVMSEFNNNFRQQMENYPKNNHTASILDRMQADFKCCGAANYTDWEKIPSMSKNRVPDSLLH

SEQ ID NO: 877121 - protein, 220 aa, Homo sapiens
TPGDWRAEGRRQAQAPAGALGSVLGPRGGGAGSGLRGRRPHPSPAGPAAMAVEGGMKCVKFLLYVLLLAFCACAVGLIAVGVGAQLVLSQTIIQGATPGSLLPVVIIAVGVFLFLVAFVGCCGACKENYCLMITFAIFLSLIMLVEVAAAIAGYVFRDKVMSEFNNNFRQQMENYPKNNHTASILDRMQADFKCCGAANYTDWEKIPSMSKNRVPDSLLH

SEQ ID NO: 877122 - protein, 218 aa, Homo sapiens
RVSGWEGPGIGAVKGSPRGPAGSPETEVPLRPVLIPPPSPLPQGPAAMAVEGGMKCVKFLLYVLLLAFCACAVGLIAVGVGAQLVLSQTIIQGATPGSLLPVVIIAVGVFLFLVAFVGCCGACKENYCLMITFAIFLSLIMLVEVAAAIAGYVFRDKVMSEFNNNFRQQMENYPKNNHTASILDRMQADFKCCGAANYTDWEKIPSMSKNRVPDSLLH

SEQ ID NO: 877123 - protein, 117 aa, Homo sapiens; identical to SEQ ID NO: 877120

SEQ ID NO: 877124 - protein, 195 aa, Homo sapiens
RVSGWEGPGIGAVKGSPRGPAGSPETEVPLRPVLIPPPSPLPQGPAAMAVEGGMKCVKFLLYVLLLAFCACAVGLIAVGVGAQLVLSQTIIQGATPGSLLPVVIIAVGVFLFLVAFVGCCGACKENYCLMITFAIFLSLIMLVEVAAAIAGYVFRDKVMSQVTSNFPAAKGNTRIPPTLLNPGQKHADLRAPGCY

SEQ ID NO: 877125 - protein, 221 aa, Homo sapiens
SQHAAPLAAARRPRKKFFPVGPNPGKGGGAPEPRRERNAQPALGSPGPAAMAVEGGMKCVKFLLYVLLLAFCACAVGLIAVGVGAQLVLSQTIIQGATPGSLLPVVIIAVGVFLFLVAFVGCCGACKENYCLMITFAIFLSLIMLVEVAAAIAGYVFRDKVMSEFNNNFRQQMENYPKNNHTASILDRMQADFKCCGAANYTDWEKIPSMSKNRVPDSLLH

SEQ ID NO: 877126 - protein, 171 aa, Homo sapiens
MAVEGGMKCVKFLLYVLLLAFCACAVGLIAVGVGAQLVLSQTIIQGATPGSLLPVVIIAVGVFLFLVAFVGCCGACKENYCLMITFAIFLSLIMLVEVAAAIAGYVFRDKVMSEFNNNFRQQMENYPKNNHTASILDRMQADFKCCGAANYTDWEKIPSMSKNRVPDSLLH

SEQ ID NO: 877127 - protein, 171 aa, Homo sapiens; identical to SEQ ID NO: 877126

SEQ ID NO: 877128 - protein, 171 aa, Homo sapiens; identical to SEQ ID NO: 877126

SEQ ID NO: 877129 - protein, 171 aa, Homo sapiens; identical to SEQ ID NO: 877126

SEQ ID NO: 877130 - protein, 218 aa, Homo sapiens; identical to SEQ ID NO: 877122

SEQ ID NO: 877131 - protein, 171 aa, Homo sapiens; identical to SEQ ID NO: 877126

SEQ ID NO: 877132 - protein, 171 aa, Homo sapiens; identical to SEQ ID NO: 877126

SEQ ID NO: 877133 - protein, 163 aa, Homo sapiens
MTPTSLYVLLLAFRACAVGLIAVGVGAQLVLSQTIIQGATPGSLLPVVIIAVGVFLFLVAFVGCCGACKENYCLMITFAIFLSLIMLVEVAAAIAGYVFRDKVMSEFNNNFRQQMENYPKNNHTASILDRMQADFKCCGAANYTDWEKIPSMSKNRVPDSLLH

SEQ ID NO: 877134 - protein, 122 aa, Homo sapiens
MPLDEGMHIAVGVFLFLVAFVGCCGACKENYCLMITFAIFLSLIMLVEVAAAIAGYVFRDKVMSEFNNNFRQQMENYPKNNHTASILDRMQADFKCCGAANYTDWEKIPSMSKNRVPDSLLH

SEQ ID NO: 877135 - protein, 80 aa, Homo sapiens
MTPSLQQTRSIAGYVFRDKVMSEFNNNFRQQMENYPKNNHTASILDRMQADFKCCGAANYTDWEKIPSMSKNRVPDSLLH

SEQ ID NO: 877136 - protein, 127 aa, Homo sapiens
MAVEGGMKCVKFLLYVLLLAFCACAVGLIAVGVGAQLVLSQTIIQGATPGSLLPVVIIAVGVFLFLVAFVGCCGACKENYCLMITFAIFLSLIMLVEVAAAIAGYVFRDKVMSEFNNNFRQQMENYL

SEQ ID NO: 877137 - protein, 171 aa, Homo sapiens; identical to SEQ ID NO: 877126

SEQ ID NO: 877138 - protein, 204 aa, Homo sapiens
MAVEGGMKCVKFLLYVLLLAFCACAVGLIAVGVGAQLVLSQTIIQGATPGSLLPVVIIAVGVFLFLVAFVGCCGACKENYCLMITFAIFLSLIMLVEVAAAIAGYVFRDKVMSEFNNNFRQQMENYQPSPRLPAALMLLWAVGLISTRRAIHKEGCVAATIGGWLRKNVLVVAAAALGIAFVEVLGIVFACCLVKSIRSGYEVM

SEQ ID NO: 877139 - protein, 101 aa, Homo sapiens
GRSGTARAAWFGLRKFAIFLSLIMLVEVAAAIAGYVFRDKVMSEFNNNFRQQMENYPKNNHTASILDRMQADFKCCGAANYTDWEKIPSMSKNRVPDSLLH

SEQ ID NO: 877140 - protein, 158 aa, Homo sapiens
MAVEGGMKCVKFLLYVLLLAFCACAVGLIAVGVGAQLVLSQTIIQGATPGSLLPVVIIAVGVFLFLVAFVGCCGACKENYCLMITFAIFLSLIMLVEVAAAIAGYVFRDKVMSEFNNNFRQQMENYPKNNHTASILDRMQADFKCCGAANYTDGEAVD

SEQ ID NO: 877141 - protein, 159 aa, Homo sapiens
MAVEGGMKCVKFLLYVLLLAFCACAVGLIAVGVGAQLVLSQTIIQGATPGSLLPVVIIAVGVFLFLVAFVGCCGACKENYCLMITFAIFLSLIMLVEVAAAIAGYVFRDKVMSEFNNNFRQQMENYPKNNHTASILDRMQADEKIPSMSKNRVPDSLLH

SEQ ID NO: 877142 - protein, 182 aa, Homo sapiens
MAVEGGMKCVKFLLYVLLLAFCACAVGLIAVGVGAQLVLSQTIIQGATPGSLLPVVIIAVGVFLFLVAFVGCCGACKENYCLMITFAIFLSLIMLVEVAAAIAGYVFRDKVMSEFNNNFRQQMENYPKNNHTASILDRMQADVSGVAGSRGGGNREFSSPRLGVVTHACNLSTFEGRGGQIT

SEQ ID NO: 877143 - protein, 191 aa, Homo sapiens
MAVEGGMKCVKFLLYVLLLAFCACAVGLIAVGVGAQLVLSQTIIQGATPGSLLPVVIIAVGVFLFLVAFVGCCGACKENYCLMITFAIFLSLIMLVEVAAAIAGYVFRDKVMSEFNNNFRQQMENYRATQRATQLLGWLVGWPFVWLLAWLFVGTSLAPGVYRVSTPYIYSRNRRRHTSIFHLRYHNHRYP

SEQ ID NO: 877144 - protein, 114 aa, Homo sapiens
MAVEGGMKCVKFLLYVLLLAFCACAVGLIAVGVGAQLVLSQTIIQGATPGSLLPVVIIAVGVFLFLVAFVGCCGACKENYCLMITFAIFLSLIMLVEVAAAIAGYVFRDKVSRE

SEQ ID NO: 877145 - protein, 67 aa, Homo sapiens
DSSGSFRQRTPEGDPEGGCVAATIGGWLRKNVLVVAAAALGIAFVEVLGIVFACCLVKSIRSGYEVM

SEQ ID NO: 877146 - protein, 125 aa, Homo sapiens
MKTIPSTDTELQPYSPSENKGNVLKCPLMATPRRAAVDVRQFPGAPLWVLAVLQGLNRPETVSMSVWSSWHLNGVSLPLGTFLPTFFLFFKQYTFVSAYFVAGTRQYQGGGRNKSKSLSLKNNLL

SEQ ID NO: 877147 - protein, 171 aa, Homo sapiens; identical to SEQ ID NO: 877126

SEQ ID NO: 877148 - protein, 101 aa, Homo sapiens; identical to SEQ ID NO: 877139

SEQ ID NO: 877149 - protein, 78 aa, Homo sapiens
DPPPGCVPIAGYVFRDKVMSEFNNNFRQQMENYPKNNHTASILDRMQADFKCCGAANYTDWEKIPSMSKNRVPDSLLH

SEQ ID NO: 877150 - protein, 144 aa, Homo sapiens
GTHHSCSLFLFPSPGLTGQRNPSVTADARVGCALEDSEGGSSGRELSWEPWRPVESIILGLCSGTDCRGCRGTACPESDHNPGGYPWLSVASGHHRSGCLPLPGGFCGLLRGLQGELLSYDHVCHLSVSYHVGGGGRSHCWLCV

SEQ ID NO: 877151 - protein, 110 aa, Homo sapiens
MAVEGGMKCVKFLLYVLLLAFCACAVGLIAVGVGAQLVLSQTIIQGATPGSLLPVVIIAVGVFLFLVAFVGCCGACKENYCLMITFAIFLSLIMLVEVAAAIAGYVFRDK

SEQ ID NO: 877152 - protein, 174 aa, Homo sapiens
MTPTSLYVLLLAFRACAVGLIAVGVGAQLVLSQTIIQGATPGSLLPVVIIAVGVFLFLVAFVGCCGACKENYCLMITFAIFLSLIMLVEVAAAIAGYVFRDKVMSEFNNNFRQQMENYPKNNHTASILDRMQADVSGVAGSRGGGNREFSSPRLGVVTHACNLSTFEGRGGQIT

SEQ ID NO: 877153 - protein, 171 aa, Homo sapiens; identical to SEQ ID NO: 877126

SEQ ID NO: 877154 - protein, 171 aa, Homo sapiens; identical to SEQ ID NO: 877126

SEQ ID NO: 877155 - protein, 171 aa, Homo sapiens; identical to SEQ ID NO: 877126

SEQ ID NO: 877156 - protein, 220 aa, Homo sapiens; identical to SEQ ID NO: 877121

SEQ ID NO: 877157 - protein, 222 aa, Homo sapiens
PGGLRRGLGETTRSPFLQGSPQARGDSSGALQPPWSNFASKFPGPGQGPAAMAVEGGMKCVKFLLYVLLLAFCACAVGLIAVGVGAQLVLSQTIIQGATPGSLLPVVIIAVGVFLFLVAFVGCCGACKENYCLMITFAIFLSLIMLVEVAAAIAGYVFRDKVMSEFNNNFRQQMENYPKNNHTASILDRMQADFKCCGAANYTDWEKIPSMSKNRVPDSLLH

SEQ ID NO: 877158 - protein, 144 aa, Homo sapiens; identical to SEQ ID NO: 877150

SEQ ID NO: 877159 - protein, 171 aa, Homo sapiens; identical to SEQ ID NO: 877126

SEQ ID NO: 877160 - protein, 171 aa, Homo sapiens; identical to SEQ ID NO: 877126

SEQ ID NO: 877161 - protein, 171 aa, Homo sapiens; identical to SEQ ID NO: 877126

SEQ ID NO: 877162 - protein, 218 aa, Homo sapiens
MAVEGGMKCVKFLLYVLLLAFCACAVGLIAVGVGAQLVLSQTIIQGATPGSLLPVVIIAVGVFLFLVAFVGCCGACKENYCLMITFAIFLSLIMLVEVAAAIAGYVFRDKVMSEFNNNFRQQMENYPKNNHTASILDRMQADFKCCGAANYTDWAVGLISTRRAIHKEGCVAATIGGWLRKNVLVVAAAALGIAFVEVLGIVFACCLVKSIRSGYEVM

SEQ ID NO: 877163 - protein, 204 aa, Homo sapiens; identical to SEQ ID NO: 877138

SEQ ID NO: 877164 - protein, 150 aa, Homo sapiens
MAVEGGMKCVKFLLYVLLLAFCACAVGLIAVGVGAQLVLSQTIIQGATPGSLLPVVIIAVGVFLFLVAFVGCCGACKENYCLMITFAIFLSLIMLVEVAAAIAGYVFRDKVMSEFNNNFRQQMENYPKNNHTASILDRMQADFKCCGAAN

SEQ ID NO: 877165 - protein, 162 aa, Homo sapiens
MAVEGGMKCVKFLLYVLLLAFCACAVGLIAVGVGAQLVLSQTIIQGATPGSLLPVVIIAVGVFLFLVAFVGCCGACKENYCLMITFAIFLSLIMLVEVAAAIAGYVFRDKVMSEFNNNFRQQMENYRFGNCLCLLPREEYQKWLRGDVGVWSPQASSSGGVE

SEQ ID NO: 877166 - protein, 128 aa, Homo sapiens
  misc_feature (128)..(128): Xaa can be any naturally occurring amino acid
MAVEGGMKCVKFLLYVLLLAFCACAVGLIAVGVGAQLVLSQTIIQGATPGSLLPVVIIAVGVFLFLVAFVGCCGACKENYCLMITFAIFLSLIMLVEVAAAIAGYVFRDKAMPPLPPPFRPPMAHSPX

SEQ ID NO: 877167 - protein, 78 aa, Homo sapiens
QGRDRGTRRGLGWEVSDGAFVLCACHLQGCVAATIGGWLRKNVLVVAAAALGIAFVEVLGIVFACCLVKSIRSGYEVM

SEQ ID NO: 877168 - protein, 186 aa, Homo sapiens [sequence omitted]

SEQ ID NO: 877169 - protein, 112 aa, Homo sapiens
MMNYVGKRKKRRKRDPQAPRRPPSSFLLFCQDHYAQLKRENPNWSVVQVAKATGKMWSTATDLEKHPYEQRVALLRAKYFEELELYRKQCNARKKYRMSARNRCRGKRVRQS

SEQ ID NO: 877170 - protein, 150 aa, Homo sapiens
RGPRQTATDTGRARVSFWRFPLDPGVKNSNVQISGEKRRFRTLRSLFHPFPVTRSGAPRAVLVGSSWPAKMVAPAVKVARGWSGLALGVRRAVLQLPGLTQVRWSRYSPEFKDPLIDKEYYRKPVEELTEEEKYVRERHMRGLSSESSAY

SEQ ID NO: 877171 - protein, 154 aa, Homo sapiens
  misc_feature (148)..(149): Xaa can be any naturally occurring amino acid
RGPRQTATDTGRARVSFWRFPLDPGVKNSNVQISGEKRRFRTLRSLFHPFPVTRSGAPRAVLVGSSWPAKMVAPAVKVARGWSGLALGVRRAVLQLPGLTQVRWSRYSPEFKDPLIDKEYYRKPVEELTEEEKYVRERHMERYLKSRXXTDVFY

SEQ ID NO: 877172 - protein, 312 aa, Homo sapiens
RGPRQTATDTGRARVSFWRFPLDPGVKNSNVQISGEKRRFRTLRSLFHPFPVTRSGAPRAVLVGSSWPAKMVAPAVKVARGWSGLALGVRRAVLQLPGLTQVRWSRYSPEFKDPLIDKEYYRKPVEELTEEEKYVRELKKTQLIKAAPAGKTSSVFEDPVISKFTNMMMIGGNKVLARSLMIQTLEAVKRKQFEKYHAASAEEQATIERNPYTIFHQALKNCEPMIGLVPILKGGRFYQVPVPLPDRRRRFLAMKWMITECRDKKHQRTLMPEKLSHKLLEAFHNQGPVIKRKHDLHKMAEANRALAHYRWW

SEQ ID NO: 877173 - protein, 220 aa, Homo sapiens
MPANSRLTQVRWSRYSPEFKDPLIDKEYYRKPVEELTEEEKYVRELKKTQLIKAAPAGKTSSVFEDPVISKFTNMMMIGGNKVLARSLMIQTLEAVKRKQFEKYHAASAEEQATIERNPYTIFHQALKNCEPMIGLVPILKGGRFYQVPVPLPDRRRRFLAMKWMITECRDKKHQRTLMPEKLSHKLLEAFHNQGPVIKRKHDLHKMAEANRALAHYRWW

SEQ ID NO: 877174 - protein, 169 aa, Homo sapiens
RGPRQTATDTGRARVSFWRFPLDPGVKNSNVQISGEKRRFRTLRSLFHPFPVTRSGAPRAVLVGSSWPAKMVAPAVKVARGWSGLALGVRRAVLQLPGLTQVRWSRYSPEFKDPLIDKEYYRKPVEELTEEEKYVRELKKTQLIKAAPAGKTSSVFEDPVIRLDGNKHG

SEQ ID NO: 877175 - protein, 312 aa, Homo sapiens; identical to SEQ ID NO: 877172

SEQ ID NO: 877176 - protein, 312 aa, Homo sapiens; identical to SEQ ID NO: 877172

SEQ ID NO: 877177 - protein, 271 aa, Homo sapiens
MSSYLGQGPELLWLRFSSRSPRRSPSSARWQSCLLLSQTYSLVESAFACLLLSPPPRLTQVRWSRYSPEFKDPLIDKEYYRKPVEELTEEEKYVRELKKTQLIKAAPAGKTSSVFEDPVISKFTNMMMIGGNKVLARSLMIQTLEAVKRKQFEKYHAASAEEQATIERNPYTIFHQALKNCEPMIGLVPILKGGRFYQVPVPLPDRRRRFLAMKWMITECRDKKHQRTLMPEKLSHKLLEAFHNQGPVIKRKHDLHKMAEANRALAHYRWW

SEQ ID NO: 877178 - protein, 146 aa, Homo sapiens
MMMIGGNKVLARSLMIQTLEAVKRKQFEKYHAASAEEQATIERNPYTIFHQALKNCEPMIGLVPILKGGRFYQVPVPLPDRRRRFLAMKWMITECRDKKHQRTLMPEKLSHKLLEAFHNQGPVIKRKHDLHKMAEANRALAHYRWW

SEQ ID NO: 877179 - protein, 134 aa, Homo sapiens
MILLQTLEAVKRKQFEKYHAASAEEQATIERNPYTIFHQALKNCEPMIGLVPILKGGRFYQVPVPLPDRRRRFLAMKWMITECRDKKHQRTLMPEKLSHKLLEAFHNQGPVIKRKHDLHKMAEANRALAHYRWW

SEQ ID NO: 877180 - protein, 115 aa, Homo sapiens
MILLQTLEAVKRKQFEKYHAASAEEQATIERNPYTIFHQALKNCEPMIGLVPILKGGRFYQVPVPLPDRRRRFLAMKWMITECRDKKHQRTLMPEKHDLHKMAEANRALAHYRWW

SEQ ID NO: 877181 - protein, 306 aa, Homo sapiens
MKQSDASPQERVDSDDQWGEYSCVFLPEPMGTANIQLHGPPRVKAVKSSEHINEGETAMLVCKSESVPPVTDWAWYKITDSEDKALMNGSESRFFVSSSQGRSELHIENLNMEADPGQYRCNGTSSKGSDQAIITLRVRSHLAASGPSWASWLRCWCWSTIIFIYEKRRKPEDVLDDDDGGSDPCKSSGQHQKDNGKKVRQKKLSGGQWPRNHTNTDCDPDRSTITRRADHRVSAVKETRTEIHKKPLYKTGVPQRNRAANTSTRVPTSERRDQGQPASYRGTHRENQINRRPALTQHVVRRAATH

SEQ ID NO: 877182 - protein, 334 aa, Homo sapiens
MLLTCSLNDSATEVTGHRWLKGGVVLKEDALPGQKTEFKVDSDDQWGEYSCVFLPEPMGTANIQLHGPPRVKAVKSSEHINEGETAMLVCKSESVPPVTDWAWYKITDSEDKALMNGSESRFFVSSSQGRSELHIENLNMEADPGQYRCNGTSSKGSDQAIITLRVRSHLAASGPSWASWLRCWCWSTIIFIYEKRRKPEDVLDDDDGGSDPCKSSGQHQKDNGKKVRQKELSGGQWPRNHTNTDCDPDRSTIRGEQITGSQREGNAHRDPQEATDIKQGYHRGIGQQIHPRGYQRASDVTRGNRRATGGHTAKTRLTDGQHYLSTLCAAPRRM

SEQ ID NO: 877183 - protein, 511 aa, Homo sapiens
MKLSKKDRGEDEESDSAKKKLDWSCSLLVASLAGAFGSSFLYGYNLSVVNAPTPYIKAFYNESWERRHGRPIDPDTLTLLWSVTVSIFAIGGLVGTLIVKMIGKVLGRKHTLLANNGFAISAALLMACSLQAGAFEMLIVGRFIMGIDGGVALSVLPMYLSEISPKEIRGSLGQVTAIFICIGVFTGQLLGLPELLGKESTWPYLFGVIVVPAVVQLLSLPFLPDSPRYLLLEKHNEARAVKAFQTFLGKADVSQEVEEVLAESRVQRSIRLVSVLELLRAPYVRWQVVTVIVTMACYQLCGLNAIWFYTNSIFGKAGIPLAKIPYVTLSTGGIETLAAVFSGLVIEHLGRRPLLIGGFGLMGLFFGTLTITLTLQDHAPWVPYLSIVGILAIIASFCSGPGGIPFILTGEFFQQSQRPAAFIIAGTVNWLSNFAVGLLFPFIQKSLDTYCFLVFATICITGAIYLYFVLPETKNRTYAEISQAFSKRNKAYPPEEKIDSAVTDGKINGRP

SEQ ID NO: 877184 - protein, 511 aa, Homo sapiens; identical to SEQ ID NO: 877183

SEQ ID NO: 877185 - protein, 578 aa, Homo sapiens
VSGILTQPGRNARAWPLNLRAPGLRTRTWTGTLLAGPQLASLLSVSTPAKDKDFSSGRPPPAEGTFQVFPRPWLRARCRLCRGFLSPQDWSCSLLVASLAGAFGSSFLYGYNLSVVNAPTPYIKAFYNESWERRHGRPIDPDTLTLLWSVTVSIFAIGGLVGTLIVKMIGKVLGRKHTLLANNGFAISAALLMACSLQAGAFEMLIVGRFIMGIDGGVALSVLPMYLSEISPKEIRGSLGQVTAIFICIGVFTGQLLGLPELLGKESTWPYLFGVIVVPAVVQLLSLPFLPDSPRYLLLEKHNEARAVKAFQTFLGKADVSQEVEEVLAESRVQRSIRLVSVLELLRAPYVRWQVVTVIVTMACYQLCGLNAIWFYTNSIFGKAGIPLAKIPYVTLSTGGIETLAAVFSGLVIEHLGRRPLLIGGFGLMGLFFGTLTITLTLQDHAPWVPYLSIVGILAIIASFCSGPGGIPFILTGEFFQQSQRPAAFIIAGTVNWLSNFAVGLLFPFIQKSLDTYCFLVFATICITGAIYLYFVLPETKNRTYAEISQAFSKRNKAYPPEEKIDSAVTDGKINGRP

SEQ ID NO: 877186 - protein, 604 aa, Homo sapiens
KCLGRVWGPWTEPSAGSLRPMARKQNRNSKELGLVPLTDDTSHARPPGPGRALLECDHLRSGVPGGRRRKDWSCSLLVASLAGAFGSSFLYGYNLSVVNAPTPYIKAFYNESWERRHGRPIDPDTLTLLWSVTVSIFAIGGLVGTLIVKMIGKVLGRKHTLLANNGFAISAALLMACSLQAGAFEMLIVGRFIMGIDGGVALSVLPMYLSEISPKEIRGSLGQVTAIFICIGVFTGQLLGLPELLGKESTWPYLFGVIVVPAVVQLLSLPFLPDSPRYLLLEKHNEARAVKAFQTFLGKADVSQEVEEVLAESRVQRSIRLVSVLELLRAPYVRWQVVTVIVTMACYQLCGLNAIWFYTNSIFGKAGIPLAKIPYVTLSTGGIETLAAVFSGLVIEHLGRRPLLIGGFGLMGLFFGTLTITLTLQDHAPWVPYLSIVGILAIIASFCSGPGGIPFILTGEFFQQSQRPAAFIIAGTVNWLSNFAVGLLFPFIQKSLDTYCFLVFATICITGAIYLYFVLPETKNRTYAEISQAFSKRNKAYPPEEKIDSAVTDGNSSKELRQRSWRPSGESQDFPQLCLAGLLLVFSVCREEQELPFYLAYLHL

SEQ ID NO: 877187 - protein, 604 aa, Homo sapiens; identical to SEQ ID NO: 877186

SEQ ID NO: 877188 - protein, 581 aa, Homo sapiens
KCLGRVWGPWTEPSAGSLRPMARKQNRNSKELGLVPLTDDTSHARPPGPGRALLECDHLRSGVPGGRRRKDWSCSLLVASLAGAFGSSFLYGYNLSVVNAPTPYIKAFYNESWERRHGRPIDPDTLTLLWSVTVSIFAIGGLVGTLIVKMIGKVLGRKHTLLANNGFAISAALLMACSLQAGAFEMLIVGRFIMGIDGGVALSVLPMYLSEISPKEIRGSLGQVTAIFICIGVFTGQLLGLPELLGKESTWPYLFGVIVVPAVVQLLSLPFLPDSPRYLLLEKHNEARAVKAFQTFLGKADVSQEVEEVLAESRVQRSIRLVSVLELLRAPYVRWQVVTVIVTMACYQLCGLNAIWFYTNSIFGKAGIPLAKIPYVTLSTGGIETLAAVFSGLVIEHLGRRPLLIGGFGLMGLFFGTLTITLTLQDHAPWVPYLSIVGILAIIASFCSGPGGIPFILTGEFFQQSQRPAAFIIAGTVNWLSNFAVGLLFPFIQKSLDTYCFLVFATICITGAIYLYFVLPETKNRTYAEISQAFSKRNKAYPPEEKIDSAVTDGNDLMSRRQTCRNECAWIPESPGEGNSH

SEQ ID NO: 877189 - protein, 117 aa, Homo sapiens
MELAHMIMEAEKSLDRPSASWRPWDSGGTAQSKSRSFSTRKANGNSQSDAKGLRTRAMDGTLVQVLKSKGQGARSSDLQEQEKKSIPAPGERQTEKQNKTKQTNKRKCLFFCPFCLI

SEQ ID NO: 877190 - protein, 560 aa, Homo sapiens
KCLGRVWGPWTEPSAGSLRPMARKQNRNSKELGLVPLTDDTSHARPPGPGRALLECDHLRSGVPGGRRRKDWSCSLLVASLAGAFGSSFLYGYNLSVVNAPTPYIKAFYNESWERRHGRPIDPDTLTLLWSVTVSIFAIGGLVGTLIVKMIGKVLGRKHTLLANNGFAISAALLMACSLQAGAFEMLIVGRFIMGIDGGVALSVLPMYLSEISPKEIRGSLGQVTAIFICIGVFTGQLLGLPELLGKESTWPYLFGVIVVPAVVQLLSLPFLPDSPRYLLLEKHNEARAVKAFQTFLGKADVSQEVEEVLAESRVQRSIRLVSVLELLRAPYVRWQVVTVIVTMACYQLCGLNAIWFYTNSIFGKAGIPLAKIPYVTLSTGGIETLAAVFSGLVIEHLGRRPLLIGGFGLMGLFFGTLTITLTLQDHAPWVPYLSIVGILAIIASFCSGPGGIPFILTGEFFQQSQRPAAFIIAGTVNWLSNFAVGLLFPFIQKSLDTYCFLVFATICITGAIYLYFVLPETKNRTYAEISQAFSKRNKAYPPEEKIDSAVTDGKINGRP

SEQ ID NO: 877191 - protein, 121 aa, Homo sapiens
PPPKKNTHCKRSCGISSTWNDLPLSSSPGEHQVMMSDKSLDFGDMVTSCQEGRPAEMNVPGYLSHQVKETPIDLHHTPDMKPFFFCTVTEVRDYYSLQLSLALSCLTNISFNKCCSISHGF

SEQ ID NO: 877192 - protein, 518 aa, Homo sapiens
MARKQNRNSKELGLVPLTDDTSHARPPGPGRALLECDHLRSGVPGGRRRKDWSCSLLVASLAGAFGSSFLYGYNLSVVNAPTPYIKAFYNESWERRHGRPIDPDTLTLLWSVTVSIFAIGGLVGTLIVKMIGKVLGRKHTLLANNGFAISAALLMACSLQAGAFEMLIVGRFIMGIDGGVALSVLPMYLSEISPKEIRGSLGQVTAIFICIGVFTGQLLGLPELLGKESTWPYLFGVIVVPAVVQLLSLPFLPDSPRYLLLEKHNEARAVKAFQTFLGKADVSQEVEEVLAESRVQRSIRLVSVLELLRAPYVRWQVVTVIVTMACYQLCGLNAIWFYTNSIFGKAGIPLAKIPYVTLSTGGIETLAAVFSGLVIEHLGRRPLLIGGFGLMGLFFGTLTITLTLQDHAPWVPYLSIVGILAIIASFCSGPGGIPFILTGEFFQQSQRPAAFIIAGTVNWLSNFAVGLLFPFIQVLSTCILCCLRPKTEPMQKSARHFPKGTKHTHQKRKSTQLSLMVR

SEQ ID NO: 877193 - protein, 80 aa, Homo sapiens
VSGILTQPGRNARAWPLNLRAPGLRTRTWTGTLLAGPQLASLLSVSTPAKDKDFSSGRPPPAEGTFQVFPRPWLRARCRL

SEQ ID NO: 877194 - protein, 111 aa, Homo sapiens
LRNSLLLPPLHLDNSTPAKMSCQQNQQQCQPPPKCPSPKCPPKSPVQCLPPASSGCAPSSGGCGPSSEGGCFLNHHRRHHRCRRQRPNSCDRGSGQQGGGSGCGHGSGGCC

SEQ ID NO: 877195 - protein, 142 aa, Homo sapiens
IWHVPPTPHQLPSPSCSSCLRRPLVLETLDCRFWTNKWLCFVQDNSTPAKMSCQQNQQQCQPPPKCPSPKCPPKSPVQCLPPASSGCAPSSGGCGPSSEGGCFLNHHRRHHRCRRQRPNSCDRGSGQQGGGSGCGHGSGGCC

SEQ ID NO: 877196 - protein, 143 aa, Homo sapiens
MQRRTPLRSGSKAVHLVFSRAWVSMSCILIAWNKDGTLPLQIVVAGLPSWNLLLSSVRFIPEFLLPPDTLSWRISCCGIRLVTSRGRFSGNGSLSIVPAAVWEPEVKKPLHRERRPVLPQVILLFFHRSLPLCKPGSSVLLRG

SEQ ID NO: 877197 - protein, 142 aa, Homo sapiens
STLLAYSLAWTLRHIPPALTLWCPAASGFMGGLEPCSRLLLLPLLLAVSGLRPVQAQAQSDCSCSTVSPGVLAGIVMGDLVLTVLIALAVYFLGRLVPRGRGAAEAATRKQRITETESPYQELQGQRSDVYSDLNTQRPYYK

SEQ ID NO: 877198 - protein, 155 aa, Homo sapiens
VFTQNSHLANHQRTHTGEKPYRCNECGKAFSVRSSLTTHQAIHTGKKPYKCNECGKVFTQNAHLANHRRIHTGEKPYRCTECGKAFRVRSSLTTHMAIHTGEKRYKCNECGKVFRQSSNLASHHRMHTGEKPYKCNECGKAFRGHSNLTPTECHP

SEQ ID NO: 877199 - protein, 102 aa, Homo sapiens
MGGLEPCSRLLLLPLLLAVSDCSCSTVSPGVLAGIVMGDLVLTVLIALAVYFLGRLVPRGRGAAEAATRKQRITETESPYQELQGQRSDVYSDLNTQRPYYK

SEQ ID NO: 877200 - protein, 142 aa, Homo sapiens; identical to SEQ ID NO: 877197

SEQ ID NO: 877201 - protein, 117 aa, Homo sapiens
STLLAYSLAWTLRHIPPALTLWCPAASGFMGGLEPCSRLLLLPLLLAVSGGELGASVAASRVPGLSLGQGREWGGTREPKVGVGMGAGPQPPKACGFLPEPKPPSFVVRYKQGRRDI

SEQ ID NO: 877202 - protein, 142 aa, Homo sapiens; identical to SEQ ID NO: 877197

SEQ ID NO: 877203 - protein, 142 aa, Homo sapiens; identical to SEQ ID NO: 877197

SEQ ID NO: 877204 - protein, 142 aa, Homo sapiens; identical to SEQ ID NO: 877197

SEQ ID NO: 877205 - protein, 117 aa, Homo sapiens; identical to SEQ ID NO: 877201

SEQ ID NO: 877206 - protein, 294 aa, Homo sapiens
SGLPPRRPLLLLLLPPLPPPLPGYSAARAELAADFARRSARAAGGWGTAGAAAAALAEAAGAAKGSLSRAGLNNFETVHRCHVLNMSLLLSFYLLGLLVSSGQALLQVTISLSKVELSVGESKFFTCTAIGEPESIDWYNPQGEKIISTQRVVVQKEGVRSRLTIYNANIEDAGIYRCQATDAKGQTQEATVVLEIYQKLTFREVVSPQEFKQGEDAEVVCRVSSSPAPAVSWLYHNEEVTTISDNRFAMLANNNLQILNINKSDEGIYRCEGRVEARGEIDFRDIIVIVNGKQ

SEQ ID NO: 877207 - protein, 922 aa, Homo sapiens
SGLPPRRPLLLLLLPPLPPPLPGYSAARAELAADFARRSARAAGGWGTAGAAAAALAEAAGAAKGSLSRAGLNNFETVHRCHVLNMSLLLSFYLLGLLVSSGQALLQVTISLSKVELSVGESKFFTCTAIGEPESIDWYNPQGEKIISTQRVVVQKEGVRSRLTIYNANIEDAGIYRCQATDAKGQTQEATVVLEIYQKLTFREVVSPQEFKQGEDAEVVCRVSSSPAPAVSWLYHNEEVTTISDNRFAMLANNNLQILNINKSDEGIYRCEGRVEARGEIDFRDIIVIVNVPPAISMPQKSFNATAERGEEMTFSCRASGSPEPAISWFRNGKLIEENEKYILKGSNTELTVRNIINSDGGPYVCRATNKAGEDEKQAFLQVFVQPHIIQLKNETTYENGQVTLVCDAEGEPIPEITWKRAVDGFTFTEGDKSLDGRIEVKGQHGSSSLHIKDVKLSDSGRYDCEAASRIGGHQKSMYLDIEYAPKFISNQTIYYSWEGNPINISCDVKSNPPASIHWRRDKLVLPAKNTTNLKTYSTGRKMILEIAPTSDNDFGRYNCTATNHIGTRFQEYILALADVPSSPYGVKIIELSQTTAKVSFNKPDSHGGVPIHHYQVDVKEVASEIWKIVRSHGVQTMVVLNNLEPNTTYEIRVAAVNGKGQGDYSKIEIFQTLPVREPSPPSIHGQPSSGKSFKLSITKQDDGGAPILEYIVKYRSKDKEDQWLEKKVQGNKDHIILEHLQWTMGMKFRLPAANRLGYSEPTVYEFSMPPKPNIIKDTLFNGLGLGAVIGLGVAALLLILVVTDVSCFFIRQCGLLMCITRRMCGKKSGSSGKSKELEEGKAAYLKDGSKEPIVEMRTEDERVTNHEDGSPVNEPNETTPLTEPEKLPLKEEDGKEALNPETIEIKVSNDIIQSKEDDSKA

SEQ ID NO: 877208 - protein, 285 aa, Homo sapiens
MVVLNNLEPNTTYEIRVAAVNGKGQGDYSKIEIFQTLPVREPSPPSIHGQPSSGKSFKLSITKQDDGGAPILEYIVKYRSKDKEDQWLEKKVQGNKDHIILEHLQWTMGMKFRLPAANRLGYSEPTVYEFSMPPKPNIIKDTLFNGLGLGAVIGLGVAALLLILVVTDVSCFFIRQCGLLMCITRRMCGKKSGSSGKSKELEEGKAAYLKDGSKEPIVEMRTEDERVTNHEDGSPVNEPNETTPLTEPEKLPLKEEDGKEALNPETIEIKVSNDIIQSKEDDSKA

SEQ ID NO: 877209 - protein, 646 aa, Homo sapiens
SGLPPRRPLLLLLLPPLPPPLPGYSAARAELAADFARRSARAAGGWGTAGAAAAALAEAAGAAKGSLSRAGLNNFETVHRCHVLNMSLLLSFYLLGLLVSSGQALLQVTISLSKVELSVGESKFFTCTAIGEPESIDWYNPQGEKIISTQRVVVQKEGVRSRLTIYNANIEDAGIYRCQATDAKGQTQEATVVLEIYQKLTFREVVSPQEFKQGEDAEVVCRVSSSPAPAVSWLYHNEEVTTISDNRFAMLANNNLQILNINKSDEGIYRCEGRVEARGEIDFRDIIVIVNVPPAISMPQKSFNATAERGEEMTFSCRASGSPEPAISWFRNGKLIEENEKYILKGSNTELTVRNIINSDGGPYVCRATNKAGEDEKQAFLQVFVQPHIIQLKNETTYENGQVTLVCDAEGEPIPEITWKRAVDGFTFTEGDKSLDGRIEVKGQHGSSSLHIKDVKLSDSGRYDCEAASRIGGHQKSMYLDIEYAPKFISNQTIYYSWEGNPINISCDVKSNPPASIHWRRDKLVLPAKNTTNLKTYSTGRKMILEIAPTSDNDFGRYNCTATNHIGTRFQEYILALADVPSSPYGVKIIELSQTTAKVSFNKPDSHGGVPIHHYQVDVKEVASEIWKIVRSHGVQSESTISKCVG

SEQ ID NO: 877210 - protein, 922 aa, Homo sapiens; identical to SEQ ID NO: 877207

SEQ ID NO: 877211 - protein, 494 aa, Homo sapiens
SGLPPRRPLLLLLLPPLPPPLPGYSAARAELAADFARRSARAAGGWGTAGAAAAALAEAAGAAKGSLSRAGLNNFETVHRCHVLNMSLLLSFYLLGLLVSSGQALLQVTISLSKVELSVGESKFFTCTAIGEPESIDWYNPQGEKIISTQRVVVQKEGVRSRLTIYNANIEDAGIYRCQATDAKGQTQEATVVLEIYQKLTFREVVSPQEFKQGEDAEVVCRVSSSPAPAVSWLYHNEEVTTISDNRFAMLANNNLQILNINKSDEGIYRCEGRVEARGEIDFRDIIVIVNVPPAISMPQKSFNATAERGEEMTFSCRASGSPEPAISWFRNGKLIEENEKYILKGSNTELTVRNIINSDGGPYVCRATNKAGEDEKQAFLQVFVQPHIIQLKNETTYENGQVTLVCDAEGEPIPEITWKRAVDGFTFTEGDKSLDGRIEVKGQHGSSSLHIKDVKLSDSGRYDCEAASRIGGHQKSMYLDIECKLLSFVFSLK

SEQ ID NO: 877212 - protein, 184 aa, Homo sapiens
MNLAEICDNAKKGREYALLGNYDSSMVYYQGVMQQIQRHCQSVRDPAIKGKWQQVRQELLEEYEQVKSIVSTLESFKIDKPPDFPVSCQDEPFRDPAVWPPPVPAEHRAPPQIRRPNREVRPLRKEMAGVGARGPVGRAHPISKSEKPSTSRDKDYRARGRDDKARCCLSVIHSLEAQDFWWML

SEQ ID NO: 877213 - protein, 490 aa, Homo sapiens
MNLAEICDNAKKGREYALLGNYDSSMVYYQGVMQQIQRHCQSVRDPAIKGKWQQVRQELLEEYEQVKSIVSTLESFKIDKPPDFPVSCQDEPFRDPAVWPPPVPAEHRAPPQIRRPNREVRPLRKEMAGVGARGPVGRAHPISKSEKPSTSRDKDYRARGRDDKGRKNMQDGASDGEMPKFDGAGYDKDLVEALERDIVSRNPSIHWDDIADLEEAKKLLREAVVLPMWMPDFFKGIRRPWKGVLMVGPPGTGKTMLAKAVATECGTTFFNVSSSTLTSKYRGESEKLVRLLFEMARFYAPTTIFIDEIDSICSRRGTSDEHEASRRVKSELLIQMDGVGGALENDDPSKMVMVLAATNFPWDIDEALRRRLEKRIYIPLPTAKGRAELLKINLREVELDPDIQLEDIAEKIEGYSGADITNVCRDASLMAMRRRINGLSPEEIRALSKEELQMPVTKGDFELALKKIAKSVSAADLEKYEKWMVEFGSA

SEQ ID NO: 877214 - protein, 490 aa, Homo sapiens; identical to SEQ ID NO: 877213

SEQ ID NO: 877215 - protein, 490 aa, Homo sapiens; identical to SEQ ID NO: 877213

SEQ ID NO: 877216 - protein, 154 aa, Homo sapiens
MHVTEALHQNMQALFSTLAQAEEQQPYLEGSTVMRGTRCLAEYHLGDYGHAWNRCWVLDRVDTWAVVMFIDFGQLATIPVQSLRSLDSDDFWTIPPLTQPFMLEKDILSSYEVVHRILKGKITGALNSAVTAPASNLAVVPPLLPLGCLQQAAA

SEQ ID NO: 877217 - protein, 154 aa, Homo sapiens; identical to SEQ ID NO: 877216

SEQ ID NO: 877218 - protein, 177 aa, Homo sapiens
MHVTEALHQNMQALFSTLAQAEEQQPYLEGSTVMRGTRCLAEYHLGDYGHAWNRCWVLDRVDTWAVVMFIDFGQLATIPVQSLRSLDSDDFWTIPPLTQPFMLEKDILSSYEVVHRILKGKITGALNSAAWEVKKARLCPGLIQFCFYSQLPSQKRVKSHLSCVFSSPTWHEHLNQT

SEQ ID NO: 877219 - protein, 166 aa, Homo sapiens
  misc_feature (35)..(35): Xaa can be any naturally occurring amino acid
WDHNLKWINVFSYEMDGQKDLYTHPVSPQRSGGIXAIRGHYFNEIGQYDKDMDFWGRENLELSLRIWMCGGQLFIIPCSRVGHISKKQTGKPSTIISAMTHNYLRLVHVWLDEYKEQFFLRKPGLKYVTYGNIRERVELRKRLGCKSFQWYLDNVFPELEASVNSL

SEQ ID NO: 877220 - protein, 105 aa, Homo sapiens
SSIGTEKALNLCSDLPLSPGGSGDLGDGRTPKADCCPQLSGLHMDQTQLAVRGQEHLDAAHTGQFQGAVQHGKGEMYLKRQMKDIQRHRQSCFYYHKNSLRFLDT

SEQ ID NO: 877221 - protein, 104 aa, Homo sapiens
VKLLTSNDPPASASQSAGITYMTHHTQPREGFRGRNSSCMIFSRFSREGSELWERKEDGGNGKKRSTLLRKGTELGVVAHACNPALWEAEAVGSLEPRSLRPAT

SEQ ID NO: 877222 - protein, 388 aa, Homo sapiens
QFGVREVTAAQVARVLGMMARTHSGLTDGIPLQSISAPGSGIWSDGKDKSDGAQAHTWNVEVLIDVLKELNPSLNFKEVTYELDHPGFQIRDSKGLHNVVYGIQRGLGMEVFPVDLIYRPWKHAEGQLSFIQHSLINPEIFCFADYPCHTVATDILKAPPEDDNREIATWKSLDLIESLLRLAEVGQYEQVKQLFSFPIKHCPDMLVLALLQINTSWHTLRHELISTLMPIFLGNHPNSAIILHYAWHGQGQSPSIRQLIMHAMAEWYMRGEQYDQAKLSRILDVAQDLKALSMLLNGTPFAFVIDLAALASRREYLKLDKWLTDKIREHGEPFIQACMTFLKRRCPSILGGLAPEKDQPKSAQLPPETLATMLACLQALMQECFSRS

SEQ ID NO: 877223 - protein, 194 aa, Homo sapiens
MLVLALLQINTSWHTLRHELISTLMPIFLGNHPNSAIILHYAWHGQGQSPSIRQLIMHAMAEWYMRGEQYDQAKLSRILDVAQDLKALSMLLNGTPFAFVIDLAALASRREYLKLDKWLTDKIREHGEPFIQACMTFLKRRCPSILGGLAPEKDQPKSAQLPPETLATMLACLQALMQEVFFTELTENIFHCVS

SEQ ID NO: 877224 - protein, 153 aa, Homo sapiens
MGIFLVYVGFVFFSVLYVQQGLSSQAKFTEFPRNVTATEGQNVEMSCAFQSGSASVYLEIQWWFLRGPEDLDPGAEGAGAQVELLPDRDPDSDGTKISVSAGRAKGRGPRLGTHSPSLSPRRRLASAAGQPDSRVPLACLIRYIQMEAHLESL

SEQ ID NO: 877225 - protein, 239 aa, Homo sapiens [sequence omitted]

SEQ ID NO: 877226 - protein, 178 aa, Homo sapiens
RRRVEKGRKRREERKRGEKEVELLPDRDPDSDGTKISTVKVQGNDISHKLQISKVRKKDEGLYECRVTDANYGELQEHKAQAYLKVNANSHARRMQAFEASPMWLQDMKPRKNVSAAIPSSIHGSANQRTHSTSSPQVVAKIPKQSPQSAKSKSPVKSTERTAKLTLNSKHHPAPTVL

SEQ ID NO: 877227 - protein, 176 aa, Homo sapiens
TAPGQRRDSPGTAPGKARGRRGVELLPDRDPDSDGTKISTVKVQGNDISHKLQISKVRKKDEGLYECRVTDANYGELQEHKAQAYLKVNANSHARRMQAFEASPMWLQDMKPRKNVSAAIPSSIHGSANQRTHSTSSPQVVAKIPKQSPQSGARIATSHGLSVLLLVCGFVKGALL

SEQ ID NO: 877228 - protein, 199 aa, Homo sapiens
MSCAFQSGSASVYLEIQWWFLRGPEDLDPGAEGAGAQVELLPDRDPDSDGTKISTVKVQGNDISHKLQISKVRKKDEGLYECRVTDANYGELQEHKAQAYLKVNANSHARRMQAFEASPMWLQDMKPRKNVSAAIPSSIHGSANQRTHSTSSPQVVAKIPKQSPQSGMETHFEPFILPLTNAPQKGQSYRVDRFMNGDF

SEQ ID NO: 877229 - protein, 147 aa, Homo sapiens
RRRRWEKGESELCRQNSDSGREQISTVKVQGNDISHKLQISKVRKKDEGLYECRVTDANYGELQEHKAQAYLKVNANSHARRMQAFEASPMWLQDMKPRKNVSAAIPSSIHGSANQRTHSTSSPQVVAKIPKQSPQSGQFRSLVTGF

SEQ ID NO: 877230 - protein, 235 aa, Homo sapiens
MGIFLVYVGFVFFSVLYVQQGLSSQAKFTEFPRNVTATEGQNVEMSCAFQSGSASVYLEIQWWFLRGPEDLDPGAEGAGAQVELLPDRDPDSDGTKISTVKVQGNDISHKLQISKVRKKDEGLYECRVTDANYGELQEHKAQAYLKVNANSHARRMQAFEASPMWLQDMKPRKNVSAAIPSSIHGSANQRTHSTSSPQVVAKIPKQSPQSGARIATSHGLSVLLLVCGFVKGALL

SEQ ID NO: 877231 - protein, 243 aa, Homo sapiens
MGIFLVYVGFVFFSVLYVQQGLSSQAKFTEFPRNVTATEGQNVEMSCAFQSGSASVYLEIQWWFLRGPEDLDPGAEGAGAQVELLPDRDPDSDGTKISTVKVQGNDISHKLQISKVRKKDEGLYECRVTDANYGELQEHKAQAYLKVNANSHARRMQAFEASPMWLQDMKPRKNVSAAIPSSIHGSANQRTHSTSSPQVVAKIPKQSPQSGMETHFEPFILPLTNAPQKGQSYRVDRFMNGDF

SEQ ID NO: 877232 - protein, 144 aa, Homo sapiens
SSEDQAMLQAMLRRLFQSVKEKITGAPSLECAEEILLHLEETDENFHNYEFVKYLRQHIGNTLGSMIEEEMEKCTSDRNQGEECGYDTVVQQVTKRTQESKEYKEMMHYLKNIMIAVVESMINKFEEDETRNQERQKKIQKEKS

SEQ ID NO: 877233 - protein, 92 aa, Homo sapiens
QTTTKNDTKEESSGEGQVGGERLWMKLQDKDIGFSLVLLVQGAVDGDSDKLNAQNWEGTMQSLINAYDLHCHYCCFLEHNFLYKDLHCTVCG

SEQ ID NO: 877234 - protein, 133 aa, Homo sapiens
QDPQSLDTGPTLKKHGQQEGGMVSRPSESLRKEPSREDRCVECDTTWHFSSPADPVSANTSNLTSAPGLLFTCLGSELRRKDEKRLQCSRHPLQSEAARPSLPALGCSGGDVNHSKECLKEDLEFPPCKLGKN

SEQ ID NO: 877235 - protein, 104 aa, Homo sapiens
QDPQSLDTGPTLKKHGQQEGGMVSRPSESLRKEPSREDRCVECDTTWHFSSPADPVSANTSNLTSAPGLLFTCLGSELRRKDEKRLQCSRHPLQSEAARPSLPQ

SEQ ID NO: 877236 - protein, 133 aa, Homo sapiens; identical to SEQ ID NO: 877234

SEQ ID NO: 877237 - protein, 177 aa, Homo sapiens
GRKGSWWKVRQRESLREQGKKVAGCVRERKVQSYPCEAEWGPMGLAPPVVQSMPLPPGDGGLHELGHHPDHAAGAGGQPHHADRRGEWPGGAGPAQPAARGRLCRGRELCAQPGGPAVTEVGRLEELAVPRRCAPPLPRDVLEGSCPLPTASCLCADPAGLRPAATLRLSPARPAWP

SEQ ID NO: 877238 - protein, 324 aa, Homo sapiens
ATHKRSSATACVTMATAAGSRAPPLWRDRPPSSRESIPCDRKWGGDPGSPRRVQLGRFDRRRDLTPPGVGVPSPSPSAAPVIVAMDVHGEAAGEAGQEGGEGLQGGAGQSEEGPSAEKCRVCPCVCRERHPQEERRCELASDGVPRRRSGLQGADSCDYEGGDQEYGPGDQSPGQGPEHHGPAEGLLSDGQVRAAGAEPGRPYIGDGGLHELGHHPDHAAGAGGQPHHADRRGEWPGGAGPAQPAARGRLCRGRELCAQPGGPAVTEVGRLEELAVPRRCAPPLPRDVLEGSCPLPTASCLCADPAGLRPAATLRLSPARPAWP

SEQ ID NO: 877239 - protein, 280 aa, Homo sapiens
ATHKRSSATACVTMATAAGSRAPPLWRDRPPSSRESIPCDRKWGGDPGSPRRVQLGRFDRRRDLTPPGVGVPSPSPSAAPVIVAMDDTLFQLKFTAKQLEKLAKKAEKDSKAEQAKVKKALLQKNVECARVYAENAIRKKNEGVNWLRMASRVDAVASKVQTAVTMKGVTKNMAQVTKALDKALSTMDLQKVSSVMDRFEQQVQNLDVHTSVMEDSMSSATTLTTPQEQVDSLIMQIAEENGLEVLDQLSQLPEGASAVGESSVRSQEDQLSRRLAALRN

SEQ ID NO: 877240 - protein, 280 aa, Homo sapiens; identical to SEQ ID NO: 877239

SEQ ID NO: 877241 - protein, 280 aa, Homo sapiens; identical to SEQ ID NO: 877239

SEQ ID NO: 877242 - protein, 280 aa, Homo sapiens; identical to SEQ ID NO: 877239

SEQ ID NO: 877243 - protein, 280 aa, Homo sapiens; identical to SEQ ID NO: 877239

SEQ ID NO: 877244 - protein, 280 aa, Homo sapiens; identical to SEQ ID NO: 877239

SEQ ID NO: 877245 - protein, 280 aa, Homo sapiens; identical to SEQ ID NO: 877239

SEQ ID NO: 877246 - protein, 232 aa, Homo sapiens
ATHKRSSATACVTMATAAGSRAPPLWRDRPPSSRESIPCDRKWGGDPGSPRRVQLGRFDRRRDLTPPGVGVPSPSPSAAPVIVAMDVHGEAAGEAGQEGGEGLQGGAGQSEEGPSAEKCRVCPCVCRERHPQEERRCELASDGVPRRRSGLQGADSCDYEGGDQEYGPGDQSPGQGPEHHGPAEGLLSDGQVRAAGAEPGRPYIGMWPLPLGLWPGDKERVWAAHREGWLTG

SEQ ID NO: 877247 - protein, 280 aa, Homo sapiens; identical to SEQ ID NO: 877239

SEQ ID NO: 877248 - protein, 163 aa, Homo sapiens [sequence omitted]

SEQ ID NO: 877249 - protein, 280 aa, Homo sapiens; identical to SEQ ID NO: 877239

SEQ ID NO: 877250 - protein, 280 aa, Homo sapiens; identical to SEQ ID NO: 877239

SEQ ID NO: 877251 - protein, 106 aa, Homo sapiens
PALRRPQKTGHTTHGPGQESPGARESYRAEMRPGVGQETPVCLPETVMWWPPVPERWKIGCLAQRSVSCPLEGCTCCLSWQGWREVASAEAWGPLLHPLGWEPSPH

SEQ ID NO: 877252 - protein, 135 aa, Homo sapiens
QSLALPAFQPSLSPLPSLLSKVLVLFFRVPPTVLPSPRRTLAPRLPLPLCFFPKVLPRKSRDSGVSAAAGRRAGRAPGLPQLLSSWRKLLLPPGPAPCAGRPSSGGGCDPDLGGGKDRKARVLVLCSPAQASRRP

SEQ ID NO: 877253 - protein, 335 aa, Homo sapiens
GKKLSAEGGRTALLRAVLRKLLDPRLISTEENTQTAETMGLLSAPPCTQRITWKGLLLTVETPKPSISSSKLNPREAMEAVSLTCDPETPDASYLWWMNGQSLPMSHRLQLSETNRTLFLLGVTKYTAGPYECEIRNPVSASRSDPFTLNLLPKLPKPYITINNLNPRENKDVLNFTCEPKSENYTYIWWLNGQSLPVSPRVKRPIENRILILPSVTRNETGPYQCEIRDQYGGIRSDPVTLNVLYGPDLPRIYPSFTYYRSGEVLYLSCSADSNPPAQYSWTINGKFQLSGQKLFIPQITTKHSGLYACSVRNSATGKESSKSMTVKVSDWTLP

SEQ ID NO: 877254 - protein, 285 aa, Homo sapiens
MEAVSLTCDPETPDASYLWWMNGQSLPMTHSLKLSETNRTLFLLGVTKYTAGPYECEIRNPVSASRSDPVTLNLLPKLPKPYITINNLNPRENKDVLNFTCEPKSENYTYIWWLNGQSLPVSPRVKRPIENRILILPSVTRNETGPYQCEIRDRYGGIRSDPVTLNVLYGPDLPRIYPSFTYYRSGEVLYLSCSADSNPPAQYSWTINEKFQLPGQKLFIRHITTKHSGLYVCSVRNSATGKESSKSMTVEVSDWTVTLNSTSTSNSIFSHGITKSKTHSVPEAL

SEQ ID NO: 877255 - protein, 256 aa, Homo sapiens
MEAVSLTCDPETPDASYLWWMNGQSLPMTHSLKLSETNRTLFLLGVTKYTAGPYECEIRNPVSASRSDPVTLNLLPKLPKPYITINNLNPRENKDVLNFTCEPKSENYTYIWWLNGQSLPVSPRVKRPIENRILILPSVTRNETGPYQCEIRDRYGGIRSDPVTLNVLYGPDLPRIYPSFTYYRSGEVLYLSCSADSNPPAQYSWTINEKFQLPGQKLFIRHITTKHSGLYVCSVRNSATGKESSKSMTVEVSEAL

SEQ ID NO: 877256 - protein, 267 aa, Homo sapiens
MEAVSLTCDPETPDASYLWWMNGQSLPMTHSLKLSETNRTLFLLGVTKYTAGPYECEIRNPVSASRSDPVTLNLLPKLPKPYITINNLNPRENKDVLNFTCEPKSENYTYIWWLNGQSLPVSPRVKRPIENRILILPSVTRNETGPYQCEIRDRYGGIRSDPVTLNVLYGPDLPRIYPSFTYYRSGEVLYLSCSADSNPPAQYSWTINEKFQLPGQKLFIRHITTKHSGLYVCSVRNSATGKESSKSMTVEVSAYSSSINYTSGNRN

SEQ ID NO: 877257 - protein, 258 aa, Homo sapiens
MEAVSLTCDPETPDASYLWWMNGQSLPMTHSLKLSETNRTLFLLGVTKYTAGPYECEIRNPVSASRSDPVTLNLLPKLPKPYITINNLNPRENKDVLNFTCEPKSENYTYIWWLNGQSLPVSPRVKRPIENRILILPSVTRNETGPYQCEIRDRYGGIRSDPVTLNVLYGPDLPRIYPSFTYYRSGEVLYLSCSADSNPPAQYSWTINEKFQLPGQKLFIRHITTKHSGLYVCSVRNSATGKESSKSMTVEVSDWTLP

SEQ ID NO: 877258 - protein, 285 aa, Homo sapiens; identical to SEQ ID NO: 877254

SEQ ID NO: 877259 - protein, 267 aa, Homo sapiens
MEAVSLTCDPETPDASYLWWMNGQSLPMTHSLKLSETNRTLFLLGVTKYTAGPYECEIRNPVSASRSDPVTLNLLPKLPKPYITINNLNPRENKDVLNFTCEPKSENYTYIWWLNGQSLPVSPRVKRPIENRILILPSVTRNETGPYQCEIRDRYGGIRSDPVTLNVLYGPDLPRIYPSFTYYHSGENLYLSCFADSNPPAEYSWTINGKFQLSGQKLFIPQITTKHSGLYACSVRNSATGMESSKSMTVKVSAPSGTGHLPGLNPL

SEQ ID NO: 877260 - protein, 274 aa, Homo sapiens
TRYAVDLTRLREESGDWVHSLKLSETNRTLFLLGVTKYTAGPYECEIRNPVSASRSDPVTLNLLPKLPKPYITINNLNPRENKDVLNFTCEPKSENYTYIWWLNGQSLPVSPRVKRPIENRILILPSVTRNETGPYQCEIRDRYGGIRSDPVTLNVLYGPDLPRIYPSFTYYRSGEVLYLSCSADSNPPAQYSWTINEKFQLPGQKLFIRHITTKHSGLYVCSVRNSATGKESSKSMTVEVSDWTVTLNSTSTSNSIFSHGITKSKTHSVPEAL

SEQ ID NO: 877261 - protein, 282 aa, Homo sapiens
MRDLYHYITSYVVDGEIIIYGPAYSGRETAYSNASLLIQNVTREDAGSYTLHIIKGDDGTRGVTGRFTFTLHPKLPKPYITINNLNPRENKDVLNFTCEPKSENYTYIWWLNGQSLPVSPRVKRPIENRILILPSVTRNETGPYQCEIRDRYGGIRSDPVTLNVLYGPDLPRIYPSFTYYRSGEVLYLSCSADSNPPAQYSWTINEKFQLPGQKLFIRHITTKHSGLYVCSVRNSATGKESSKSMTVEVSDWTVTLNSTSTSNSIFSHGITKSKTHSVPEAL

SEQ ID NO: 877262 - protein, 236 aa, Homo sapiens
MPTLIEGYLWRNQRCHTGQSSLCFHTAKLPKPYITINNLNPRENKDVLNFTCEPKSENYTYIWWLNGQSLPVSPRVKRPIENRILILPSVTRNETGPYQCEIRDRYGGIRSDPVTLNVLYGPDLPRIYPSFTYYRSGEVLYLSCSADSNPPAQYSWTINEKFQLPGQKLFIRHITTKHSGLYVCSVRNSATGKESSKSMTVEVSDWTVTLNSTSTSNSIFSHGITKSKTHSVPEAL

SEQ ID NO: 877263 - protein, 192 aa, Homo sapiens
MEAVSLTCDPETPDASYLWWMNGQSLPMTHSLKLSETNRTLFLLGVTKYTAGPYECEIRNPVSASRSDPVTLNLLHGPDLPRIYPSFTYYRSGEVLYLSCSADSNPPAQYSWTINEKFQLPGQKLFIRHITTKHSGLYVCSVRNSATGKESSKSMTVEVSDWTVTLNSTSTSNSIFSHGITKSKTHSVPEAL

SEQ ID NO: 877264 - protein, 192 aa, Homo sapiens; identical to SEQ ID NO: 877263

SEQ ID NO: 877265 - protein, 267 aa, Homo sapiens
MEAVSLTCDPETPDASYLWWMNGQSLPMTHSLKLSETNRTLFLLGVTKYTAGPYECEIRNPVSASRSDPVTLNLLPKLPKPYITINNLNPRENKDVLAFTCEPKSENYTYIWWLNGQSLPVSPRVKRPIENRILILPSVTRNETGPYQCEIQDRYGGIRSYPVTLNVLYGPDLPRIYPSFTYYHSGENLYLSCFADSNPPAEYSWTINGKFQLSGQKLFIPQITTKHSGLYACSVRNSATGMESSKSMTVKVSAPSGTGHLPGLNPL

SEQ ID NO: 877266 - protein, 169 aa, Homo sapiens
MGTLSAPPCTQRIKWKGLLLTASLLNFWNLPTTAQVTIEAEPTKVSEGKDVLLLVHNLPQNLTGYIWYKGQMRDLYHYITSYVVDGEIIIYGPAYSGRETAYSNASLLIQNVTREDAGSYTLHIIKGDDGTRGVTGRFTFTLHLETPKPSISSSNLNPREDHGGCELNL

SEQ ID NO: 877267 - protein, 151 aa, Homo sapiens
HRQVVLHRQVVLHRQVVLHRQVVLHRQVVLHRRLYGPDLPRIYPSFTYYRSGEVLYLSCSADSNPPAQYSWTINEKFQLPGQKLFIRHITTKHSGLYVCSVRNSATGKESSKSMTVEVSDWTVTLNSTSTSNSIFSHGITKSKTHSVPEAL

SEQ ID NO: 877268 - protein, 267 aa, Homo sapiens; identical to SEQ ID NO: 877265

SEQ ID NO: 877269 - protein, 158 aa, Homo sapiens
MGTLSAPPCTQRIKWKGLLLTASLLNFWNLPTTAQVTIEAEPTKVSEGKDVLLLVHNLPQNLTGYIWYKGQMRDLYHYITSYVVDGEIIIYGPAYSGRETAYSNASLLIQNVTREDAGSYTLHIIKGDDGTRGVTGRFTFTLHRMKLYRRSLEPPHPA

SEQ ID NO: 877270 - protein, 79 aa, Homo sapiens
SNSIYHGRNIKLFIRHITTKHSGLYVCSVRNSATGKESSKSMTVEVSDWTVTLNSTSTSNSIFSHGITKSKTHSVPEAL

SEQ ID NO: 877271 - protein, 582 aa, Homo sapiens
MGTLSAPPCTQRIKWKGLLLTASLLNFWNLPTTAQVTIEAEPTKVSEGKDVLLLVHNLPQNLTGYIWYKGQMRDLYHYITSYVVDGEIIIYGPAYSGRETAYSNASLLIQNVTREDAGSYTLHIIKGDDGTRGVTGRFTFTLHRMKLYRRSLEPPHPAYLKPDTHRTTPYSPDPSSWQTTILHSDSLWNPRDIRSFLGLCSIFRGHWLKSATMRHLGKLRHLVVHCLMTELTSGLDSVLPCVISAEVPSPRPGFPVPKGFKDNWKFHHPSLGCPWQGKLQRKHTLGGKVRLKLRRFQHCMLQVRTQVETPKPSISSSKLNPREAMEAVSLTCDPETPDASYLWWMNGQSLPMSHRLQLSETNRTLFLLGVTKYTAGPYECEIRNPVSASRSDPFTLNLLPKLPKPYITINNLNPRENKDVLNFTCEPKSENYTYIWWLNGQSLPVSPRVKRPIENRILILPSVTRNETGPYQCEIRDQYGGIRSDPVTLNVLYGPDLPRIYPSFTYYRSGEVLYLSCSADSNPPAQYSWTINGKFQLSGQKLFIPQITTKHSGLYACSVRNSATGKESSKSMTVKVSDWTLP

SEQ ID NO: 877272 - protein, 165 aa, Homo sapiens
MGTLSAPPCTQRIKWKGLLLTASLLNFWNLPTTAQVTIEAEPTKVSEGKDVLLLVHNLPQNLTGYIWYKGQMRDLYHYITSYVVDGEIIIYGPAYSGRETAYSNASLLIQNVTREDAGSYTLHIIKGDDGTRGVTGRFTFTLHLETPNLHLQQQLNPMSRSRGTD

SEQ ID NO: 877273 - protein, 154 aa, Homo sapiens
MGTLSAPPCTQRIKWKGLLLTASLLNFWNLPTTAQVTIEAEPTKVSEGKDVLLLVHNLPQNLTGYIWYKGQMRDLYHYITSYVVDGEIIIYGPAYSGRETAYSNASLLIQNVTREDAGSYTLHIIKGDDGTRGVTAPGTFPVITGCTTTPLVSS

SEQ ID NO: 877274 - protein, 165 aa, Homo sapiens
MEAVSLTCDPETPDASYLWWMNGQSLPMSHRLQLSETNRTLFLLGVTKYTAGPYECEIRNPVSASRSDPVTLNLLHGPDLPRIYPSFTYYRSGEVLYLSCSADSNPPAQYSWTINGKFQLSGQKLFIPQITTKHSGLYACSVRNSATGKESSKSMTVKVSDWTLP

SEQ ID NO: 877275 - protein, 265 aa, Homo sapiens
MEAVSLTCDPETPDASYLWWMNGQSLPMSHRLQLSETNRTLFLLGVTKYTAGPYECEIRNPVSASRSDPVTLNLLPKLPKPYITINNLNPRENKDVLNFTCEPKSENYTYIWWLNGQSLPVSPRVKRPIENRILILPSVTRNETGPYQCEIRDQYGGIRSDPVTLNVLYGPDLPRIYPSFTYYRSGEVLYLSCSADSNPPAQYSWTINGKFQLSGQKLFIPQITTKHSGLYACSVRNSATGKESSKSMTVKVSGKRIPVSLAIGI

SEQ ID NO: 877276 - protein, 265 aa, Homo sapiens
MEAVSLTCDPETPDASYLWWMNGQSLPMTHSLKLSETNRTLFLLGVTKYTAGPYECEIRNPVSASRSDPVTLNLLPKLPKPYITINNLNPRENKDVLNFTCEPKSENYTYIWWLNGQSLPVSPRVKRPIENRILILPSVTRNETGPYQCEIRDRYGGIRSDPVTLNVLYGPDLPRIYPSFTYYRSGEVLYLSCSADSNPPAQYSWTINEKFQLPGQKLFIRHITTKHSGLYVCSVRNSATGKESSKSMTVEVSGKWIPASLAIGF

SEQ ID NO: 877277 - protein, 41 aa, Homo sapiens
MGTLSAPPCTQRIKWKGLLLTASLLNFWNLPPPPLSIQEGR

SEQ ID NO: 877278 - protein, 265 aa, Homo sapiens; identical to SEQ ID NO: 877276

SEQ ID NO: 877279 - protein, 285 aa, Homo sapiens; identical to SEQ ID NO: 877254

SEQ ID NO: 877280 - protein, 285 aa, Homo sapiens; identical to SEQ ID NO: 877254

SEQ ID NO: 877281 - protein, 203 aa, Homo sapiens
MEAVSLTCDPETPDASYLWWMNGQSLPMTHSLKLSETNRTLFLLGVTKYTAGPYECEIRNPVSASRSDPVTLNLLPKLPKPYITINNLNPRENKDVLNFTCEPKSENYTYIWWLNGQSLPVSPRVKRPIENRILILPSVTRNETGPYQCEIRDRYGGIRSDPVTLNVLYGPDLPRIYPSFTYYRSGEVLYLSCSADSTQCHEK

SEQ ID NO: 877282 - protein, 353 aa, Homo sapiens
MGTLSAPPCTQRIKWKGLLLTASLLNFWNLPTTAQVTIEAEPTKVSEGKDVLLLVHNLPQNLTGYIWYKGQMRDLYHYITSYVVDGEIIIYGPAYSGRETAYSNASLLIQNVTREDAGSYTLHIIKGDDGTRGVTGRFTFTLHPKLPKPYITINNLNPRENKDVLNFTCEPKSENYTYIWWLNGQSLPVSPRVKRPIENRILILPSVTRNETGPYQCEIRDRYGGIRSDPVTLNVLYGPDLPRIYPSFTYYRSGEVLYLSCSADSNPPAQYSWTINEKFQLPGQKLFIRHITTKHSGLYVCSVRNSATGKESSKSMTVEVSDWTVTLNSTSTSNSIFSHGITKSKTHSVPEAL

SEQ ID NO: 877283 - protein, 169 aa, Homo sapiens; identical to SEQ ID NO: 877266

SEQ ID NO: 877284 - protein, 159 aa, Homo sapiens
GPSLAQWSSVVLEQCVMVVEFCVKLAVVCFEDLPSPAAGVFQHGPDLPRIYPSFTYYRSGEVLYLSCSADSNPPAQYSWTINEKFQLPGQKLFIRHITTKHSGLYVCSVRNSATGKESSKSMTVEVSDWTVTLNSTSTSNSIFSHGITKSKTHSVPEAL

SEQ ID NO: 877285 - protein, 589 aa, Homo sapiens
MGTLSAPPCTQRIKWKGLLLTASLLNFWNLPTTAQVTIEAEPTKVSEGKDVLLLVHNLPQNLTGYIWYKGQMRDLYHYITSYVVDGEIIIYGPAYSGRETAYSNASLLIQNVTREDAGSYTLHIIKGDDGTRGVTGRFTFTLHRMKLYRRSLEPPHPAYLKPDTHRTTPYSPDPSSWQTTILHSDSLWNPRDIRSFLGLCSIFRGHWLKSATMRHLGKLRHLVVHCLMTELTSGLDSVLPCVISAEVPSPRPGFPVPKGFKDNWKFHHPSLGCPWQGKLQRKHTLGGKVRLKLRRFQHCMLQVRTQVETPKPSISSSKLNPREAMEAVSLTCDPETPDASYLWWMNGQSLPMSHRLQLSETNRTLFLLGVTKYTAGPYECEIRNPVSASRSDPFTLNLLPKLPKPYITINNLNPRENKDVLNFTCEPKSENYTYIWWLNGQSLPVSPRVKRPIENRILILPSVTRNETGPYQCEIRDQYGGIRSDPVTLNVLYGPDLPRIYPSFTYYRSGEVLYLSCSADSNPPAQYSWTINGKFQLSGQKLFIPQITTKHSGLYACSVRNSATGKESSKSMTVKVSGKRIPVSLAIGI

SEQ ID NO: 877286 - protein, 183 aa, Homo sapiens
MGTLSAPPCTQRIKWKGLLLTASLLNFWNLPTTAQVTIEAEPTKVSEGKDVLLLVHNLPQNLTGYIWYKGQMRDLYHYITSYVVDGEIIIYGPAYSGRETAYSNASLLIQNVTREDAGSYTLHIIKGDDGTRGVTGRFTFTLHPKLPKPYITINNLNPRENKDVLNFTCEPKSENYTYIWWLL

SEQ ID NO: 877287 - protein, 165 aa, Homo sapiens; identical to SEQ ID NO: 877274

SEQ ID NO: 877288 - protein, 102 aa, Homo sapiens
MGTLSAPPCTQRIKWKGLLLTASLLNFWNLPTTAQVTIEAEPTKVSEGKDVLLLVHNLPQNLTGYIWYKGQMRDLYHYITSYVVDGEIIIYGCSPGLCSPVR

SEQ ID NO: 877289 - protein, 295 aa, Homo sapiens
GTSVYAARSDYAARSATRLSSNLYPREDMEAVSLTCDPETPDASYLWWMNGQSLPMTHSLQLSKNKRTLFLFGVTKYTAGPYECEIRNPVSASRSDPVTLNLLPKLPKPYITINNLNPRENKDVLAFTCEPKSENYTYIWWLNGQSLPVSPRVKRPIENRILILPSVTRNETGPYQCEIQDRYGGIRSYPVTLNVLYGPDLPRIYPSFTYYHSGENLYLSCFADSNPPAEYSWTINGKFQLSGQKLFIPQITTKHSGLYACSVRNSATGMESSKSMTVKVSAPSGTGHLPGLNPL

SEQ ID NO: 877290 - protein, 82 aa, Homo sapiens
MSVCPVDLPRRAQRLWLRAPARLRRKPPVLDPLPAHSGMCGNCRLASGTGRREVATPAPRHTAMVLPPDALLWCGLSAQYLV

SEQ ID NO: 877291 - protein, 137 aa, Homo sapiens
MSQVGRVRSSHHFESVCLDAEVRVVLVALDHAGLHTLSSALNESLRPIHREELHLLHFPNSPEENLRKRPAEPSPQIHGGAPHLPWLCVEKSDLLPENHAVFLQERTAQLFEGSFFFSRSPAHSISPLLQFRWGHCP

SEQ ID NO: 877292 - protein, 482 aa, Homo sapiens
RRAGLPGAWGPGLQRLRKVGSASGTMLLRAAWRRAAVAVTAAPGPKPAAPTRGLRLRVGDRAPQSAVPADTAAAPEVGPVLRPLYMDVQATTPLDPRVLDAMLPYLINYYGNPHSRTHAYGWESEAAMERARQQVASLIGADPREIIFTSGATESNNIAIKGVARFYRSRKKHLITTQTEHKCVLDSCRSLEAEGFQVTYLPVQKSGIIDLKELEAAIQPDTSLVSVMTVNNEIGVKQPIAEIGRICSSRKVYFHTDAAQAVGKIPLDVNDMKIDLMSISGHKIYGPKGVGAIYIRRRPRVRVEALQSGGGQERGMRSGTVPTPLVVGLGAACEVAQQEMEYDHKRISKLSERLIQNIMKSLPDVVMNGDPKHHYPGCINLSFAYVEGESLLMALKDVALSSGSACTSASLEPSYVLRAIGTDEDLAHSSIRFGIGRFTTEEEVDYTVEKCIQHVKRLREMSPLWEMVQDGIDLKSIKWTQH

SEQ ID NO: 877293 - protein, 464 aa, Homo sapiens
RRAGLPGAWGPGLQRLRKVGSASGTMLLRAAWRRAAVAVTAAPGPKPAAPTRGLRLRVGDRAPQSAVPADTAAAPEVGPVLRPLYMDVQATTPLDPRVLDAMLPYLINYYGNPHSRTHAYGWESEAAMERARQQVASLIGADPREIIFTSGATESNNIAIKGVARFYRSRKKHLITTQTEHKCVLDSCRSLEAEGFQVTYLPVQKSGIIDLKELEAAIQPDTSLVSVMTVNNEIGVKQPIAEIGRICSSRKVYFHTDAAQAVGKIPLDVNDMKIDLMSISGHVRVEALQSGGGQERGMRSGTVPTPLVVGLGAACEVAQQEMEYDHKRISKLSERLIQNIMKSLPDVVMNGDPKHHYPGCINLSFAYVEGESLLMALKDVALSSGSACTSASLEPSYVLRAIGTDEDLAHSSIRFGIGRFTTEEEVDYTVEKCIQHVKRLREMSPLWEMVQDGIDLKSIKWTQH

SEQ ID NO: 877294 - protein, 289 aa, Homo sapiens
RRAGLPGAWGPGLQRLRKVGSASGTMLLRAAWRRAAVAVTAAPGPKPAAPTRGLRLRVGDRAPQSAVPADTAAAPEVGPVLRPLYMDVQATTPLDPRVLDAMLPYLINYYGNPHSRTHAYGWESEAAMERARQQVASLIGADPREIIFTSGATESNNIAIKGVARFYRSRKKHLITTQTEHKCVLDSCRSLEAEGFQVTYLPVQKSGIIDLKELEAAIQPDTSLVSVMTVNNEIGVKQPIAEIGRICSSRKVYFHTDAAQAVGKIPLDVNDMKIDLMSISGHKIYGPKV

SEQ ID NO: 877295 - protein, 482 aa, Homo sapiens; identical to SEQ ID NO: 877292

SEQ ID NO: 877296 - protein, 435 aa, Homo sapiens
RRAGLPGAWGPGLQRLRKVGSASGTMLLRAAWRRAAVAVTAAPGPKPAAPTRGLRLRVGDRAPQSAVPADTAAAPEVGPVLRPLYMDVQATTPLDPRVLDAMLPYLINYYGNPHSRTHAYGWESEAAMERARQQVASLIGADPREIIFTSGATESNNIAIKGVARFYRSRKKHLITTQTEHKCVLDSCRSLEAEGFQVTYLPVQKSGIIDLKELEAAIQPDTSLVSVMTVNNEIGVKQPIAEIGRICSSRKVYFHTDAAQAVGKIPLDVNDMKIDLMSISGHKIYGPKGVGAIYIRRRPRVRVEALQSGGGQERGMRSGTVPTPLVVGLGAACEVAQQEMEYDHKRISKLSERLIQNIMKSLPDVVMNGDPKHHYPGCINLSFAYVEGESLLMALKDVALSSGSACTSASLEPSYVLRAIGTDEDLAHSSIRSVS

SEQ ID NO: 877297 - protein, 482 aa, Homo sapiens; identical to SEQ ID NO: 877292

SEQ ID NO: 877298 - protein, 93 aa, Homo sapiens
AYTHNHYNSRVKVPHTDMRPAQYLLSPRYPLFRKSYVGTPSRAQGTANRRIAPTLYCMAPQALLTGRYKETLLHLVDALDWYRPVDFSISPPL

SEQ ID NO: 877299 - protein, 482 aa, Homo sapiens; identical to SEQ ID NO: 877292

SEQ ID NO: 877300 - protein, 482 aa, Homo sapiens; identical to SEQ ID NO: 877292

SEQ ID NO: 877301 - protein, 214 aa, Homo sapiens
RRAGLPGAWGPGLQRLRKVGSASGTMLLRAAWRRAAVAVTAAPGPKPAAPTRGLRLRVGDRAPQSAVPADTAAAPEVGPVLRPLYMDVQATTPLDPRVLDAMLPYLINYYGNPHSRTHAYGWESEAAMERARQQVASLIGADPREIIFTSGATESNNIAIKTESHSVIQAGVQWHDLDSLQAPPPGFTPFSCLSLLSSWDYRRPPPHPANFLYF

SEQ ID NO: 877302 - protein, 674 aa, Homo sapiens
RGPGGPAEERYWGVGAAGFRAMIPPQEASARRREIEDKLKQEEETLSFIRDSLEKSDQLTKNMVSILSSFESRLMKLENSIIPVHKQTENLQRLQENVEKTLSCLDHVISYYHVASDTEKIIREGPTGRLEEYLGSMAKIQKAVEYFQDNSPDSPELNKVKLLFERGKEALESEFRSLMTRHSKVVSPVLILDLISGDDDLEAQEDVTLEHLPESVLQDVIRISRWLVEYGRNQDFMNVYYQIRSSQLDRSIKGLKEHFHKSSSSSGVPYSPAIPNKRKDTPTKKPVKRPGRDDMLDVETDAYIHCVSAFVKLAQSEYQLLADIIPEHHQKKTFDSLIQDALDGLMLEGENIVSAARKAIVRHDFSTVLTVFPILRHLKQTKPEFDQVLQGTAASTKNKLPGLITSMETIGAKALEDFADNIKNDPDKEYNMPKDGTVHELTSNAILFLQQLLDFQETAGAMLASQETSSSATSYSSEFSKRLLSTYICKVLGNLQLNLLSKSKVYEDPALSAIFLHNNYNYILKSLEKSELIQLVAVTQKTAERSYREHIEQQIQTYQRSWLKVTDYIAEKNLPVFQPGVKLRDKERQIIKERFKGFNDGLEELCKIQKAWAIPDTEQRDRIRQAQKTIVKETYGAFLQKFGSVPFTKNPEKYIKYGVEQVGDMIDRLFDTSA

SEQ ID NO: 877303 - protein, 705 aa, Homo sapiens
RGPGGPAEERYWGVGAAGFRAMIPPQEASARRREIEDKLKQEEETLSFIRDSLEKSDQLTKNMVSILSSFESRLMKLENSIIPVHKQTENLQRLQENVEKTLSCLDHVISYYHVASDTEKIIREGPTGRLEEYLGSMAKIQKAVEYFQDNSPDSPELNKVKLLFERGKEALESEFRSLMTRHSKVVSPVLILDLISGDDDLEAQEDVTLEHLPESVLQDVIRISRWLVEYGRNQDFMNVYYQIRSSQLDRSIKGLKEHFHKSSSSSGVPYSPAIPNKRKDTPTKKPVKRPGTIRKAQNLLKQYSQHGLDGKKGGSNLIPLEGRDDMLDVETDAYIHCVSAFVKLAQSEYQLLADIIPEHHQKKTFDSLIQDALDGLMLEGENIVSAARKAIVRHDFSTVLTVFPILRHLKQTKPEFDQVLQGTAASTKNKLPGLITSMETIGAKALEDFADNIKNDPDKEYNMPKDGTVHELTSNAILFLQQLLDFQETAGAMLASQETSSSATSYSSEFSKRLLSTYICKVLGNLQLNLLSKSKVYEDPALSAIFLHNNYNYILKSLEKSELIQLVAVTQKTAERSYREHIEQQIQTYQRSWLKVTDYIAEKNLPVFQPGVKLRDKERQIIKERFKGFNDGLEELCKIQKAWAIPDTEQRDRIRQAQKTIVKETYGAFLQKFGSVPFTKNPEKYIKYGVEQVGDMIDRLFDTSA

SEQ ID NO: 877304 - protein, 705 aa, Homo sapiens; identical to SEQ ID NO: 877303

SEQ ID NO: 877305 - protein, 180 aa, Homo sapiens
RGPGGPAEERYWGVGAAGFRAMIPPQEASARRREIEDKLKQEEETLSFIRDSLEKSDQLTKNMVSILSSFESRLMKLENSIIPVHKQTENLQRLQENVEKTLSCLDHVISYYHVASDTEKIIREGPTGRLEEYLGSMAKIQKAVEYFQDNSPDSPELNKVVRGPQNNVRSLGISVSALVS

SEQ ID NO: 877306 - protein, 728 aa, Homo sapiens
RGPGGPAEERYWGVGAAGFRAMIPPQEASARRREIEDKLKQEEETLSFIRDSLEKSDQLTKNMVSILSSFESRLMKLENSIIPVHKQTENLQRLQENVEKTLSCLDHVISYYHVASDTEKIIREGPTGRLEEYLGSMAKIQKAVEYFQDNSPDSPELNKVKLLFERGKEALESEFRSLMTRHSKVVSPVLILDLISGDDDLEAQEDVTLEHLPESVLQDVIRISRWLVEYGRNQDFMNVYYQIRSSQLDRSIKGLKEHFHKSSSSSGVPYSPAIPNKRKDTPTKKPVKRPGTIRKAQNLLKQYSQHGLDGKKGGSNLIPLEGHEHDFRVKHLSEALNDKHGPLAGRDDMLDVETDAYIHCVSAFVKLAQSEYQLLADIIPEHHQKKTFDSLIQDALDGLMLEGENIVSAARKAIVRHDFSTVLTVFPILRHLKQTKPEFDQVLQGTAASTKNKLPGLITSMETIGAKALEDFADNIKNDPDKEYNMPKDGTVHELTSNAILFLQQLLDFQETAGAMLASQETSSSATSYSSEFSKRLLSTYICKVLGNLQLNLLSKSKVYEDPALSAIFLHNNYNYILKSLEKSELIQLVAVTQKTAERSYREHIEQQIQTYQRSWLKVTDYIAEKNLPVFQPGVKLRDKERQIIKERFKGFNDGLEELCKIQKAWAIPDTEQRDRIRQAQKTIVKETYGAFLQKFGSVPFTKNPEKYIKYGVEQVGDMIDRLFDTSA

SEQ ID NO: 877307 - protein, 726 aa, Homo sapiens
MCPQYLSQSPNPSCPTAFSWDLPWEASARRREIEDKLKQEEETLSFIRDSLEKSDQLTKNMVSILSSFESRLMKLENSIIPVHKQTENLQRLQENVEKTLSCLDHVISYYHVASDTEKIIREGPTGRLEEYLGSMAKIQKAVEYFQDNSPDSPELNKVKLLFERGKEALESEFRSLMTRHSKVVSPVLILDLISGDDDLEAQEDVTLEHLPESVLQDVIRISRWLVEYGRNQDFMNVYYQIRSSQLDRSIKGLKEHFHKSSSSSGVPYSPAIPNKRKDTPTKKPVKRPGTIRKAQNLLKQYSQHGLDGKKGGSNLIPLEGHEHDFRVKHLSEALNDKHGPLAGRDDMLDVETDAYIHCVSAFVKLAQSEYQLLADIIPEHHQKKTFDSLIQDALDGLMLEGENIVSAARKAIVRHDFSTVLTVFPILRHLKQTKPEFDQVLQGTAASTKNKLPGLITSMETIGAKALEDFADNIKNDPDKEYNMPKDGTVHELTSNAILFLQQLLDFQETAGAMLASQETSSSATSYSSEFSKRLLSTYICKVLGNLQLNLLSKSKVYEDPALSAIFLHNNYNYILKSLEKSELIQLVAVTQKTAERSYREHIEQQIQTYQRSWLKVTDYIAEKNLPVFQPGVKLRDKERQIIKERFKGFNDGLEELCKIQKAWAIPDTEQRDRIRQAQKTIVKETYGAFLQKFGSVPFTKNPEKYIKYGVEQVGDMIDRLFDTSA

SEQ ID NO: 877308 - protein, 654 aa, Homo sapiens
MKLENSIIPVHKQTENLQRLQENVEKTLSCLDHVISYYHVASDTEKIIREGPTGRLEEYLGSMAKIQKAVEYFQDNSPDSPELNKVKLLFERGKEALESEFRSLMTRHSKVVSPVLILDLISGDDDLEAQEDVTLEHLPESVLQDVIRISRWLVEYGRNQDFMNVYYQIRSSQLDRSIKGLKEHFHKSSSSSGVPYSPAIPNKRKDTPTKKPVKRPGTIRKAQNLLKQYSQHGLDGKKGGSNLIPLEGHEHDFRVKHLSEALNDKHGPLAGRDDMLDVETDAYIHCVSAFVKLAQSEYQLLADIIPEHHQKKTFDSLIQDALDGLMLEGENIVSAARKAIVRHDFSTVLTVFPILRHLKQTKPEFDQVLQGTAASTKNKLPGLITSMETIGAKALEDFADNIKNDPDKEYNMPKDGTVHELTSNAILFLQQLLDFQETAGAMLASQETSSSATSYSSEFSKRLLSTYICKVLGNLQLNLLSKSKVYEDPALSAIFLHNNYNYILKSLEKSELIQLVAVTQKTAERSYREHIEQQIQTYQRSWLKVTDYIAEKNLPVFQPGVKLRDKERQIIKERFKGFNDGLEELCKIQKAWAIPDTEQRDRIRQAQKTIVKETYGAFLQKFGSVPFTKNPEKYIKYGVEQVGDMIDRLFDTSA

SEQ ID NO: 877309 - protein, 380 aa, Homo sapiens [sequence omitted]

SEQ ID NO: 877310 - protein, 674 aa, Homo sapiens; identical to SEQ ID NO: 877302

SEQ ID NO: 877311 - protein, 674 aa, Homo sapiens; identical to SEQ ID NO: 877302

SEQ ID NO: 877312 - protein, 674 aa, Homo sapiens; identical to SEQ ID NO: 877302

SEQ ID NO: 877313 - protein, 542 aa, Homo sapiens
RGPGGPAEERYWGVGAAGFRAMIPPQEASARRREIEDKLKQEEETLSFIRDSLEKSDQLTKNMVSILSSFESRLMKLENSIIPVHKQTENLQRLQENVEKTLSCLDHVISYYHVASDTEKIIREGPTGRLEEYLGSMAKIQKAVEYFQDNSPDSPELNKVKLLFERGKEALESEFRSLMTRHSKVVSPVLILDLISGDDDLEAQEDVTLEHLPESVLQDVIRISRWLVEYGRNQDFMNVYYQIRSSQLDRSIKGLKEHFHKSSSSSGVPYSPAIPNKRKDTPTKKPVKRPGRDDMLDVETDAYIHCVSAFVKLAQSEYQLLADIIPEHHQKKTFDSLIQDALDGLMLEGENIVSAARKAIVRHDFSTVLTVFPILRHLKQTKPEFDQVLQGTAASTKNKLPGLITSMETIGAKALEDFADNIKNDPDKEYNMPKDGTVHELTSNAILFLQQLLDFQETAGAMLASQETSSSATSYSSEFSKRLLSTYICKVLGNLQLNLLSKSKVYEDPALSAIFLHNNYNYILKSLEKSELTLMTSVNPRD

SEQ ID NO: 877314 - protein, 586 aa, Homo sapiens
RGPGGPAEERYWGVGAAGFRAMIPPQEASARRREIEDKLKQEEETLSFIRDSLEKSDQLTKNMVSILSSFESRLMKLENSIIPVHKQTENLQRLQENVEKTLSCLDHVISYYHVASDTEKIIREGPTGRLEEYLGSMAKIQKAVEYFQDNSPDSPELNKVKLLFERGKEALESEFRSLMTRHSKVVSPVLILDLISGDDDLEAQEDVTLEHLPESVLQDVIRISRWLVEYGRNQDFMNVYYQIRSSQLDRSIKGLKEHFHKSSSSSGVPYSPAIPNKRKDTPTKKPVKRPGTIRKAQNLLKQYSQHGLDGKKGGSNLIPLEGHEHDFRVKHLSEALNDKHGPLAGRDDMLDVETDAYIHCVSAFVKLAQSEYQLLADIIPEHHQKKTFDSLIQDALDGLMLEGENIVSAARKAIVRHDFSTVLTVFPILRHLKQTKPEFDQVLQGTAASTKNKLPGLITSMETIGAKALEDFADNIKNDPDKEYNMPKDGTVHELTSNAILFLQQLLDFQETAGAMLASQETSSSATSYSSEFSKRLLSTYICECSPGQTSSPAACMPCLSLPSVCALWLFPGPSPKCHLIFGTTT

SEQ ID NO: 877315 - protein, 416 aa, Homo sapiens
RGPGGPAEERYWGVGAAGFRAMIPPQEASARRREIEDKLKQEEETLSFIRDSLEKSDQLTKNMVSILSSFESRLMKLENSIIPVHKQTENLQRLQENVEKTLSCLDHVISYYHVASDTEKIIREGPTGRLEEYLGSMAKIQKAVEYFQDNSPDSPELNKVKLLFERGKEALESEFRSLMTRHSKVVSPVLILDLISGDDDLEAQEDVTLEHLPESVLQDVIRISRWLVEYGRNQDFMNVYYQIRSSQLDRSIKGLKEHFHKSSSSSGVPYSPAIPNKRKDTPTKKPVKRPGRDDMLDVETDAYIHCVSAFVKLAQSEYQLLADIIPEHHQKKTFDSLIQDALDGLMLEGENIVSAARKAIVRHDFSTVLTVFPILYLEEISRIQSLRSPSVHQTQHVEMYPLQRKETFYLRKASPL

SEQ ID NO: 877316 - protein, 378 aa, Homo sapiens
RGPGGPAEERYWGVGAAGFRAMIPPQEASARRREIEDKLKQEEETLSFIRDSLEKSDQLTKNMVSILSSFESRLMKLENSIIPVHKQTENLQRLQENVEKTLSCLDHVISYYHVASDTEKIIREGPTGRLEEYLGSMAKIQKAVEYFQDNSPDSPELNKVKLLFERGKEALESEFRSLMTRHSKVVSPVLILDLISGDDDLEAQEDVTLEHLPESVLQDVIRISRWLVEYGRNQDFMNVYYQIRSSQLDRSIKGLKEHFHKSSSSSGVPYSPAIPNKRKDTPTKKPVKRPGTIRKAQNLLKQYSQHGLDGKKGGSNLIPLEGHEHDFRVKHLSEALNDKHGPLAGEYRSPARGQPLTLPSQRSPDGLLLPGPAGPTLL

SEQ ID NO: 877317 - protein, 145 aa, Homo sapiens
MCPQYLSQSPNPSCPTAFSWDLPWEASARRREIEDKLKQEEETLSFIRDSLEKSDQLTKNMVSILSSFESRLMKLENSIIPVHKQTENLQRLQENVEKTLSCLDHVISYYHVASDTEKIIREGPTGRLEEYLRTYDLEPMTCEPM

SEQ ID NO: 877318 - protein, 160 aa, Homo sapiens
MCPQYLSQSPNPSCPTAFSWDLPWEASARRREIEDKLKQEEETLSFIRDSLEKSDQLTKNMVSLPAAGGEGRPPDPGGEPCDLAVPVPAAWSSGMGSDGGSVWVYLATVWHLSCLAPSPCSVPSLRRLHFPLAWTCCFLSKLAILPSLLLQTLSESDQLG

SEQ ID NO: 877319 - protein, 106 aa, Homo sapiens
MKLENSIIPVHKQTENLQRLQENVEKTLSCLDHVISYYHVASDTEKIIREGPTGRLEEYLGSMAKIQKAVEYFQDNSPDSPELNKVVRGPQNNVRSLGISVSALVS

SEQ ID NO: 877320 - protein, 304 aa, Homo sapiens
RGPGGPAEERYWGVGAAGFRAMIPPQEASARRREIEDKLKQEEETLSFIRDSLEKSDQLTKNMVSILSSFESRLMKLENSIIPVHKQTENLQRLQENVEKTLSCLDHVISYYHVASDTEKIIREGPTGRLEEYLGSMAKIQKAVEYFQDNSPDSPELNKVKLLFERGKEALESEFRSLMTRHSKVVSPVLILDLISGDDDLEAQEDVTLEHLPESVLQDVIRISRWLVEYGRNQDFMNVYYQIRSSQLDRSIKGLKEHFHKSSSSSGVPYSPAIPNKRKDTPTKKPVKRPGEPPSWPISATARG

SEQ ID NO: 877321 - protein, 78 aa, Homo sapiens
SVYFRVKHREMQPCSSGRSLVRHEHDFRVKHLSEALNDKHGPLAGEYRSPARGQPLTLPSQRSPDGLLLPGPAGPTLL

SEQ ID NO: 877322 - protein, 697 aa, Homo sapiens
RGPGGPAEERYWGVGAAGFRAMIPPQEASARRREIEDKLKQEEETLSFIRDSLEKSDQLTKNMVSILSSFESRLMKLENSIIPVHKQTENLQRLQENVEKTLSCLDHVISYYHVASDTEKIIREGPTGRLEEYLGSMAKIQKAVEYFQDNSPDSPELNKVKLLFERGKEALESEFRSLMTRHSKVVSPVLILDLISGDDDLEAQEDVTLEHLPESVLQDVIRISRWLVEYGRNQDFMNVYYQIRSSQLDRSIKGLKEHFHKSSSSSGVPYSPAIPNKRKDTPTKKPVKRPGHEHDFRVKHLSEALNDKHGPLAGRDDMLDVETDAYIHCVSAFVKLAQSEYQLLADIIPEHHQKKTFDSLIQDALDGLMLEGENIVSAARKAIVRHDFSTVLTVFPILRHLKQTKPEFDQVLQGTAASTKNKLPGLITSMETIGAKALEDFADNIKNDPDKEYNMPKDGTVHELTSNAILFLQQLLDFQETAGAMLASQETSSSATSYSSEFSKRLLSTYICKVLGNLQLNLLSKSKVYEDPALSAIFLHNNYNYILKSLEKSELIQLVAVTQKTAERSYREHIEQQIQTYQRSWLKVTDYIAEKNLPVFQPGVKLRDKERQIIKERFKGFNDGLEELCKIQKAWAIPDTEQRDRIRQAQKTIVKETYGAFLQKFGSVPFTKNPEKYIKYGVEQVGDMIDRLFDTSA

SEQ ID NO: 877323 - protein, 568 aa, Homo sapiens
TLGSEAGLRAVTLRRYQRGPTGRLEEYLGSMAKIQKAVEYFQDNSPDSPELNKVKLLFERGKEALESEFRSLMTRHSKVVSPVLILDLISGDDDLEAQEDVTLEHLPESVLQDVIRISRWLVEYGRNQDFMNVYYQIRSSQLDRSIKGLKEHFHKSSSSSGVPYSPAIPNKRKDTPTKKPVKRPGRDDMLDVETDAYIHCVSAFVKLAQSEYQLLADIIPEHHQKKTFDSLIQDALDGLMLEGENIVSAARKAIVRHDFSTVLTVFPILRHLKQTKPEFDQVLQGTAASTKNKLPGLITSMETIGAKALEDFADNIKNDPDKEYNMPKDGTVHELTSNAILFLQQLLDFQETAGAMLASQETSSSATSYSSEFSKRLLSTYICKVLGNLQLNLLSKSKVYEDPALSAIFLHNNYNYILKSLEKSELIQLVAVTQKTAERSYREHIEQQIQTYQRSWLKVTDYIAEKNLPVFQPGVKLRDKERQIIKERFKGFNDGLEELCKIQKAWAIPDTEQRDRIRQAQKTIVKETYGAFLQKFGSVPFTKNPEKYIKYGVEQVGDMIDRLFDTSA

SEQ ID NO: 877324 - protein, 458 aa, Homo sapiens
AAAYYYYIRGRSIKGLKEHFHKSSSSSGVPYSPAIPNKRKDTPTKKPVKRPGHEHDFRVKHLSEALNDKHGPLAGRDDMLDVETDAYIHCVSAFVKLAQSEYQLLADIIPEHHQKKTFDSLIQDALDGLMLEGENIVSAARKAIVRHDFSTVLTVFPILRHLKQTKPEFDQVLQGTAASTKNKLPGLITSMETIGAKALEDFADNIKNDPDKEYNMPKDGTVHELTSNAILFLQQLLDFQETAGAMLASQETSSSATSYSSEFSKRLLSTYICKVLGNLQLNLLSKSKVYEDPALSAIFLHNNYNYILKSLEKSELIQLVAVTQKTAERSYREHIEQQIQTYQRSWLKVTDYIAEKNLPVFQPGVKLRDKERQIIKERFKGFNDGLEELCKIQKAWAIPDTEQRDRIRQAQKTIVKETYGAFLQKFGSVPFTKNPEKYIKYGVEQVGDMIDRLFDTSA

SEQ ID NO: 877325 - protein, 426 aa, Homo sapiens
RDKERQIIKERFKGFNDGLEELCKIQKAWAIPDTEQRDRIRQAQKTIVKETYGAFLQKFGSVPFTKNPEKYIKYGVEQVGDMIIAFSTPLPEPAASPAWFHQTIVSAARKAIVRHDFSTVLTVFPILRHLKQTKPEFDQVLQGTAASTKNKLPGLITSMETIGAKALEDFADNIKNDPDKEYNMPKDGTVHELTSNAILFLQQLLDFQETAGAMLASQETSSSATSYSSEFSKRLLSTYICKVLGNLQLNLLSKSKVYEDPALSAIFLHNNYNYILKSLEKSELIQLVAVTQKTAERSYREHIEQQIQTYQRSWLKVTDYIAEKNLPVFQPGVKLRDKERQIIKERFKGFNDGLEELCKIQKAWAIPDTEQRDRIRQAQKTIVKETYGAFLQKFGSVPFTKNPEKYIKYGVEQVGDMIDRLFDTSA

SEQ ID NO: 877326 - protein, 326 aa, Homo sapiens
YLNVGYLQAVTSPESLVFTVLTVFPILRHLKQTKPEFDQVLQGTAASTKNKLPGLITSMETIGAKALEDFADNIKNDPDKEYNMPKDGTVHELTSNAILFLQQLLDFQETAGAMLASQETSSSATSYSSEFSKRLLSTYICKVLGNLQLNLLSKSKVYEDPALSAIFLHNNYNYILKSLEKSELIQLVAVTQKTAERSYREHIEQQIQTYQRSWLKVTDYIAEKNLPVFQPGVKLRDKERQIIKERFKGFNDGLEELCKIQKAWAIPDTEQRDRIRQAQKTIVKETYGAFLQKFGSVPFTKNPEKYIKYGVEQVGDMIDRLFDTSA

SEQ ID NO: 877327 - protein, 674 aa, Homo sapiens; identical to SEQ ID NO: 877302

SEQ ID NO: 877328 - protein, 674 aa, Homo sapiens; identical to SEQ ID NO: 877302

SEQ ID NO: 877329 - protein, 674 aa, Homo sapiens; identical to SEQ ID NO: 877302

SEQ ID NO: 877330 - protein, 674 aa, Homo sapiens; identical to SEQ ID NO: 877302

SEQ ID NO: 877331 - protein, 568 aa, Homo sapiens
RGPGGPAEERYWGVGAAGFRAMIPPQEASARRREIEDKLKQEEETLSFIRDSLEKSDQLTKNMVSILSSFESRLMKLENSIIPVHKQTENLQRLQENVEKTLSCLDHVISYYHVASDTEKIIREGPTGRLEEYLGSMAKIQKAVEYFQDNSPDSPELNKVKLLFERGKEALESEFRSLMTRHSKVVSPVLILDLISGDDDLEAQEDVTLEHLPESVLQDVIRISRWLVEYGRNQDFMNVYYQIRSSQLDRSIKGLKEHFHKSSSSSGVPYSPAIPNKRKDTPTKKPVKRPGRDDMLDVETDAYIHCVSAFVKLAQSEYQLLADIIPEHHQKKTFDSLIQDALDGLMLEGENIVSAARKAIVRHDFSTVLTVFPILRHLKQTKPEFDQVLQGTAASTKNKLPGLITSMETIGAKALEDFADNIKNDPDKEYNMPKDGTVHELTSNAILFLQQLLDFQETAGAMLASQETSSSATSYSSEFSKRLLSTYICKVLGNLQLNLLSKSKVYEDPALSAIFLHNNYNYILKSLEKSELIQLVAVTQKTAERSYREHIEQPPVFQPGVKLRDKER

SEQ ID NO: 877332 - protein, 457 aa, Homo sapiens
RGPGGPAEERYWGVGAAGFRAMIPPQEASARRREIEDKLKQEEETLSFIRDSLEKSDQLTKNMVSILSSFESRLMKLENSIIPVHKQTENLQRLQENVEKTLSCLDHVISYYHVASDTEKIIREGPTGRLEEYLGSMAKIQKAVEYFQDNSPDSPELNKVKLLFERGKEALESEFRSLMTRHSKVVSPVLILDLISGDDDLEAQEDVTLEHLPESVLQDVIRISRWLVEYGRNQDFMNVYYQIRSSQLDRSIKGLKEHFHKSSSSSGVPYSPAIPNKRKDTPTKKPVKRPGRDDMLDVETDAYIHCVSAFVKLAQSEYQLLADIIPEHHQKKTFDSLIQDALDGLMLEGENIVSAARKAIVRHDFSTVLTVFPILRHLKQTKPEFDQVLQGTAASTKNKLPGLITSMETIGAKALEDFADNIKNDPDKEYNMPKDGTVHELTSNAILFLQQSTRPRI

SEQ ID NO: 877333 - protein, 391 aa, Homo sapiens
RGPGGPAEERYWGVGAAGFRAMIPPQEASARRREIEDKLKQEEETLSFIRDSLEKSDQLTKNMVSILSSFESRLMKLENSIIPVHKQTENLQRLQENVEKTLSCLDHVISYYHVASDTEKIIREGPTGRLEEYLGSMAKIQKAVEYFQDNSPDSPELNKVKLLFERGKEALESEFRSLMTRHSKVVSPVLILDLISGDDDLEAQEDVTLEHLPESVLQDVIRISRWLVEYGRNQDFMNVYYQIRSSQLDRSIKGLKEHFHKSSSSSGVPYSPAIPNKRKDTPTKKPVKRPGRDDMLDVETDAYIHCVSAFVKLAQSEYQLLADIIPEHHQKKTFDSLIQDALDGLMLEGENIVSAARKAIVRHDFSTVLTVFPILRASCIQGVEVFFWGIL

SEQ ID NO: 877334 - protein, 310 aa, Homo sapiens
RGPGGPAEERYWGVGAAGFRAMIPPQEASARRREIEDKLKQEEETLSFIRDSLEKSDQLTKNMVSILSSFESRLMKLENSIIPVHKQTENLQRLQENVEKTLSCLDHVISYYHVASDTEKIIREGPTGRLEEYLGSMAKIQKAVEYFQDNSPDSPELNKVKLLFERGKEALESEFRSLMTRHSKVVSPVLILDLISGDDDLEAQEDVTLEHLPESVLQDVIRISRWLVEYGRNQDFMNVYYQIRSSQLDRSIKGLKEHFHKSSSSSGVADWSPGVMETFDGFWQGQTWTQNRSIEGLPKPCFATSQIVSS

SEQ ID NO: 877335 - protein, 109 aa, Homo sapiens
MCPQYLSQSPNPSCPTAFSWDLPWEASARRREIEDKLKQEEETLSFIRDSLEKSDQLTKNMVSILSSFESRLMKLENFDGFWQGQTWTQNRSIEGLPKPCFATSQIVSS

SEQ ID NO: 877336 - protein, 68 aa, Homo sapiens
YFLSCLWEKVDKHPSGIREQRMHVAIRTQETGPDQGCLGKSGGRLLCSEVSFLCYLSWLPSSGTRSGR

SEQ ID NO: 877337 - protein, 580 aa, Homo sapiens
MEIGTEISRKIRSAIKGKLQELGAYVDEELPDYIMVMVANKKSQDQMTEDLSLFLGNNTIRFTVWLHGVLDKLRSVTTEPSSLKSSDTNIFDSNVPSNKSNFSRGDERRHEAAVPPLAIPSARPEKRDSRVSTSSQESKTTNVRQTYDDGAATRLMSTVKPLREPAPSEDVIDIKPEPDDLIDEDLNFVQENPLSQKKPTVTLTYGSSRPSIEIYRPPASRNADSGVHLNRLQFQQQQNSIHAAKQLDMQSSWVYETGRLCEPEVLNSLEETYSPFFRNNSEKMSMEDENFRKRKLPVVSSVVKVKKFNHDGEEEEEDDDYGSRTGSISSSVSVPAKPERRPSLPPSKQANKNLILKAISEAQESVTKTTNYSTVPQKQTLPVAPRTRTSQEELLAEVVQGQSRTPRISPPIKEEETKGDSVEKNQAEMSELSVAQKPEKLLERCKYWPACKNGDECAYHHPISPCKAFPNCKFAEKCLFVHPNCKYDAKCTKPDCPFTHVSRRIPVLSPKPAVAPPAPPSSSQLCRYFPACKKMECPFYHPKHCRFNTQCTRPDCTFYHPTINVPPRHALKWIRPQTSE

SEQ ID NO: 877338 - protein, 736 aa, Homo sapiens
MEIGTEISRKIRSAIKGKLQELGAYVDEELPDYIMVMVANKKSQDQMTEDLSLFLGNNTIRFTVWLHGVLDKLRSVTTEPSSLKSSDTNIFDSNVPSNKSNFSRGDERRHEAAVPPLAIPSARPEKRDSRVSTSSQESKTTNVRQTYDDGAATRLMSTVKPLREPAPSEDVIDIKPEPDDLIDEDLNFVQENPLSQKKPTVTLTYGSSRPSIEIYRPPASRNADSGVHLNRLQFQQQQNSIHAAKQLDMQSSWVYETGRLCEPEVLNSLEETYSPFFRNNSEKMSMEDENFRKRKLPVVSSVVKVKKFNHDGEEEEEDDDYGSRTGSISSSVSVPAKPERRPSLPPSKQANKNLILKAISEAQESVTKTTNYSTVPQKQTLPVAPRTRTSQEELLAEVVQGQSRTPRISPPIKEEETKGDSVEKNQGTQQRQLLSRLQIDPVMAETLQMSQDYYDMESMVHADTRSFILKKPKLSEEVVVAPNQESGMKTADSLRVLSGHLMQTRDLVQPDKPASPKFIVTLDGVPSPPGYMSDQEEDMCFEGMKPVNQTAASNKGLRGLLHPQQLHLLSRQLEDPNGSFSNAEMSELSVAQKPEKLLERCKYWPACKNGDECAYHHPISPCKAFPNCKFAEKCLFVHPNCKYDAKCTKPDCPFTHVSRRIPVLSPKPAVAPPAPPSSSQLCRYFPACKKMECPFYHPKHCRFNTQCTRPDCTFYHPTINVPPRHALKWIRPQTSE

SEQ ID NO: 877339 - protein, 711 aa, Homo sapiens
MEIGTEISRKIRSAIKGKLQELGAYVDEELPDYIMVMVANKKSQDQMTEDLSLFLGNNTIRFTVWLHGVLDKLRSVTTEPSSLKSSDTNIFDSNVPSNKSNFSRGDERRHEAAVPPLAIPSARPEKRDSRVSTSSQESKTTNVRQTYDDGAATRLMSTVKPLREPAPSEDVIDIKPEPDDLIDEDLNFVQENPLSQKKPTVTLTYGSSRPSIEIYRPPASRNADSGVHLNRLQFQQQQNSIHAAKQLDMQSSWVYETGRLCEPEVLNSLEETYSPFFRNNSEKMSMEDENFRKRKLPVVSSVVKVKKFNHDGEEEEEDDDYGSRTGSISSSVSVPAKPERRPSLPPSKQANKNLILKAISEAQESVTKTTNYSTVPQKQTLPVAPRTRTSQEELLAEVVQGQSRTPRISPPIKEEETKGDSVEKNQDYYDMESMVHADTRSFILKKPKLSEEVVVAPNQESGMKTADSLRVLSGHLMQTRDLVQPDKPASPKFIVTLDGVPSPPGYMSDQEEDMCFEGMKPVNQTAASNKGLRGLLHPQQLHLLSRQLEDPNGSFSNAEMSELSVAQKPEKLLERCKYWPACKNGDECAYHHPISPCKAFPNCKFAEKCLFVHPNCKYDAKCTKPDCPFTHVSRRIPVLSPKPAVAPPAPPSSSQLCRYFPACKKMECPFYHPKHCRFNTQCTRPDCTFYHPTINVPPRHALKWIRPQTSE

SEQ ID NO: 877340 - protein, 659 aa, Homo sapiens
MEIGTEISRKIRSAIKGKLQELGAYVDEELPDYIMVMVANKKSQDQMTEDLSLFLGNNTIRFTVWLHGVLDKLRSVTTEPSSLKSSDTNIFDSNVPSNKSNFSRGDERRHEAAVPPLAIPSARPEKRDSRVSTSSQESKTTNVRQTYDDGAATRLMSTVKPLREPAPSEDVIDIKPEPDDLIDEDLNFVQENPLSQKKPTVTLTYGSSRPSIEIYRPPASRNADSGVHLNRLQFQQQQNSIHAAKQLDMQSSWVYETGRLCEPEVLNSLEETYSPFFRNNSEKMSMEDENFRKRKLPVVSSVVKVKKFNHDGEEEEEDDDYGSRTGSISSSVSVPAKPERRPSLPPSKQANKNLILKAISEAQESVTKTTNYSTVPQKQTLPVAPRTRTSQEELLAEVVQGQSRTPRISPPIKEEETKGDSVEKNQGTQQRQLLSRLQIDPVMAETLQMSQDTRSFILKKPKLSEEVVVAPNQESGMKTADSLRVLSGHLMQTRDLVQPDKPASPKFIVTLDGVPSPPGYMSDQEEDMCFEGMKPVNQTAASNKGLRGLLHPQQLHLLSRQLEDPNGSFSNAEMSELSVAQKPEKLLERCKYWPACKNGDECAYHHPISPCKAFPNCKFAEKCLFVHPNCKYDAKCTKPDCPFTHVSRRIPVLSPKPGE

SEQ ID NO: 877341 - protein, 616 aa, Homo sapiens
MEIGTEISRKIRSAIKGKLQELGAYVDEELPDYIMVMVANKKSQDQMTEDLSLFLGNNTIRFTVWLHGVLDKLRSVTTEPSSLKSSDTNIFDSNVPSNKSNFSRGDERRHEAAVPPLAIPSARPEKRDSRVSTSSQESKTTNVRQTYDDGAATRLMSTVKPLREPAPSEDVIDIKPEPDDLIDEDLNFVQENPLSQKKPTVTLTYGSSRPSIEIYRPPASRNADSGVHLNRLQFQQQQNSIHAAKQLDMQSSWVYETGRLCEPEVLNSLEETYSPFFRNNSEKMSMEDENFRKRKLPVVSSVVKVKKFNHDGEEEEEDDDYGSRTGSISSSVSVPAKPERRPSLPPSKQANKNLILKAISEAQESVTKTTNYSTVPQKQTLPVAPRTRTSQEELLAEVVQGQSRTPRISPPIKEEETKGDSVEKNQGTQQRQLLSRLQIDPVMAETLQMSQAEMSELSVAQKPEKLLERCKYWPACKNGDECAYHHPISPCKAFPNCKFAEKCLFVHPNCKYDAKCTKPDCPFTHVSRRIPVLSPKPDWRSVLVFILLAVAPPAPPSSSQLCRYFPACKKMECPFYHPKHCRFNTQCTRPDCTFYHPTINVPPRHALKWIRPQTSE

SEQ ID NO: 877342 - protein, 580 aa, Homo sapiens; identical to SEQ ID NO: 877337

SEQ ID NO: 877343 - protein, 580 aa, Homo sapiens; identical to SEQ ID NO: 877337

SEQ ID NO: 877344 - protein, 580 aa, Homo sapiens; identical to SEQ ID NO: 877337

SEQ ID NO: 877345 - protein, 570 aa, Homo sapiens
MSTVKPLREPAPSEDVIDIKPEPDDLIDEDLNFVQENPLSQKKPTVTLTYGSSRPSIEIYRPPASRNADSGVHLNRLQFQQQQNSIHAAKQLDMQSSWVYETGRLCEPEVLNSLEETYSPFFRNNSEKMSMEDENFRKRKLPVVSSVVKVKKFNHDGEEEEEDDDYGSRTGSISSSVSVPAKPERRPSLPPSKQANKNLILKAISEAQESVTKTTNYSTVPQKQTLPVAPRTRTSQEELLAEVVQGQSRTPRISPPIKEEETKGDSVEKNQGTQQRQLLSRLQIDPVMAETLQMSQDTRSFILKKPKLSEEVVVAPNQESGMKTADSLRVLSGHLMQTRDLVQPDKPASPKFIVTLDGVPSPPGYMSDQEEDMCFEGMKPVNQTAASNKGLRGLLHPQQLHLLSRQLEDPNGSFSNAEMSELSVAQKPEKLLERCKYWPACKNGDECAYHHPISPCKAFPNCKFAEKCLFVHPNCKYDAKCTKPDCPFTHVSRRIPVLSPKPAVAPPAPPSSSQLCRYFPACKKMECPFYHPKHCRFNTQCTRPDCTFYHPTINVPPRHALKWIRPQTSE

SEQ ID NO: 877346 - protein, 411 aa, Homo sapiens
MSSKFPSPPLPIFLPPEPVDLGSITSSSCSLNELDNISHLLRKISADINEIKGMKAAILTVEANLFDLNVRVSKNEAKISSLEVKMNEYSTTYECNRQFEDQEEDTESQSRTTDVKIIGFLRNVEKDYYDMESMVHADTRSFILKKPKLSEEVVVAPNQESGMKTADSLRVLSGHLMQTRDLVQPDKPASPKFIVTLDGVPSPPGYMSDQEEDMCFEGMKPVNQTAASNKGLRGLLHPQQLHLLSRQLEDPNGSFSNAEMSELSVAQKPEKLLERCKYWPACKNGDECAYHHPISPCKAFPNCKFAEKCLFVHPNCKYDAKCTKPDCPFTHVSRRIPVLSPKPAVAPPAPPSSSQLCRYFPACKKMECPFYHPKHCRFNTQCTRPDCTFYHPTINVPPRHALKWIRPQTSE

SEQ ID NO: 877347 - protein, 280 aa, Homo sapiens
MSSKFPSPPLPIFLPPEPVDLGSITSSSCSLNELDNISHLLRKISADINEIKGMKAAILTVEANLFDLNVRVSKNEAKISSLEVKMNEYSTTYECNRQFEDQEEDTESQSRTTDVKIIGFLRNVEKAEMSELSVAQKPEKLLERCKYWPACKNGDECAYHHPISPCKAFPNCKFAEKCLFVHPNCKYDAKCTKPDCPFTHVSRRIPVLSPKPAVAPPAPPSSSQLCRYFPACKKMECPFYHPKHCRFNTQCTRPDCTFYHPTINVPPRHALKWIRPQTSE

SEQ ID NO: 877348 - protein, 475 aa, Homo sapiens
MEIGTEISRKIRSAIKGKLQELGAYVDEELPDYIMVMVANKKSQDQMTEDLSLFLGNNTIRFTVWLHGVLDKLRSVTTEPSSLKSSDTNIFDSNVPSNKSNFSRGDERRHEAAVPPLAIPSARPEKRDSRVSTSSQESKTTNVRQTYDDGAATRLMSTVKPLREPAPSEDVIDIKPEPDDLIDEDLNFVQENPLSQKKPTVTLTYGSSRPSIEIYRPPASRNADSGVHLNRLQFQQQQNSIHAAKQLDMQSSWVYETGRLCEPEVLNSLEETYSPFFRNNSEKMSMEDENFRKRKLPVVSSVVKVKKFNHDGEEEEEDDDYGSRTGSISSSVSVPAKPERRPSLPPSKQANKNLILKAISEAQESVTKTTNYSTVPQKQTLPVAPRTRTSQEELLAEVVQGQSRTPRISPPIKEEETKGDSVEKNQGDLSFLSGCFQDLLFVFDVLQFHYDVSRRGFPFIFPVWYNVWKHPIYLK

SEQ ID NO: 877349 - protein, 725 aa, Homo sapiens
MEIGTEISRKIRSAIKGKLQELGAYVDEELPDYIMVMVANKKSQDQMTEDLSLFLGNNTIRFTVWLHGVLDKLRSVTTEPSSLKSSDTNIFDSNVPSNKSNFSRGDERRHEAAVPPLAIPSARPEKRDSRVSTSSQESKTTNVRQTYDDGAATRLMSTVKPLREPAPSEDVIDIKPEPDDLIDEDLNFVQENPLSQKKPTVTLTYGSSRPSIEIYRPPASRNADSGVHLNRLQFQQQQNSIHAAKQLDMQSSWVYETGRLCEPEVLNSLEETYSPFFRNNSEKMSMEDENFRKRKLPVVSSVVKVKKFNHDGEEEEEDDDYGSRTGSISSSVSVPAKPERRPSLPPSKQANKNLILKAISEAQESVTKTTNYSTVPQKQTLPVAPRTRTSQEELLAEVVQGQSRTPRISPPIKEEETKGDSVEKNQGTQQRQLLSRLQIDPVMAETLQMSQDTRSFILKKPKLSEEVVVAPNQESGMKTADSLRVLSGHLMQTRDLVQPDKPASPKFIVTLDGVPSPPGYMSDQEEDMCFEGMKPVNQTAASNKGLRGLLHPQQLHLLSRQLEDPNGSFSNAEMSELSVAQKPEKLLERCKYWPACKNGDECAYHHPISPCKAFPNCKFAEKCLFVHPNCKYDAKCTKPDCPFTHVSRRIPVLSPKPAVAPPAPPSSSQLCRYFPACKKMECPFYHPKHCRFNTQCTRPDCTFYHPTINVPPRHALKWIRPQTSE

SEQ ID NO: 877350 - protein, 605 aa, Homo sapiens
MEIGTEISRKIRSAIKGKLQELGAYVDEELPDYIMVMVANKKSQDQMTEDLSLFLGNNTIRFTVWLHGVLDKLRSVTTEPSSLKSSDTNIFDSNVPSNKSNFSRGDERRHEAAVPPLAIPSARPEKRDSRVSTSSQESKTTNVRQTYDDGAATRLMSTVKPLREPAPSEDVIDIKPEPDDLIDEDLNFVQENPLSQKKPTVTLTYGSSRPSIEIYRPPASRNADSGVHLNRLQFQQQQNSIHAAKQLDMQSSWVYETGRLCEPEVLNSLEETYSPFFRNNSEKMSMEDENFRKRKLPVVSSVVKVKKFNHDGEEEEEDDDYGSRTGSISSSVSVPAKPERRPSLPPSKQANKNLILKAISEAQESVTKTTNYSTVPQKQTLPVAPRTRTSQEELLAEVVQGQSRTPRISPPIKEEETKGDSVEKNQGTQQRQLLSRLQIDPVMAETLQMSQAEMSELSVAQKPEKLLERCKYWPACKNGDECAYHHPISPCKAFPNCKFAEKCLFVHPNCKYDAKCTKPDCPFTHVSRRIPVLSPKPAVAPPAPPSSSQLCRYFPACKKMECPFYHPKHCRFNTQCTRPDCTFYHPTINVPPRHALKWIRPQTSE

SEQ ID NO: 877351 - protein, 736 aa, Homo sapiens
MEIGTEISRKIRSAIKGKLQELGAYVDEELPDYIMVMVANKKSQDQMTEDLSLFLGNNTIRFTVWLHGVLDKLRSVTTEPSSLKSSDTNIFDSNVPSNKSNFSRGDERRHEAAVPPLAIPSARPEKRDSRVSTSSQESKTTNVRQTYDDGAATRLMSTVKPLREPAPSEDVIDIKPEPDDLIDEDLNFVQENPLSQKKPTVTLTYGSSRPSIEIYRPPASRNADSGVHLNRLQFQQQQNSIHAAKQLDMQSSWVYETGRLCEPEVLNSLEETYSPFFRNNSEKMSMEDENFRKRKLPVVSSVVKVKKFNHDGEEEEEDDDYGSRTGSISSSVSVPAKPERRPSLPPSKQANKNLILKAISEAQESVTKTTNYSTVPQKQTLPVAPRTRTSQEELLAEVVQGQSRTPRISPPIKEEETKGDSVEKNQGTQQRQLLSRLQIDPVMAETLQMSQDTRSFILKKPKLSEEVVVAPNQESGMKTADSLRVLSGHLMQTRDLVQPDKPASPKFIVTLDGVPSPPGYMSDQEEDMCFEGMKPVNQTAASNKGLRGLLHPQQLHLLSRQLEDPNGSFSNAEMSELSVAQKPEKLLERCKYWPACKNGDECAYHHPISPCKAFPNCKFAEKCLFVHPNCKYDAKCTKPDCPFTHVSRRIPVLSPKPDWRSVLVFILLAVAPPAPPSSSQLCRYFPACKKMECPFYHPKHCRFNTQCTRPDCTFYHPTINVPPRHALKWIRPQTSE

SEQ ID NO: 877352 - protein, 745 aa, Homo sapiens
MEIGTEISRKIRSAIKGKLQELGAYVVFEIPVEMKRKKLKLSHLVQYEELPDYIMVMVANKKSQDQMTEDLSLFLGNNTIRFTVWLHGVLDKLRSVTTEPSSLKSSDTNIFDSNVPSNKSNFSRGDERRHEAAVPPLAIPSARPEKRDSRVSTSSQESKTTNVRQTYDDGAATRLMSTVKPLREPAPSEDVIDIKPEPDDLIDEDLNFVQENPLSQKKPTVTLTYGSSRPSIEIYRPPASRNADSGVHLNRLQFQQQQNSIHAAKQLDMQSSWVYETGRLCEPEVLNSLEETYSPFFRNNSEKMSMEDENFRKRKLPVVSSVVKVKKFNHDGEEEEEDDDYGSRTGSISSSVSVPAKPERRPSLPPSKQANKNLILKAISEAQESVTKTTNYSTVPQKQTLPVAPRTRTSQEELLAEVVQGQSRTPRISPPIKEEETKGDSVEKNQGTQQRQLLSRLQIDPVMAETLQMSQDTRSFILKKPKLSEEVVVAPNQESGMKTADSLRVLSGHLMQTRDLVQPDKPASPKFIVTLDGVPSPPGYMSDQEEDMCFEGMKPVNQTAASNKGLRGLLHPQQLHLLSRQLEDPNGSFSNAEMSELSVAQKPEKLLERCKYWPACKNGDECAYHHPISPCKAFPNCKFAEKCLFVHPNCKYDAKCTKPDCPFTHVSRRIPVLSPKPAVAPPAPPSSSQLCRYFPACKKMECPFYHPKHCRFNTQCTRPDCTFYHPTINVPPRHALKWIRPQTSE

SEQ ID NO: 877353 - protein, 283 aa, Homo sapiens
MAETLQMSQDTRSFILKKPKLSEEVVVAPNQESGMKTADSLRVLSGHLMQTRDLVQPDKPASPKFIVTLDGVPSPPGYMSDQEEDMCFEGMKPVNQTAASNKGLRGLLHPQQLHLLSRQLEDPNGSFSNAEMSELSVAQKPEKLLERCKYWPACKNGDECAYHHPISPCKAFPNCKFAEKCLFVHPNCKYDAKCTKPDCPFTHVSRRIPVLSPKPAVAPPAPPSSSQLCRYFPACKKMECPFYHPKHCRFNTQCTRPDCTFYHPTINVPPRHALKWIRPQTSE

SEQ ID NO: 877354 - protein, 380 aa, Homo sapiens
RGSPTDSGSATKTTNYSTVPQKQTLPVAPRTRTSQEELLAEVVQGQSRTPRISPPIKEEETKGDSVEKNQGTQQRQLLSRLQIDPVMAETLQMSQDYYDMESMVHADTRSFILKKPKLSEEVVVAPNQESGMKTADSLRVLSGHLMQTRDLVQPDKPASPKFIVTLDGVPSPPGYMSDQEEDMCFEGMKPVNQTAASNKGLRGLLHPQQLHLLSRQLEDPNGSFSNAEMSELSVAQKPEKLLERCKYWPACKNGDECAYHHPISPCKAFPNCKFAEKCLFVHPNCKYDAKCTKPDCPFTHVSRRIPVLSPKPAVAPPAPPSSSQLCRYFPACKKMECPFYHPKHCRFNTQCTRPDCTFYHPTINVPPRHALKWIRPQTSE

SEQ ID NO: 877355 - protein, 580 aa, Homo sapiens; identical to SEQ ID NO: 877337

SEQ ID NO: 877356 - protein, 725 aa, Homo sapiens; identical to SEQ ID NO: 877349

SEQ ID NO: 877357 - protein, 35 aa, Homo sapiens
KQFVVGRYVRRGVYSWKKAHKIYPEPRCLSKTNQH

SEQ ID NO: 877358 - protein, 82 aa, Homo sapiens
RAWQQRLIAARQQLHRELIWTAVRPPGLPHAPRDCHGQEGRKQKMQLTIQTPCLVLPRTGCAPDSGFSRIRMSLLGSRVTGP

SEQ ID NO: 877359 - protein, 69 aa, Homo sapiens
AGIALNNHCVKLISWYENEFGYSNRVGTSWPTSPPRSKTPEPPAPVTAQEEKRGPHCWGVPATLSPLPQ

SEQ ID NO: 877360 - protein, 90 aa, Homo sapiens
HPAPGLKVSATFIGNSTAIQELFKRISEQFTAMFRRKAFLHWYTGEGMDEMEFTEAESNMNDLVSEYQQYQDATAEEEGEFEEEAEEEVA

SEQ ID NO: 877361 - protein, 90 aa, Homo sapiens; identical to SEQ ID NO: 877360

SEQ ID NO: 877362 - protein, 791 aa, Homo sapiens
SRDERKKDDRSRKRDYDRNPPRRDSYRDRYNRRRGRSRSYSRSRSRSWSKERLRERDRDRSRTRSRSRTRSRERDLVKPKYDLDRTDPLENNYTPVSSVPSISSGHYPVPTLSSTITVIAPTHHGNNTTESWSEFHEDQVDHNSYVRPPMPKKRCRDYDEKGFCMRGDMCPFDHGSDPVVVEDVNLPGMLPFPAQPPVVEGPPPPGLPPPPPILTPPPVNLRPPVPPPGPLPPSLPPVTDDISYSLVLTGPPPTSRPMYRHRVHAQRPNLIGLTSGDMDLPPREKPPNKSSMRIVVDSESRKRTIGSGEPGVPTKKTWFDKPNFNRTNSPGFQKKVQFGNENTKLELRKVPPELNNISKLNEHFSRFGTLVNLQVAYNGDPEGALIQFATYEEAKKAISSTEAVLNNRFIKVYWHREGSTQQLQTTSPKPLVQQPILPVVKQSVKERLGPVPSSTIEPAEAQSASSDLPQVLSTSTGLTKTVYNPAALKAAQKTLLVSTSAVDNNEAQKKKQEALKLQQDVRKRKQEILEKHIETQKMLISKLEKNKTMKSEDKAEIMKTLEVLTKNITKLKDEVKAASPGRCLPKSIKTKTQMQKELLDTELDLYKKMQAGEEVTELRRKYTELQLEAAKRGILSSGRGRGIHSRGRGAVHGRGRGRGRGRGVPGHAVVDHRPRALEISAFTESDREDLLPHFAQYGEIEDCQIDDSSLHAVITFKTRAEAEAAAVHGARFKGQDLKLAWNKPVTNISAVETEEVEPDEEEFQEESLVDDSLLQDDDEEEEDNESRSWRR

SEQ ID NO: 877363 - protein, 867 aa, Homo sapiens
SRDERKKDDRSRKRDYDRNPPRRDSYRDRYNRRRGRSRSYSRSRSRSWSKERLRERDRDRSRTRSRSRTRSRERDLVKPKYDLDRTDPLENNYTPVSSVPSISSGHYPVPTLSSTITVIAPTHHGNNTTESWSEFHEDQVDHNSYVRPPMPKKRCRDYDEKGFCMRGDMCPFDHGSDPVVVEDVNLPGMLPFPAQPPVVEGPPPPGLPPPPPILTPPPVNLRPPVPPPGPLPPSLPPVTGPPPPLPPLQPSGMDAPPNSATSSVPTVVTTGIHHQPPPAPPSLFTADPDTYDTDGYNPEAPSITNTSRPMYRHRVHAQRPNLIGLTSGDMDLPPREKPPNKSSMRIVVDSESRKRTIGSGEPGVPTKKTWFDKPNFNRTNSPGFQKKVQFGNENTKLELRKVPPELNNISKLNEHFSRFGTLVNLQVAYNGDPEGALIQFATYEEAKKAISSTEAVLNNRFIKVYWHREGSTQQLQTTSPKPLVQQPILPVVKQSVKERLGPVPSSTIEPAEAQSASSDLPQNVTKLSVKDRLGFVSKPSVSATEKVLSTSTGLTKTVYNPAALKAAQKTLLVSTSAVDNNEAQKKKQEALKLQQDVRKRKQEILEKHIETQKMLISKLEKNKTMKSEDKAEIMKTLEVLTKNITKLKDEVKAASPGRCLPKSIKTKTQMQKELLDTELDLYKKMQAGEEVTELRRKYTELQLEAAKRGILSSGRGRGIHSRGRGAVHGRGRGRGRGRGVPGHAVVDHRPRALEISAFTESDREDLLPHFAQYGEIEDCQIDDSSLHAVITFKTRAEAEAAAVHGARFKGQDLKLAWNKPVTNISAVETEEVEPDEEEFQEESLVDDSLLQDDDEEEEDNESRSWRR

SEQ ID NO: 877364 - protein, 843 aa, Homo sapiens
SRDERKKDDRSRKRDYDRNPPRRDSYRDRYNRRRGRSRSYSRSRSRSWSKERLRERDRDRSRTRSRSRTRSRERDLVKPKYDLDRTDPLENNYTPVSSVPSISSGHYPVPTLSSTITVIAPTHHGNNTTESWSEFHEDQVDHNSYVRPPMPKKRCRDYDEKGFCMRGDMCPFDHGSDPVVVEDVNLPGMLPFPAQPPVVEGPPPPGLPPPPPILTPPPVNLRPPVPPPGPLPPSLPPVTGPPPPLPPLQPSGMDAPPNSATSSVPTVVTTGIHHQPPPAPPSLFTADPDTYDTDGYNPEAPSITNTSRPMYRHRVHAQRPNLIGLTSGDMDLPPREKPPNKSSMRIVVDSESRKRTIGSGEPGVPTKKTWFDKPNFNRTNSPGFQKKVQFGNENTKLELRKVPPELNNISKLNEHFSRFGTLVNLQVAYNGDPEGALIQFATYEEAKKAISSTEAVLNNRFIKVYWHREGSTQQLQTTSPKPLVQQPILPVVKQSVKERLGPVPSSTIEPAEAQSASSDLPQVLSTSTGLTKTVYNPAALKAAQKTLLVSTSAVDNNEAQKKKQEALKLQQDVRKRKQEILEKHIETQKMLISKLEKNKTMKSEDKAEIMKTLEVLTKNITKLKDEVKAASPGRCLPKSIKTKTQMQKELLDTELDLYKKMQAGEEVTELRRKYTELQLEAAKRGILSSGRGRGIHSRGRGAVHGRGRGRGRGRGVPGHAVVDHRPRALEISAFTESDREDLLPHFAQYGEIEDCQIDDSSLHAVITFKTRAEAEAAAVHGARFKGQDLKLAWNKPVTNISAVETEEVEPDEEEFQEESLVDDSLLQDDDEEEEDNESRSWRR

SEQ ID NO: 877365 - protein, 814 aa, Homo sapiens
SRDERKKDDRSRKRDYDRNPPRRDSYRDRYNRRRGRSRSYSRSRSRSWSKERLRERDRDRSRTRSRSRTRSRERDLVKPKYDLDRTDPLENNYTPVSSVPSISSGHYPVPTLSSTITVIAPTHHGNNTTESWSEFHEDQVDHNSYVRPPMPKKRCRDYDEKGFCMRGDMCPFDHGSDPVVVEDVNLPGMLPFPAQPPVVEGPPPPGLPPPPPILTPPPVNLRPPVPPPGPLPPSLPPVTGPPPPLPPLQPSGMDAPPNSATSSVPTVVTTGIHHQPPPAPPSLFTADPDTYDTDGYNPEAPSITNTSRPMYRHRVHAQRPNLIGLTSGDMDLPPREKPPNKSSMRIVVDSESRKRTIGSGEPGVPTKKTWFDKPNFNRTNSPGFQKKVQFGNENTKLELRKVPPELNNISKLNEHFSRFGTLVNLQVAYNGDPEGALIQFATYEEAKKAISSTEAVLNNRFIKVYWHREGSTQQLQTTSPKPLVQQPILPVVKQSVKERLGPVPSSTIEPAEAQSASSDLPQVLSTSTGLTKTVYNPAALKAAQKTLLVSTSAVDNNEAQKKKQEALKLQQDVRKRKQEILEKHIETQKMLISKLEKNKTMKSEDKAEIMKTLEVLTKNITKLKDEVKAASPGRCLPKSIKTKTQMQKELLDTELDLYKKMQAGEEVTELRRKYTELQLEAAKRGILSSGRGRGIHSRGRGAVHGRGRGRGRGRGVPGHAVVDHRPRALEISAFTESDREDLLPHFAAAVHGARFKGQDLKLAWNKPVTNISAVETEEVEPDEEEFQEESLVDDSLLQDDDEEEEDNESRSWRR

SEQ ID NO: 877366 - protein, 688 aa, Homo sapiens
SRDERKKDDRSRKRDYDRNPPRRDSYRDRYNRRRGRSRSYSRSRSRSWSKERLRERDRDRSRTRSRSRTRSRERDLVKPKYDLDRTDPLENNYTPVSSVPSISSGHYPVPTLSSTITVIAPTHHGNNTTESWSEFHEDQVDHNSYVRPPMPKKRCRDYDEKGFCMRGDMCPFDHGSDPVVVEDVNLPGMLPFPAQPPVVEGPPPPGLPPPPPILTPPPVNLRPPVPPPGPLPPSLPPVTGPPPPLPPLQPSGMDAPPNSATSSVPTVVTTGIHHQPPPAPPSLFTADPDTYDTDGYNPEAPSITNTSRPMYRHRVHAQRPNLIGLTSGDMDLPPREKPPNKSSMRIVVDSESRKRTIGSGEPGVPTKKTWFDKPNFNRTNSPGFQKKVQFGNENTKLELRKVPPELNNISKLNEHFSRFGTLVNLQVAYNGDPEGALIQFATYEEAKKAISSTEAVLNNRFIKVYWHREGSTQQLQTTSPKPLVQQPILPVVKQSVKERLGPVPSSTIEPAEAQSASSDLPQVLSTSTGLTKTVYNPAALKAAQKTLLVSTSAVDNNEAQKKKQEALKLQQDVRKRKQEILEKHIETQKMLISKLEKNKTMKSEDKAEIMKTLEVLTKNITKLKDEVKAASPGRCLPKSIKTKTQMQKELLDTELDLYKKMQAGEEVTELRRKYTELQLEAHKRGILS

SEQ ID NO: 877367 - protein, 791 aa, Homo sapiens; identical to SEQ ID NO: 877362

SEQ ID NO: 877368 - protein, 843 aa, Homo sapiens; identical to SEQ ID NO: 877364

SEQ ID NO: 877369 - protein, 254 aa, Homo sapiens
MLISKLEKNKTMKSEDKAEIMKTLEVLTKNITKLKDEVKAASPGRCLPKSIKTKTQMQKELLDTELDLYKKMQAGEEVTELRRKYTELQLEAAKRGILSSGRGRGIHSRGRGAVHGRGRGRGRGRGVPGHAVVDHRPRALEISAFTESDREDLLPHFAQYGEIEDCQIDDSSLHAVITFKTRAEAEAAAVHGARFKGQDLKLAWNKPVTNISAVETEEVEPDEEEFQEESLVDDSLLQDDDEEEEDNESRSWRR

SEQ ID NO: 877370 - protein, 821 aa, Homo sapiens
SRDERKKDDRSRKRDYDRNPPRRDSYRDRYNRRRGRSRSYSRSRSRSWSKERLRERDRDRSRTRSRSRTRSRERDLVKPKYDLDRTDPLENNYTPVSSVPSISSGHYPVPTLSSTITVIAPTHHGNNTTESWSEFHEDQVDHNSYVRPPMPKKRCRDYDEKGFCMRGDMCPFDHGSDPVVVEDVNLPGMLPFPAQPPVVEGPPPPGLPPPPPILTPPPVNLRPPVPPPGPLPPSLPPVTGPPPPLPPLQPSGMDAPPNSATSSVPTVVTTGIHHQPPPAPPSLFTADPDTYDTDGYNPEAPSITNTSRPMYRHRVHAQRPNLIGLTSGDMDLPPREKPPNKSSMRIVVDSESRKRTIGSGEPGVPTKKTWFDKPNFNRTNSPGFQKKVQFGNENTKLELRKVPPELNNISKLNEHFSRFGTLVNLQVAYNGDPEGALIQFATYEEAKKAISSTEAVLNNRFIKVYWHREGSTQQLQTTSPKPLVQQPILPVVKQSVKERLGPVPSSTIEPAEAQSASSDLPQVLSTSTGLTKTVYNPAALKAAQKTLLVSTSAVDNNEAQKKKQEALKLQQDVRKRKQEILEKHIETQKMLISKLEKNKTMKSEDKAEIMKTLEVLTKNITKLKDEVKAASPGRCLPKSIKTKTQMQKELLDTELDLYKKMQAGEEVTELRRKYTELQLEAAKRGILSSGRGRGIHSRGRGAVHGRGRGRGRGRGVPGHAVVDHRPRALEISAFTESDREDLLPHFAQYGEIEDCQIDDSSLHAVITFKTRAEAEAAAVHGARFKGQDLKLAWNKPVTNISAVETEEVEPDEEEQREIIIA

SEQ ID NO: 877371 - protein, 135 aa, Homo sapiens
MQEPEFGASHSYLSMAVGPPVACKQAVMEHVLAVFRHHAWRLAHILFFHPHHSIGHAPAFHCPFAKDILNTTTPKESCVSVLYVIKEKPPLSAERSHGYPHHPAPMKPENQLAQQGRPQSQERPKSKLQRASRSP

SEQ ID NO: 877372 - protein, 125 aa, Homo sapiens
CGWARARRSEEEPGAQTESARSLGGRSPRKIDQFCNSRNMVHGSVTFRDVAIDFSQEEWECLQPDQRTLYRDVMLENYSHLISLGSSISKPDVITLLEQEKEPWIVIWSQNMDLRKYLQKMIFLK

SEQ ID NO: 877373 - protein, 260 aa, Homo sapiens
GRRGHRPLGAGQRRAAGAQRTAWLGERTAMAPWLQLCSVFFTVNACLNGSQLAVAAGGSGRARGADTCGWREGEGGGFLAVANSRGTQRAQVLAGRRARANLSALRGVRGRPGSHSSRASSWFPSPDACPPALAEMKAAARPRLCVANEGVGPASRNSGLYNITFKYDNCTTYLNPVGKHVIADAQNITISQYACHDQVAVTILWSPGALGIEFLKGFRVILEELKSEGRQCQQLILKDPKQLNSSFKRTVSHTGERAPE

SEQ ID NO: 877374 - protein, 142 aa, Homo sapiens
MGAEVNQMTATSHHEEWLKVCLDYRQSWPWQGVGPASRNSGLYNITFKYDNCTTYLNPVGKHVIADAQNITISQYACHDQVAVTILWSPGALGIEFLKGFRVILEELKSEGRQCQQLILKDPKQLNSSFKRTVSHTGERAPE

SEQ ID NO: 877375 - protein, 415 aa, Homo sapiens
LHPCSWDTVPSGSNRPGVGGATGSAPWPWLPLLPGAARGEGDRWGRQVENWASELMAKAPSWAGVGALAYKAPEALWPAEAVMDGTMEDSEAVQRATALIEQRLAQEEENEKLRGDTRQKLPMDLLVLEDEKHHGAQSAALQKVKGQERVRKTSLDLRREIIDVGGIQNLIELRKKRKQKKRDALAASHEPPPEPEEITGPVDEETFLKAAVEGKMKVIEKFLADGGSADTCDQFRRTALHRASLEGHMEILEKLLDNGATVDFQDRLDCTAMHWACRGGHLEVVKLLQSHGADTNVRDKLLSTPLHVAVRTGQVEIVEHFLSLGLEINARDREGDTALHDAVRLNRYKIIKLLLLHGADMMTKNLAGKTPTDLVQLWQADTRHALEHPEPGAEHNGLEGPNDSGRETPQPVPAQ

SEQ ID NO: 877376 - protein, 125 aa, Homo sapiens
SLPPWSHALLCVEENSGRSVAPYWHFQCHPPPGMHFLRQNLSMKKHVLLSAEGSVLESGVRGPSRLPRMAGDSAVGLCPVASAVGTQGAAGVPSQRHPLDAHRAAASAECQLLHTVQLDLSDFLS

SEQ ID NO: 877377 - protein, 106 aa, Homo sapiens
TSSFWSLPAKKYRKVAGKEIYSDTLESTPMLEKEKFPQDYFPETQLPTGNEHRGSPGQMASPREEADMFGIRDKCLVQHAGSLPPRHPAIELPGSSGHGPMQQPDQ

SEQ ID NO: 877378 - protein, 68 aa, Homo sapiens
  misc_feature (23)..(23): Xaa can be any naturally occurring amino acid
CMFYYFTLEHSSSAPPHHPVSNXLPLQVTAVRCGICSWWKHRSVSLLWLPLSAVQHGVRPAGFSCWSF

SEQ ID NO: 877379 - protein, 422 aa, Homo sapiens
MAGKAAAPGTAVLLVTANVGSLFDDPENLQKNWLREFYQVVHTHKPHFMALHCQEFGGKNYEASMSHVDKFVKELLSSDAMKEYNRARVYLDENYKSQEHFTALGSFYFLHESLKNIYQFDFKAKKYRKVAGKEIYSDTLESTPMLEKEKFPQDYFPECKWSRKGFIRTRWCIADCAFDLVNIHLFHDASNLVAWETSPSVYSGIRHKALGYVLDRIIDQRFEKVSYFVFGDFNFRLDSKSVVETLCTKATMQTVRAADTNEVVKLIFRESDNDRKVMLQLEKKLFDYFNQEVFRDNNGTALLEFDKELSVFKDRLYELDISFPPSYPYSEDARQGEQYMNTRCPAWCDRILMSPSAKELVLRSESEEKVVTYDHIGPNVCMGDHKPVFLAFRIMPGAGKRCQRHERTLREPPCSRGPNTHS

SEQ ID NO: 877380 - protein, 412 aa, Homo sapiens
MAGKAAAPGTAVLLVTANVGSLFDDPENLQKNWLREFYQVVHTHKPHFMALHCQEFGGKNYEASMSHVDKFVKELLSSDAMKEYNRARVYLDENYKSQEHFTALGSFYFLHESLKNIYQFDFKAKKYRKVAGKEIYSDTLESTPMLEKEKFPQDYFPECKWSRKGFIRTRWCIADCAFDLVNIHLFHDASNLVAWETSPSVYSGIRHKALGYVLDRIIDQRFEKVSYFVFGDFNFRLDSKSVVETLCTKATMQTVRAADTNEVVKLIFRESDNDRKVMLQLEKKLFDYFNQEVFRDNNGTALLEFDKELSVFKDRLYELDISFPPSYPYSEDARQGEQYMNTRCPAWCDRILMSPSAKELVLRSESEEKVVTYDHIGPNVCMGDHKPVFLAFRIMPGAGKPHAHVHKCCVVQ

SEQ ID NO: 877381 - protein, 107 aa, Homo sapiens
GRLDISFSLPSYPYSEDARQGEQYMNTRCPAWCDRILMSPSAKELVLRSESEEKVVTYDHIGPNVCMGDHKPVFLAFRIMPGAGKRCQRHERTLREPPCSRGPNTHS

SEQ ID NO: 877382 - protein, 105 aa, Homo sapiens
CAQGPSCLCWPSAPPSPVHGCPGETQGLGVQREAAACAVLSRVRRADTVLSSCCSPCSWPSESCPGQVNLMPMCTSVVSCSDVVVNMTPPSSSAFTQLFLVRLFL

SEQ ID NO: 877383 - protein, 221 aa, Homo sapiens
MAGKAAAPGTAVLLVTANVGSLFDDPENLQKNWLREFYQVVHTHKPHFMALHCQEFGGKNYEASMSHVDKFVKELLSSDAMKEYNRARVYLDENYKSQEHFTALGSFYFLHESLKNIYQFDFKAKKYRKVAGKEIYSDTLESTPMLEKEKFPQDYFPETQLPTGNEHRGSPGQMASPREEADMFGIRDKCLVQHAGSLPPRHPAIELPGSSGHGPMQQPDQ

SEQ ID NO: 877384 - protein, 412 aa, Homo sapiens; identical to SEQ ID NO: 877380

SEQ ID NO: 877385 - protein, 118 aa, Homo sapiens
MAGKAAAPGTAVLLVTANVGSLFDDPENLQKNWLREFYQVVHTHKPHFMALHCQEFGGKNYEASMSHVDKFVKELLSSDAMKEYNRARVYLDENYKSQEHFTGLIQMKKKNTTGGAAN

SEQ ID NO: 877386 - protein, 412 aa, Homo sapiens; identical to SEQ ID NO: 877380

SEQ ID NO: 877387 - protein, 412 aa, Homo sapiens; identical to SEQ ID NO: 877380

SEQ ID NO: 877388 - protein, 349 aa, Homo sapiens
MAGKAAAPGTAVLLVTANVGSLFDDPENLQKNWLREFYQALGSFYFLHESLKNIYQFDFKAKKYRKVAGKEIYSDTLESTPMLEKEKFPQDYFPECKWSRKGFIRTRWCIADCAFDLVNIHLFHDASNLVAWETSPSVYSGIRHKALGYVLDRIIDQRFEKVSYFVFGDFNFRLDSKSVVETLCTKATMQTVRAADTNEVVKLIFRESDNDRKVMLQLEKKLFDYFNQEVFRDNNGTALLEFDKELSVFKDRLYELDISFPPSYPYSEDARQGEQYMNTRCPAWCDRILMSPSAKELVLRSESEEKVVTYDHIGPNVCMGDHKPVFLAFRIMPGAGKPHAHVHKCCVVQ

SEQ ID NO: 877389 - protein, 317 aa, Homo sapiens
MAGKAAAPGTAVLLVTANVGSLFDDPENLQKNWLREFYQVVHTHKPHFMALHCQEFGGKNYEASMSHVDKFVKELLSSDAMKEYNRARVYLDENYKSQEHFTALGSFYFLHESLKNIYQFDFKAKKYRKVAGKEIYSDTLESTPMLEKEKFPQDYFPECKWSRKGFIRTRWCIADCAFDLVNIHLFHDASNLVAWETSPSVYSGIRHKALGYVLDRIIDQRFEKVSYFVFGDFNFRLDSKSVVETLCTKATMQTVRAADTNEVVKLIFRESDNDRKVMLQLEKKLFDYFNQEVFRDNNGTARQCLCRSGVSGGRDSS

SEQ ID NO: 877390 - protein, 197 aa, Homo sapiens
MAGKAAAPGTAVLLVTANVGSLFDDPENLQKNWLREFYQVVHTHKPHFMALHCQEFGGKNYEASMSHVDKFVKELLSSDAMKEYNRARVYLDENYKSQEHFTALGSFYFLHESLKNIYQFDFKAKKYRKVAGKEIYSDTLESTPMLEKEKFPPSAHKELLECRHSATPSMPTELQPLQSVSSFTLSNLISAIFCHNT

SEQ ID NO: 877391 - protein, 77 aa, Homo sapiens
MDGRVQLMKALLAGPLRPAARRWRNPIPFPETFDGDTDRLPEFIVQTCSYMFVDENTFSNDALKTYAGLQHMPVPEL

SEQ ID NO: 877392 - protein, 164 aa, Homo sapiens
GGARASAWALPHGSAHSPSRPGPPPSTCASGDALALTPTQPSETPRSARGTMDGRVQLMKALLAGPLRPAARRWRNPIPFPETFDGDTDRLPEFIVQTCSYMFVDENTFSNDALKVTFLITRLTGPALQWVIPYIRKESPLLNDYRGFLAEMKRVFGWEEDEDF

SEQ ID NO: 877393 - protein, 164 aa, Homo sapiens; identical to SEQ ID NO: 877392

SEQ ID NO: 877394 - protein, 103 aa, Homo sapiens
MSWYGMCCEASETPRSARGTMDGRVQLMKALLAGPLRPAARRWRNPIPFPETFDGDTDRLPEFIVQTCSYMFVDENTFSNDALKTYATTAIAIHRISPTDCGS

SEQ ID NO: 877395 - protein, 134 aa, Homo sapiens
GGARASAWALPHGSAHSPSRPGPPPSTCASGDALALTPTQPSETPRSARGTMDGRVQLMKALLAGPLRPAARRWRNPIPFPETFDGDTDRLPEFIVQTCSYMFVDENTFSNDALKTYATTAIAIHRISPTDCGS

SEQ ID NO: 877396 - protein, 164 aa, Homo sapiens; identical to SEQ ID NO: 877392

SEQ ID NO: 877397 - protein, 170 aa, Homo sapiens
GGARASAWALPHGSAHSPSRPGPPPSTCASGDALALTPTQPSETPRSARGTMDGRVQLMKALLAGPLRPAARRWRNPIPFPETFDGDTDRLPEFIVQTCSYMFVDENTFSNDALKVQAGLLLHTGQTTHSRCCQPTSTPPDCQPTTSFCPQTYATTAIAIHRISPTDCGS

SEQ ID NO: 877398 - protein, 308 aa, Homo sapiens
SAVTKVTAAYDRQQLWKANVGFVIQLQARLRGFLVRQKFAEHSHFLRTWLPAVIKIQAHWRGYRQRKIYLEWLQYFKANLDAIIKIQAWARMWAARRQYLRRLHYFQKNVNSIVKIQAFFRARKAQDDYRILVHAPHPPLSVVRRFAHLLNQSQQDFLAEAELLKLQEEVVRKIRSNQQLEQDLNIMDIKIGLLVKNRITLQEVVSHCKKLTKRNKEQLSDMMVLDKQKGLKSLSKEKRQKLEAYQHLFYLLQTQPIYLAKLIFQMPQNKTTKFMEAVIFSLYNYASSRREAYLLLQLFKTALQEEIK

SEQ ID NO: 877399 - protein, 77 aa, Homo sapiens
ALILDRMFCALGWPRLVVSPAPPPLQEVVSHCKKLTKRNKEQLSDMMVLDKQKGLKSLSKEKRQKLEAYQHLFYLLQ

SEQ ID NO: 877400 - protein, 455 aa, Homo sapiens
SAVTKVTAAYDRQQLWKANVGFVIQLQARLRGFLVRQKFAEHSHFLRTWLPAVIKIQAHWRGYRQRKIYLEWLQYFKANLDAIIKIQAWARMWAARRQYLRRLHYFQKNVNSIVKIQAFFRARKAQDDYRILVHAPHPPLSVVRRFAHLLNQSQQDFLAEAELLKLQEEVVRKIRSNQQLEQDLNIMDIKIGLLVKNRITLQEVVSHCKKLTKRNKEQLSDMMVLDKQKGLKSLSKEKRQKLEAYQHLFYLLQTQPIYLAKLIFQMPQNKTTKFMEAVIFSLYNYASSRREAYLLLQLFKTALQEEIKSKVEQPQDVVTGNPTVVRLVVRFYRNGRGQSALQEILGKVIQDVLEDKVLSVHTDPVHLYKNWINQTEAQTGQRSHLPYDVTPEQALSHPEVQRRLDIALRNLLAMTDKFLLAITSSVDQIPYVQQPHPSLRMGFQEGQATMGSRAG

SEQ ID NO: 877401 - protein, 95 aa, Homo sapiens
SFLVNDCSLIHNNVCMAAVFVDRAGEWKLGGLDYMYSAQGNGGGPPRKGIPELEQYDPPELADSSGRVVREKWWVTGGSAPQPALSWRPLQPQDS

SEQ ID NO: 877402 - protein, 1115 aa, Homo sapiens
MPEDQVGKLEATENTISAMAAAAAEQQQFYLLLGNLLSPDNVVRKQAEETYENIPGQSKITFLLQAIRNTTAAEEARQMAAVLLRRLLSSAFDEVYPALPSDVQTAIKSELLMIIQMETQSSMRKKVCDIAAELARNLIDEDGNNQWPEGLKFLFDSVSSQNVGLREAALHIFWNFPGIFGNQQQHYLDVIKRMLVQCMQDQEHPSIRTLSARATAAFILANEHNVALFKHFADLLPGFLQAVNDSCYQNDDSVLKSLVEIADTVPKYLRPHLEATLQLSLKLCGDTSLNNMQRQLALEVIVTLSETAAAMLRKHTNIVAQTIPQMLAMMVDLEEDEDWANADELEDDDFDSNAVAGESALDRMACGLGGKLVLPMIKEHIMQMLQNPDWKYRHAGLMALSAIGEGCHQQMEGILNEIVNFVLLFLQDPHPRVRYAACNAVGQMATDFAPGFQKKFHEKVIAALLQTMEDQGNQRVQAHAAAALINFTEDCPKSLLIPYLDNLVKHLHSIMVLKLQELIQKGTKLVLEQVVTSIASVADTAEEKFVPYYDLFMPSLKHIVENAVQKELRLLRGKTIECISLIGLAVGKEKFMQDASDVMQLLLKTQTDFNDMEDDDPQISYMISAWARMCKILGKEFQQYLPVVMGPLMKTASIKPEVALLDTQDMENMSDDDGWEFVNLGDQQSFGIKTAGLEEKSTACQMLVCYAKELKEGFVEYTEQVVKLMVPLLKFYFHDGVRVAAAESMPLLLECARVRGPEYLTQMWHFMCDALIKAIGTEPDSDVLSEIMHSFAKCIEVMGDGCLNNEHFEELGGILKAKLEEHFKNQELRQVKRQDEDYDEQVEESLQDEDDNDVYILTKVSDILHSIFSSYKEKVLPWFEQLLPLIVNLICPHRPWPDRQWGLCIFDDVIEHCSPASFKYAEYFLRPMLQYVCDNSPEVRQAAAYGLGVMAQYGGDNYRPFCTEALPLLVRVIQSADSKTKENVNATENCISAVGKIMKFKPDCVNVEEVLPHWLSWLPLHEDKEEAVQTFNYLCDLIESNHPIVLGPNNTNLPKIFSIIAEGEMHEAIKHEDPCAKRLANVVRQVQTSGGLWTECIAQLSPEQQAAIQELLNSA

SEQ ID NO: 877403 - protein, 1270 aa, Homo sapiens
VPISAAGLQGEQLLLKTQTDFNDMEDDDPQISYMISAWARMCKILGKEFQQYLPVVMGPLMKTASIKPEVALLDTQDMENMSDDDGWEFVNLGDQQSFGIKTAGLEEKSTACQMLVCYAKELKEGFVEYTEQVVKLMVPLLKFYFHDGVRVAAAGIHASSPVSPPSFSLTPSAMAAAAAEQQQFYLLLGNLLSPDNVVRKQAEETYENIPGQSKITFLLQAIRNTTAAEEARQMAAVLLRRLLSSAFDEVYPALPSDVQTAIKSELLMIIQMETQSSMRKKVCDIAAELARNLIDEDGNNQWPEGLKFLFDSVSSQNVGLREAALHIFWNFPGIFGNQQQHYLDVIKRMLVQCMQDQEHPSIRTLSARATAAFILANEHNVALFKHFADLLPGFLQAVNDSCYQNDDSVLKSLVEIADTVPKYLRPHLEATLQLSLKLCGDTSLNNMQRQLALEVIVTLSETAAAMLRKHTNIVAQTIPQMLAMMVDLEEDEDWANADELEDDDFDSNAVAGESALDRMACGLGGKLVLPMIKEHIMQMLQNPDWKYRHAGLMALSAIGEGCHQQMEGILNEIVNFVLLFLQDPHPRVRYAACNAVGQMATDFAPGFQKKFHEKVIAALLQTMEDQGNQRVQAHAAAALINFTEDCPKSLLIPYLDNLVKHLHSIMVLKLQELIQKGTKLVLEQVVTSIASVADTAEEKFVPYYDLFMPSLKHIVENAVQKELRLLRGKTIECISLIGLAVGKEKFMQDASDVMQLLLKTQTDFNDMEDDDPQISYMISAWARMCKILGKEFQQYLPVVMGPLMKTASIKPEVALLDTQDMENMSDDDGWEFVNLGDQQSFGIKTAGLEEKSTACQMLVCYAKELKEGFVEYTEQVVKLMVPLLKFYFHDGVRVAAAESMPLLLECARVRGPEYLTQMWHFMCDALIKAIGTEPDSDVLSEIMHSFAKCIEVMGDGCLNNEHFEELGGILKAKLEEHFKNQELRQVKRQDEDYDEQVEESLQDEDDNDVYILTKVSDILHSIFSSYKEKVLPWFEQLLPLIVNLICPHRPWPDRQWGLCIFDDVIEHCSPASFKYAEYFLRPMLQYVCDNSPEVRQAAAYGLGVMAQYGGDNYRPFCTEALPLLVRVIQSADSKTKENVNATENCISAVGKIMKFKPDCVNVEEVLPHWLSWLPLHEDKEEAVQTFNYLCDLIESNHPIVLGPNNTNLPKIFSIIAEGEMHEAIKHEDPCAKRLANVVRQVQTSGGLWTECIAQLSPEQQAAIQELLNSA

SEQ ID NO: 877404 - protein, 1115 aa, Homo sapiens; identical to SEQ ID NO: 877402

SEQ ID NO: 877405 - protein, 1115 aa, Homo sapiens; identical to SEQ ID NO: 877402

SEQ ID NO: 877406 - protein, 1097 aa, Homo sapiens
MAAAAAEQQQFYLLLGNLLSPDNVVRKQAEETYENIPGQSKITFLLQAIRNTTAAEEARQMAAVLLRRLLSSAFDEVYPALPSDVQTAIKSELLMIIQMETQSSMRKKVCDIAAELARNLIDEDGNNQWPEGLKFLFDSVSSQNVGLREAALHIFWNFPGIFGNQQQHYLDVIKRMLVQCMQDQEHPSIRTLSARATAAFILANEHNVALFKHFADLLPGFLQAVNDSCYQNDDSVLKSLVEIADTVPKYLRPHLEATLQLSLKLCGDTSLNNMQRQLALEVIVTLSETAAAMLRKHTNIVAQTIPQMLAMMVDLEEDEDWANADELEDDDFDSNAVAGESALDRMACGLGGKLVLPMIKEHIMQMLQNPDWKYRHAGLMALSAIGEGCHQQMEGILNEIVNFVLLFLQDPHPRVRYAACNAVGQMATDFAPGFQKKFHEKVIAALLQTMEDQGNQRVQAHAAAALINFTEDCPKSLLIPYLDNLVKHLHSIMVLKLQELIQKGTKLVLEQVVTSIASVADTAEEKFVPYYDLFMPSLKHIVENAVQKELRLLRGKTIECISLIGLAVGKEKFMQDASDVMQLLLKTQTDFNDMEDDDPQISYMISAWARMCKILGKEFQQYLPVVMGPLMKTASIKPEVALLDTQDMENMSDDDGWEFVNLGDQQSFGIKTAGLEEKSTACQMLVCYAKELKEGFVEYTEQVVKLMVPLLKFYFHDGVRVAAAESMPLLLECARVRGPEYLTQMWHFMCDALIKAIGTEPDSDVLSEIMHSFAKCIEVMGDGCLNNEHFEELGGILKAKLEEHFKNQELRQVKRQDEDYDEQVEESLQDEDDNDVYILTKVSDILHSIFSSYKEKVLPWFEQLLPLIVNLICPHRPWPDRQWGLCIFDDVIEHCSPASFKYAEYFLRPMLQYVCDNSPEVRQAAAYGLGVMAQYGGDNYRPFCTEALPLLVRVIQSADSKTKENVNATENCISAVGKIMKFKPDCVNVEEVLPHWLSWLPLHEDKEEAVQTFNYLCDLIESNHPIVLGPNNTNLPKIFSIIAEGEMHEAIKHEDPCAKRLANVVRQVQTSGGLWTECIAQLSPEQQAAIQELLNSA

SEQ ID NO: 877407 - protein, 1270 aa, Homo sapiens; identical to SEQ ID NO: 877403

SEQ ID NO: 877408 - protein, 1270 aa, Homo sapiens; identical to SEQ ID NO: 877403

SEQ ID NO: 877409 - protein, 742 aa, Homo sapiens
VGDRGLWVDRGLWVDRGLWVDRGLWVDRGIGEGCHQQMEGILNEIVNFVLLFLQDPHPRVRYAACNAVGQMATDFAPGFQKKFHEKVIAALLQTMEDQGNQRVQAHAAAALINFTEDCPKSLLIPYLDNLVKHLHSIMVLKLQELIQKGTKLVLEQVVTSIASVADTAEEKFVPYYDLFMPSLKHIVENAVQKELRLLRGKTIECISLIGLAVGKEKFMQDASDVMQLLLKTQTDFNDMEDDDPQISYMISAWARMCKILGKEFQQYLPVVMGPLMKTASIKPEVALLDTQDMENMSDDDGWEFVNLGDQQSFGIKTAGLEEKSTACQMLVCYAKELKEGFVEYTEQVVKLMVPLLKFYFHDGVRVAAAESMPLLLECARVRGPEYLTQMWHFMCDALIKAIGTEPDSDVLSEIMHSFAKCIEVMGDGCLNNEHFEELGGILKAKLEEHFKNQELRQVKRQDEDYDEQVEESLQDEDDNDVYILTKVSDILHSIFSSYKEKVLPWFEQLLPLIVNLICPHRPWPDRQWGLCIFDDVIEHCSPASFKYAEYFLRPMLQYVCDNSPEVRQAAAYGLGVMAQYGGDNYRPFCTEALPLLVRVIQSADSKTKENVNATENCISAVGKIMKFKPDCVNVEEVLPHWLSWLPLHEDKEEAVQTFNYLCDLIESNHPIVLGPNNTNLPKIFSIIAEGEMHEAIKHEDPCAKRLANVVRQVQTSGGLWTECIAQLSPEQQAAIQELLNSA

SEQ ID NO: 877410 - protein, 536 aa, Homo sapiens
KHKTRARYEARVNSAEADVMQLLLKTQTDFNDMEDDDPQISYMISAWARMCKILGKEFQQYLPVVMGPLMKTASIKPEVALLDTQDMENMSDDDGWEFVNLGDQQSFGIKTAGLEEKSTACQMLVCYAKELKEGFVEYTEQVVKLMVPLLKFYFHDGVRVAAAESMPLLLECARVRGPEYLTQMWHFMCDALIKAIGTEPDSDVLSEIMHSFAKCIEVMGDGCLNNEHFEELGGILKAKLEEHFKNQELRQVKRQDEDYDEQVEESLQDEDDNDVYILTKVSDILHSIFSSYKEKVLPWFEQLLPLIVNLICPHRPWPDRQWGLCIFDDVIEHCSPASFKYAEYFLRPMLQYVCDNSPEVRQAAAYGLGVMAQYGGDNYRPFCTEALPLLVRVIQSADSKTKENVNATENCISAVGKIMKFKPDCVNVEEVLPHWLSWLPLHEDKEEAVQTFNYLCDLIESNHPIVLGPNNTNLPKIFSIIAEGEMHEAIKHEDPCAKRLANVVRQVQTSGGLWTECIAQLSPEQQAAIQELLNSA

SEQ ID NO: 877411 - protein, 490 aa, Homo sapiens
  misc_feature (6)..(6): Xaa can be any naturally occurring amino acid
  misc_feature (13)..(13): Xaa can be any naturally occurring amino acid
YGAPRXRRDGAAXGAARARQAGHARSAAGAQRDGSYARVPANQTGHRRCDGGPGPGDQQSFGIKTAGLEEKSTACQMLVCYAKELKEGFVEYTEQVVKLMVPLLKFYFHDGVRVAAAESMPLLLECARVRGPEYLTQMWHFMCDALIKAIGTEPDSDVLSEIMHSFAKCIEVMGDGCLNNEHFEELGGILKAKLEEHFKNQELRQVKRQDEDYDEQVEESLQDEDDNDVYILTKVSDILHSIFSSYKEKVLPWFEQLLPLIVNLICPHRPWPDRQWGLCIFDDVIEHCSPASFKYAEYFLRPMLQYVCDNSPEVRQAAAYGLGVMAQYGGDNYRPFCTEALPLLVRVIQSADSKTKENVNATENCISAVGKIMKFKPDCVNVEEVLPHWLSWLPLHEDKEEAVQTFNYLCDLIESNHPIVLGPNNTNLPKIFSIIAEGEMHEAIKHEDPCAKRLANVVRQVQTSGGLWTECIAQLSPEQQAAIQELLNSA

SEQ ID NO: 877412 - protein, 1046 aa, Homo sapiens
VPISAAGLQGEQLLLKTQTDFNDMEDDDPQISYMISAWARMCKILGKEFQQYLPVVMGPLMKTASIKPEVALLDTQDMENMSDDDGWEFVNLGDQQSFGIKTAGLEEKSTACQMLVCYAKELKEGFVEYTEQVVKLMVPLLKFYFHDGVRVAAAGIHASSPVSPPSFSLTPSAMAAAAAEQQQFYLLLGNLLSPDNVVRKQAEETYENIPGQSKITFLLQAIRNTTAAEEARQMAAVLLRRLLSSAFDEVYPALPSDVQTAIKSELLMIIQMETQSSMRKKVCDIAAELARNLIDEDGNNQWPEGLKFLFDSVSSQNVGLREAALHIFWNFPGIFGNQQQHYLDVIKRMLVQCMQDQEHPSIRTLSARATAAFILANEHNVALFKHFADLLPGFLQAVNDSCYQNDDSVLKSLVEIADTVPKYLRPHLEATLQLSLKLCGDTSLNNMQRQLALEVIVTLSETAAAMLRKHTNIVAQTIPQMLAMMVDLEEDEDWANADELEDDDFDSNAVAGESALDRMACGLGGKLVLPMIKEHIMQMLQNPDWKYRHAGLMALSAIGEGCHQQMEGILNEIVNFVLLFLQDPHPRVRYAACNAVGQMATDFAPGFQKKFHEKVIAALLQTMEDQGNQRVQAHAAAALINFTEDCPKSLLIPYLDNLVKHLHSIMVLKLQELIQKGTKLVLEQVVTSIASVADTAEEKFVPYYDLFMPSLKHIVENAVQKELRLLRGKTIECISLIGLAVGKEKFMQDASDVMQLLLKTQTDFNDMEDDDPQISYMISAWARMCKILGKEFQQYLPVVMGPLMKTASIKPEVALLDTQDMENMSDDDGWEFVNLGDQQSFGIKTAGLEEKSTACQMLVCYAKELKEGFVEYTEQVVKLMVPLLKFYFHDGVRVAAAESMPLLLECARVRGPEYLTQMWHFMCDALIKAIGTEPDSDVLSEIMHSFAKCIEVMGDGCLNNEHFEELGGILKAKLEEHFKNQELRQVKRQDEDYDEQVEESLQDEDDNDVYILTKVSDILHSIFSSYKEKVLPWFEQLLPLIVNLIR

SEQ ID NO: 877413 - protein, 1270 aa, Homo sapiens; identical to SEQ ID NO: 877403

SEQ ID NO: 877414 - protein, 166 aa, Homo sapiens
MAQYGGDNYRPFCTEALPLLVRVIQSADSKTKENVNATENCISAVGKIMKFKPDCVNVEEVLPHWLSWLPLHEDKEEAVQTFNYLCDLIESNHPIVLGPNNTNLPKIFSIIAEGEMHEAIKHEDPCAKRLANVVRQVQTSGGLWTECIAQLSPEQQAAIQELLNSA

SEQ ID NO: 877415 - protein, 1260 aa, Homo sapiens
VPISAAGLQGEQLLLKTQTDFNDMEDDDPQISYMISAWARMCKILGKEFQQYLPVVMGPLMKTASIKPEVALLDTQDMENMSDDDGWEFVNLGDQQSFGIKTAGLEEKSTACQMLVCYAKELKEGFVEYTEQVVKLMVPLLKFYFHDGVRVAAAGIHASSPVSPPSFSLTPSAMAAAAAEQQQFYLLLGNLLSPDNVVRKQAEETYENIPGQSKITFLLQAIRNTTAAEEARQMAAVLLRRLLSSAFDEVYPALPSDVQTAIKSELLMIIQMETQSSMRKKVCDIAAELARNLIDEDGNNQWPEGLKFLFDSVSSQNVGLREAALHIFWNFPGIFGNQQQHYLDVIKRMLVQCMQDQEHPSIRTLSARATAAFILANEHNVALFKHFADLLPGFLQAVNDSCYQNDDSVLKSLVEIADTVPKYLRPHLEATLQLSLKLCGDTSLNNMQRQLALEVIVTLSETAAAMLRKHTNIVAQTIPQMLAMMVDLEEDEDWANADELEDDDFDSNAVAGESALDRMACGLGGKLVLPMIKEHIMQMLQNPDWKYRHAGLMALSAIGEGCHQQMEGILNEIVNFVLLFLQDPHPRVRYAACNAVGQMATDFAPGFQKKFHEKVIAALLQTMEDQGNQRVQAHAAAALINFTEDCPKSLLIPYLDNLVKHLHSIMVLKLQELIQKGTKLVLEQVVTSIASVADTAEEKFVPYYDLFMPSLKHIVENAVQKELRLLRGKTIECISLIGLAVGKEKFMQDASDVMQLLLKTQTDFNDMEDDDPQISYMISAWARMCKILGKEFQQYLPVVMGPLMKTASIKPEVALLDTQDMENMSDDDGWEFVNLGDQQSFGIKTAGLEEKSTACQMLVCYAKELKEGFVEYTEQVVKLMVPLLKFYFHDGVRVAAAESMPLLLECARVRGPEYLTQMWHFMCDALIKAIGTEPDSDVLSEIMHSFAKCIEVMGDGCLNNEHFEELGGILKAKLEEHFKNQELRQVKRQDEDYDEQVEESLQDEDDNDVYILTKVSDILHSIFSSYKEKVLPWFEQLLPLIVNLICPHRPWPDRQWGLCIFDDVIEHCSPASFKYAEYFLRPMLQYVCDNSPEVRQAAAYGLGVMAQYGGDNYRPFCTEALPLLVRVIQSADSKTKENVNATENCISAVGKIMKFKPDCVNVEEVLPHWLSWLPLHEDKEEAVQTFNYLCDLIESNHPIVLGPNNTNLPKIFSIIAEGEMHEAIKHEDPCAKRLANVVRQVQGKLIWLNWGGGDKTFFSL

SEQ ID NO: 877416 - protein, 1112 aa, Homo sapiens
VPISAAGLQGEQLLLKTQTDFNDMEDDDPQISYMISAWARMCKILGKEFQQYLPVVMGPLMKTASIKPEVALLDTQDMENMSDDDGWEFVNLGDQQSFGIKTAGLEEKSTACQMLVCYAKELKEGFVEYTEQVVKLMVPLLKFYFHDGVRVAAAGIHASSPVSPPSFSLTPSAMAAAAAEQQQFYLLLGNLLSPDNVVRKQAEETYENIPGQSKITFLLQAIRNTTAAEEARQMAAVLLRRLLSSAFDEVYPALPSDVQTAIKSELLMIIQMETQSSMRKKVCDIAAELARNLIDEDGNNQWPEGLKFLFDSVSSQNVGLREAALHIFWNFPGIFGNQQQHYLDVIKRMLVQCMQDQEHPSIRTLSARATAAFILANEHNVALFKHFADLLPGFLQAVNDSCYQNDDSVLKSLVEIADTVPKYLRPHLEATLQLSLKLCGDTSLNNMQRQLALEVIVTLSETAAAMLRKHTNIVAQTIPQMLAMMVDLEEDEDWANADELEDDDFDSNAVAGESALDRMACGLGGKLVLPMIKEHIMQMLQNPDWKYRHAGLMALSAIGEGCHQQMEGILNEIVNFVLLFLQDPHPRVRYAACNAVGQMATDFAPGFQKKFHEKVIAALLQTMEDQGNQRVQAHAAAALINFTEDCPKSLLIPYLDNLVKHLHSIMVLKLQELIQKGTKLVLEQVVTSIASVADTAEEKFVPYYDLFMPSLKHIVENAVQKELRLLRGKTIECISLIGLAVGKEKFMQDASDVMQLLLKTQTDFNDMEDDDPQISYMISAWARMCKILGKEFQQYLPVVMGPLMKTASIKPEVALLDTQDMENMSDDDGWEFVNLGDQQSFGIKTAGLEEKSTACQMLVCYAKELKEGFVEYTEQVVKLMVPLLKFYFHDGVRVAAAESMPLLLECARVRGPEYLTQMWHFMCDALIKAIGTEPDSDVLSEIMHSFAKCIEVMGDGCLNNEHFEELGGILKAKLEEHFKNQELRQVKRQDEDYDEQVEESLQDEDDNDVYILTKVSDILHSIFSSYKEKVLPWFEQLLPLIVNLICPHRPWPDRQWGLCIFDDVIEHCSPASFKYAEYFLRPMLQYVCDNSPEVRQAAAYGLGVMAQYGVAI

SEQ ID NO: 877417 - protein, 1008 aa, Homo sapiens
VPISAAGLQGEQLLLKTQTDFNDMEDDDPQISYMISAWARMCKILGKEFQQYLPVVMGPLMKTASIKPEVALLDTQDMENMSDDDGWEFVNLGDQQSFGIKTAGLEEKSTACQMLVCYAKELKEGFVEYTEQVVKLMVPLLKFYFHDGVRVAAAGIHASSPVSPPSFSLTPSAMAAAAAEQQQFYLLLGNLLSPDNVVRKQAEETYENIPGQSKITFLLQAIRNTTAAEEARQMAAVLLRRLLSSAFDEVYPALPSDVQTAIKSELLMIIQMETQSSMRKKVCDIAAELARNLIDEDGNNQWPEGLKFLFDSVSSQNVGLREAALHIFWNFPGIFGNQQQHYLDVIKRMLVQCMQDQEHPSIRTLSARATAAFILANEHNVALFKHFADLLPGFLQAVNDSCYQNDDSVLKSLVEIADTVPKYLRPHLEATLQLSLKLCGDTSLNNMQRQLALEVIVTLSETAAAMLRKHTNIVAQTIPQMLAMMVDLEEDEDWANADELEDDDFDSNAVAGESALDRMACGLGGKLVLPMIKEHIMQMLQNPDWKYRHAGLMALSAIGEGCHQQMEGILNEIVNFVLLFLQDPHPRVRYAACNAVGQMATDFAPGFQKKFHEKVIAALLQTMEDQGNQRVQAHAAAALINFTEDCPKSLLIPYLDNLVKHLHSIMVLKLQELIQKGTKLVLEQVVTSIASVADTAEEKFVPYYDLFMPSLKHIVENAVQKELRLLRGKTIECISLIGLAVGKEKFMQDASDVMQLLLKTQTDFNDMEDDDPQISYMISAWARMCKILGKEFQQYLPVVMGPLMKTASIKPEVALLDTQDMENMSDDDGWEFVNLGDQQSFGIKTAGLEEKSTACQMLVCYAKELKEGFVEYTEQVVKLMVPLLKFYFHDGVRVAAAESMPLLLECARVRGPEYLTQMWHFMCDALIKAIGTEPDSDVLSEIMHSFAKCIEVMGDGCLNNEHFEELGGILKAKLEEHFKNQELRQVKRIYTVKKIYKVRINRLETTLM

SEQ ID NO: 877418 - protein, 621 aa, Homo sapiens
VPISAAGLQGEQLLLKTQTDFNDMEDDDPQISYMISAWARMCKILGKEFQQYLPVVMGPLMKTASIKPEVALLDTQDMENMSDDDGWEFVNLGDQQSFGIKTAGLEEKSTACQMLVCYAKELKEGFVEYTEQVVKLMVPLLKFYFHDGVRVAAAGIHASSPVSPPSFSLTPSAMAAAAAEQQQFYLLLGNLLSPDNVVRKQAEETYENIPGQSKITFLLQAIRNTTAAEEARQMAAVLLRRLLSSAFDEVYPALPSDVQTAIKSELLMIIQMETQSSMRKKVCDIAAELARNLIDEDGNNQWPEGLKFLFDSVSSQNVGLREAALHIFWNFPGIFGNQQQHYLDVIKRMLVQCMQDQEHPSIRTLSARATAAFILANEHNVALFKHFADLLPGFLQAVNDSCYQNDDSVLKSLVEIADTVPKYLRPHLEATLQLSLKLCGDTSLNNMQRQLALEVIVTLSETAAAMLRKHTNIVAQTIPQMLAMMVDLEEDEDWANADELEDDDFDSNAVAGESALDRMACGLGGKLVLPMIKEHIMQMLQNPDWKYRHAGLMALSAIGEGCHQQMEGILNEIVNFVLLFLQDPHPRVRYAACNAVGQMATDFAPGFQKKFHEKVLGREEL

SEQ ID NO: 877419 - protein, 1270 aa, Homo sapiens; identical to SEQ ID NO: 877403

SEQ ID NO: 877420 - protein, 1097 aa, Homo sapiens; identical to SEQ ID NO: 877406

SEQ ID NO: 877421 - protein, 1270 aa, Homo sapiens; identical to SEQ ID NO: 877403

SEQ ID NO: 877422 - protein, 1270 aa, Homo sapiens; identical to SEQ ID NO: 877403

SEQ ID NO: 877423 - protein, 824 aa, Homo sapiens
MQRQLALEVIVTLSETAAAMLRKHTNIVAQTIPQMLAMMVDLEEDEDWANADELEDDDFDSNAVAGESALDRMACGLGGKLVLPMIKEHIMQMLQNPDWKYRHAGLMALSAIGEGCHQQMEGILNEIVNFVLLFLQDPHPRVRYAACNAVGQMATDFAPGFQKKFHEKVIAALLQTMEDQGNQRVQAHAAAALINFTEDCPKSLLIPYLDNLVKHLHSIMVLKLQELIQKGTKLVLEQVVTSIASVADTAEEKFVPYYDLFMPSLKHIVENAVQKELRLLRGKTIECISLIGLAVGKEKFMQDASDVMQLLLKTQTDFNDMEDDDPQISYMISAWARMCKILGKEFQQYLPVVMGPLMKTASIKPEVALLDTQDMENMSDDDGWEFVNLGDQQSFGIKTAGLEEKSTACQMLVCYAKELKEGFVEYTEQVVKLMVPLLKFYFHDGVRVAAAESMPLLLECARVRGPEYLTQMWHFMCDALIKAIGTEPDSDVLSEIMHSFAKCIEVMGDGCLNNEHFEELGGILKAKLEEHFKNQELRQVKRQDEDYDEQVEESLQDEDDNDVYILTKVSDILHSIFSSYKEKVLPWFEQLLPLIVNLICPHRPWPDRQWGLCIFDDVIEHCSPASFKYAEYFLRPMLQYVCDNSPEVRQAAAYGLGVMAQYGGDNYRPFCTEALPLLVRVIQSADSKTKENVNATENCISAVGKIMKFKPDCVNVEEVLPHWLSWLPLHEDKEEAVQTFNYLCDLIESNHPIVLGPNNTNLPKIFSIIAEGEMHEAIKHEDPCAKRLANVVRQVQTSGGLWTECIAQLSPEQQAAIQELLNSA

SEQ ID NO: 877424 - protein, 815 aa, Homo sapiens
KARCEAGFNRPRRKHTNIVAQTIPQMLAMMVDLEEDEDWANADELEDDDFDSNAVAGESALDRMACGLGGKLVLPMIKEHIMQMLQNPDWKYRHAGLMALSAIGEGCHQQMEGILNEIVNFVLLFLQDPHPRVRYAACNAVGQMATDFAPGFQKKFHEKVIAALLQTMEDQGNQRVQAHAAAALINFTEDCPKSLLIPYLDNLVKHLHSIMVLKLQELIQKGTKLVLEQVVTSIASVADTAEEKFVPYYDLFMPSLKHIVENAVQKELRLLRGKTIECISLIGLAVGKEKFMQDASDVMQLLLKTQTDFNDMEDDDPQISYMISAWARMCKILGKEFQQYLPVVMGPLMKTASIKPEVALLDTQDMENMSDDDGWEFVNLGDQQSFGIKTAGLEEKSTACQMLVCYAKELKEGFVEYTEQVVKLMVPLLKFYFHDGVRVAAAESMPLLLECARVRGPEYLTQMWHFMCDALIKAIGTEPDSDVLSEIMHSFAKCIEVMGDGCLNNEHFEELGGILKAKLEEHFKNQELRQVKRQDEDYDEQVEESLQDEDDNDVYILTKVSDILHSIFSSYKEKVLPWFEQLLPLIVNLICPHRPWPDRQWGLCIFDDVIEHCSPASFKYAEYFLRPMLQYVCDNSPEVRQAAAYGLGVMAQYGGDNYRPFCTEALPLLVRVIQSADSKTKENVNATENCISAVGKIMKFKPDCVNVEEVLPHWLSWLPLHEDKEEAVQTFNYLCDLIESNHPIVLGPNNTNLPKIFSIIAEGEMHEAIKHEDPCAKRLANVVRQVQTSGGLWTECIAQLSPEQQAAIQELLNSA

SEQ ID NO: 877425 - protein, 1255 aa, Homo sapiens
VPISAAGLQGEQLLLKTQTDFNDMEDDDPQISYMISAWARMCKILGKEFQQYLPVVMGPLMKTASIKPEVALLDTQDMENMSDDDGWEFVNLGDQQSFGIKTAGLEEKSTACQMLVCYAKELKEGFVEYTEQVVKLMVPLLKFYFHDGVRVAAAGIHASSPVSPPSFSLTPSAMAAAAAEQQQFYLLLGNLLSPDNVVRKQAEETYENIPGQSKITFLLQAIRNTTAAEEARQMAAVLLRRLLSSAFDEVYPALPSDVQTAIKSELLMIIQMETQSSMRKKVCDIAAELARNLIDEDGNNQWPEGLKFLFDSVSSQNVGLREAALHIFWNFPGIFGNQQQHYLDVIKRMLVQCMQDQEHPSIRTLSARATAAFILANEHNVALFKHFADLLPGFLQAVNDSCYQNDDSVLKSLVEIADTVPKYLRPHLEATLQLSLKLCGDTSLNNMQRQLALEVIVTLSETAAAMLRKHTNIVAQTIPQMLAMMVDLEEDEDWANADELEDDDFDSNAVAGESALDRMACGLGGKLVLPMIKEHIMQMLQNPDWKYRHAGLMALSAIGEGCHQQMEGILNEIVNFVLLFLQDPHPRVRYAACNAVGQMATDFAPGFQKKFHEKVIAALLQTMEDQGNQRVQAHAAAALINFTEDCPKSLLIPYLDNLVKHLHSIMVLKLQELIQKGTKLVLEQVVTSIASVADTAEEKFVPYYDLFMPSLKHIVENAVQKELRLLRGKTIECISLIGLAVGKEKFMQDASDVMQLLLKTQTDFNDMEDDDPQISYMISAWARMCKILGKEFQQYLPVVMGPLMKTASIKPEVALLDTQDMENMSDDDGWEFVNLGDQQSFGIKTAGLEEKSTACQMLVCYAKELKEGFVEYTEQVVKLMVPLLKFYFHDGVRVAAAESMPLLLECARVRGPEYLTQMWHFMCDALIKAIGTEPDSDVLSEIMHSFAKCIEVMGDGCLNNEHFEELGGILKAKLEEHFKNQELRQVKRQDEDYDEQVEESLQDEDDNDVYILTKVSDILHSIFSSYKEKVLPWFEQLLPLIVNLICPHRPWPDRQWGLCIFDDVIEHCSPASFKYAEYFLRPMLQYVCDNSPEVRQAAAYGLGVMAQYGGDNYRPFCTEALPLLVRVIQSADSKTKENVNATENCISAVGKIMKFKPDCVNVEEVLPHWLSWLPLHEDKEEAVQTFNYLCDLIESNHPIVLGPNNTNLPKIFSIIAEGEMHEAIKHEDPCAKRLANVVRQVQLGFFVLFLSKRDR

SEQ ID NO: 877426 - protein, 373 aa, Homo sapiens
KLARYEAGCARVRGPEYLTQMWHFMCDALIKAIGTEPDSDVLSEIMHSFAKCIEVMGDGCLNNEHFEELGGILKAKLEEHFKNQELRQVKRQDEDYDEQVEESLQDEDDNDVYILTKVSDILHSIFSSYKEKVLPWFEQLLPLIVNLICPHRPWPDRQWGLCIFDDVIEHCSPASFKYAEYFLRPMLQYVCDNSPEVRQAAAYGLGVMAQYGGDNYRPFCTEALPLLVRVIQSADSKTKENVNATENCISAVGKIMKFKPDCVNVEEVLPHWLSWLPLHEDKEEAVQTFNYLCDLIESNHPIVLGPNNTNLPKIFSIIAEGEMHEAIKHEDPCAKRLANVVRQVQTSGGLWTECIAQLSPEQQAAIQELLNSA

SEQ ID NO: 877427 - protein, 1270 aa, Homo sapiens; identical to SEQ ID NO: 877403

SEQ ID NO: 877428 - protein, 1276 aa, Homo sapiens
  misc_feature (1249)..(1249): Xaa can be any naturally occurring amino acid
  misc_feature (1260)..(1260): Xaa can be any naturally occurring amino acid
  misc_feature (1265)..(1265): Xaa can be any naturally occurring amino acid
VPISAAGLQGEQLLLKTQTDFNDMEDDDPQISYMISAWARMCKILGKEFQQYLPVVMGPLMKTASIKPEVALLDTQDMENMSDDDGWEFVNLGDQQSFGIKTAGLEEKSTACQMLVCYAKELKEGFVEYTEQVVKLMVPLLKFYFHDGVRVAAAGIHASSPVSPPSFSLTPSAMAAAAAEQQQFYLLLGNLLSPDNVVRKQAEETYENIPGQSKITFLLQAIRNTTAAEEARQMAAVLLRRLLSSAFDEVYPALPSDVQTAIKSELLMIIQMETQSSMRKKVCDIAAELARNLIDEDGNNQWPEGLKFLFDSVSSQNVGLREAALHIFWNFPGIFGNQQQHYLDVIKRMLVQCMQDQEHPSIRTLSARATAAFILANEHNVALFKHFADLLPGFLQAVNDSCYQNDDSVLKSLVEIADTVPKYLRPHLEATLQLSLKLCGDTSLNNMQRQLALEVIVTLSETAAAMLRKHTNIVAQTIPQMLAMMVDLEEDEDWANADELEDDDFDSNAVAGESALDRMACGLGGKLVLPMIKEHIMQMLQNPDWKYRHAGLMALSAIGEGCHQQMEGILNEIVNFVLLFLQDPHPRVRYAACNAVGQMATDFAPGFQKKFHEKVIAALLQTMEDQGNQRVQAHAAAALINFTEDCPKSLLIPYLDNLVKHLHSIMVLKLQELIQKGTKLVLEQVVTSIASVADTAEEKFVPYYDLFMPSLKHIVENAVQKELRLLRGKTIECISLIGLAVGKEKFMQDASDVMQLLLKTQTDFNDMEDDDPQISYMISAWARMCKILGKEFQQYLPVVMGPLMKTASIKPEVALLDTQDMENMSDDDGWEFVNLGDQQSFGIKTAGLEEKSTACQMLVCYAKELKEGFVEYTEQVVKLMVPLLKFYFHDGVRVAAAESMPLLLECARVRGPEYLTQMWHFMCDALIKAIGTEPDSDVLSEIMHSFAKCIEVMGDGCLNNEHFEELGGILKAKLEEHFKNQELRQVKRQDEDYDEQVEESLQDEDDNDVYILTKVSDILHSIFSSYKEKVLPWFEQLLPLIVNLICPHRPWPDRQWGLCIFDDVIEHCSPASFKYAEYFLRPMLQYVCDNSPEVRQAAAYGLGVMAQYGGDNYRPFCTEALPLLVRVIQSADSKTKENVNATENCISAVGKIMKFKPDCVNVEEVLPHWLSWLPLHEDKEEAVQTFNYLCDLIESNHPIVLGPNNTNLPKIFSIIAEGEMHEAIKHEDPCAKRLANVVRQVQYKLLEGXLGLNCINHSSXPSTNXAALSRNSLKLL

SEQ ID NO: 877429 - protein, 1210 aa, Homo sapiens
VPISAAGLQGEQLLLKTQTDFNDMEDDDPQISYMISAWARMCKILGKEFQQYLPVVMGPLMKTASIKPEVALLDTQDMENMSDDDGWEFVNLGDQQSFGIKTAGLEEKSTACQMLVCYAKELKEGFVEYTEQVVKLMVPLLKFYFHDGVRVAAAGIHASSPVSPPSFSLTPSAMAAAAAEQQQFYLLLGNLLSPDNVVRKQAEETYENIPGQSKITFLLQAIRNTTAAEEARQMAAVLLRRLLSSAFDEVYPALPSDVQTAIKSELLMIIQMETQSSMRKKVCDIAAELARNLIDEDGNNQWPEGLKFLFDSVSSQNVGLREAALHIFWNFPGIFGNQQQHYLDVIKRMLVQCMQDQEHPSIRTLSARATAAFILANEHNVALFKHFADLLPGFLQAVNDSCYQNDDSVLKSLVEIADTVPKYLRPHLEATLQLSLKLCGDTSLNNMQRQLALEVIVTLSETAAAMLRKHTNIVAQTIPQMLAMMVDLEEDEDWANADELEDDDFDSNAVAGESALDRMACGLGGKLVLPMIKEHIMQMLQNPDWKYRHAGLMALSAIGEGCHQQMEGILNEIVNFVLLFLQDPHPRVRYAACNAVGQMATDFAPGFQKKFHEKVIAALLQTMEDQGNQRVQAHAAAALINFTEDCPKSLLIPYLDNLVKHLHSIMVLKLQELIQKGTKLVLEQVVTSIASVADTAEEKFVPYYDLFMPSLKHIVENAVQKELRLLRGKTIECISLIGLAVGKEKFMQDASDVMQLLLKTQTDFNDMEDDDPQISYMISAWARMCKILGKEFQQYLPVVMGPLMKTASIKPEVALLDTQDMENMSDDDGWEFVNLGDQQSFGIKTAGLEEKSTACQMLVCYAKELKEGFVEYTEQVVKLMVPLLKFYFHDGVRVAAAESMPLLLECARVRGPEYLTQMWHFMCDALIKAIGTEPDSDVLSEIMHSFAKCIEVMGDGCLNNEHFEELGGILKAKLEEHFKNQELRQVKRQDEDYDEQVEESLQDEDDNDVYILTKVSDILHSIFSSYKEKVLPWFEQLLPLIVNLICPHRPWPDRQWGLCIFDDVIEHCSPASFKYAEYFLRPMLQYVCDNSPEVRQAAAYGLGVMAQYGGDNYRPFCTEALPLLVRVIQSADSKTKENVNATENCISAVGKIMKFKPDCVNVEEVLPHWLSWLPLHDWCAAELQSPSHEISFGYQVQNLQPSVHGITGCI

SEQ ID NO: 877430 - protein, 779 aa, Homo sapiens
VPISAAGLQGEQLLLKTQTDFNDMEDDDPQISYMISAWARMCKILGKEFQQYLPVVMGPLMKTASIKPEVALLDTQDMENMSDDDGWEFVNLGDQQSFGIKTAGLEEKSTACQMLVCYAKELKEGFVEYTEQVVKLMVPLLKFYFHDGVRVAAAEIHASSPVSPPSFSLTPSAMAAAAAEQQQFYLLLGNLLSPDNVVRKQAEETYENIPGQSKITFLLQAIRNTTAAEEARQMAAVLLRRLLSSAFDEVYPALPSDVQTAIKSELLMIIQMETQSSMRKKVCDIAAELARNLIDEDGNNQWPEGLKFLFDSVSSQNVGLREAALHIFWNFPGIFGNQQQHYLDVIKRMLVQCMQDQEHPSIRTLSARATAAFILANEHNVALFKHFADLLPGFLQAVNDSCYQNDDSVLKSLVEIADTVPKYLRPHLEATLQLSLKLCGDTSLNNMQRQLALEVIVTLSETAAAMLRKHTNIVAQTIPQMLAMMVDLEEDEDWANADELEDDDFDSNAVAGESALDRMACGLGGKLVLPMIKEHIMQMLQNPDWKYRHAGLMALSAIGEGCHQQMEGILNEIVNFVLLFLQDPHPRVRYAACNAVGQMATDFAPGFQKKFHEKVIAALLQTMEDQGNQRVQAHAAAALINFTEDCPKSLLIPYLDNLVKHLHSIMVLKLQELIQKGTKLVLEQVVTSIASVADTAEEKFVPYYDLFMPSLKHIVENAVQKELRLLRGKTIECISLIGLAVGKEKEKCTRQLNMKILVPNVWPMSFAKYRLLEDCGLSA

SEQ ID NO: 877431 - protein, 332 aa, Homo sapiens
VPISAAGLQGEQLLLKTQTDFNDMEDDDPQISYMISAWARMCKILGKEFQQYLPVVMGPLMKTASIKPEVALLDTQDMENMSDDDGWEFVNLGDQQSFGIKTAGLEEKSTACQMLVCYAKELKEGFVEYTEQVVKLMVPLLKFYFHDGVRVAAAGIHASSPVSPPSFSLTPSAMAAAAAEQQQFYLLLGNLLSPDNVVRKQAEETYENIPGQSKITFLLQAIRNTTAAEEARQMAAVLLRRLLSSAFDEVYPALPSDVQTAIKSELLMIIQMETQSSMRKKVCDIAAELARNLIDEDGNNQWPEGLKFLFDSVSSQNVGLREAALHIFWYIH

SEQ ID NO: 877432 - protein, 1316 aa, Homo sapiens
MVRATAKGHGNLERELGELTVGYGGQRKPAGKIWGTEEGLLREGQESSEELLCDLGSDFDMGVPGAIISLPGALIPCIVSLVKSEQPGRALVQTWAEMTVMRGGLAFLGDNVPHICMSPGWQRARAERDWTWDQQARQVLSWSWPHVFAVGPQTKPCTSLSLGCLGAAGSSVGPPHSSFLPLLSPGSRGCERIIWGRPSTSKQADGGGHLRPNEYLDQVGNKNTRRGGNQKSLEKDLAQLPLWETEAQLGEGQDHAGRKSRLPLATAKYFVPYSPPQGGGTEEKTKAQQGGVLKAVTGGGGAGTRAPDPQPMVFPVTLVYPHLLFLRRVDSKSSERWFWAPCPRQSVCKNCQGSLVTQARDGAQRAHSRHMHPRPHPEPAGQRREVVGARVHLQEPGGAGCSFHLSGKVGEGMLPGISLPASLHLAGSGGVRGLQHRLLEPLPPVTLLLEMMCTHIFGSCPPCGSRLLGGGQPPLNQLPEACSILPRQSPPGSQRPPLPILFLFLPCNELPPYLSSLTCGFAGPQIGFVFVRQPLDSWAARRKHKRTWMHTDVLTHTRPLSPIHSTSWSSGAAWELGEDGSKGHKPLSRCQRILNGKHKSGASPASWQKAWGISPWAFFPVFEALTFGKGHCGFYENFSYHQSSSNLEKLDDISNPTSLSQGTLVKASPSITDIVRCFAILNHSVEQRADAYFIDGEIDIWGSHGNIEAEVNSQISRPHSLSTELCSCHGSVWLKDTPPPPFPRNPPDPQSGKKEQGPRGWPDLGACRLAALFPKNIETCGVFDQIHKVLLRFHPDSFPAVPEVQRVSESIQGHAIIPDQAGHGSSPDSRGPGAKVMCCPPLPFLCLPTLEQAPGLAVTVCRSAQARATRVSTAPGNTDHNLKSPEMNCFLGERGGVALPLGQRTRQYGAAVPEMPRSVPAPLSGIQVCKLVKFSVGLKKNVHGPNLTHWAPACEPQCLSIAPFLIHLLSFVADLEEMGAQRGERCASGCPAKAGVETGTPRACHSPRPHLGLLQALRFEDGVGWKVRGAGDGIGELLGFQEEVSAAWAPFTCAGKRLRCGHRALRGEIHLPEVTLQNDCPALAASGSSHPLLMTFSQNGAPSQEANLKNQPSTLTQPRNTMSLKYSFPGGESKIQLPGRVETNSCPTARPGPGRHGWIPQGSELDRLHGGPTTRPVLQSWPCHPSRGCSDGSQPHTSSPGETISFVLLASERSEASTFLKKVIKCIIGKLDSQATTPSPRRAPPPSSPFSPLPLLPQTSGFPLAYSWGNHSADVHFPTVSSAAPRVAPGPKGLCRGQAVSPLPACSPDEATASLK

SEQ ID NO: 877433 - protein, 1316 aa, Homo sapiens; identical to SEQ ID NO: 877432

SEQ ID NO: 877434 - protein, 151 aa, Homo sapiens
HEEKAHGEMPQAFCHDAGEAPDLCFPSCSSSCPVMSSPHTFPPSPGGFAGPQIGFVFVRQPLDSWAARRKHKRTWMHTDVLTHTRPLSPIHSTSWSSGAAWELGEDGSKGHKPLSRCQRILNGKHKSGASPASWQKAWGISPWAFFPVFEL

SEQ ID NO: 877435 - protein, 1316 aa, Homo sapiens; identical to SEQ ID NO: 877432

SEQ ID NO: 877436 - protein, 1280 aa, Homo sapiens
MCTHIFGSCPPCGSRLLGGGQPPLNQLPEACSILPRQSPPGSQRPPLPILFLFLPCNELPPYLSSLTCGFAGPQIGFVFVRQPLDSWAARRKHKRTWMHTDVLTHTRPLSPIHSTSWSSGAAWELGEDGSKGHKPLSRCQRILNGKHKSGASPASWQKAWGISPWAFFPVFEALTFGKGHCGFYENFSYHQSSSNLEKLDDISNPTSLSQGTLVKASPSITDIVRCFAILNHSVEQRAYAYFIDGEIDIWGSHGNIEAEVNSQISRPHSLSTELCSCHGSVWLKDTPPPPFPRNPPDPQSGKKEQGPRGWPDLGACRLAALFPKNIEPAESLTKSTTVLLRFHPDSFPAVPEVQRVSESIQGHAIIPDQAWTWVQPWLQGSRCQGHVLSPTSLSLPSHFGTGSRPGCDSMQECPSQGHQGVHSPWKHRSQSQVPLMNCFLGERGGVALPLGQRTRQYGAAVPEMPRSVPAPLSGIQVGKLVKFSVGLKKNVHGPNLTHWAPACEPQCLSIAPFLIHLLSFVADLEEMGAQRGERCASGCPAKAGVETGTPRACHSPRPHLGLLQALRFEDGVGWKVRGAGDGIGELLGFQEEVSAAWAPFTCAGKRLRCGHRALRGEIHLPEVTLQNDCPALAASGSSHPLLMTFSQNGAPSQEANLKNQPSTLTQPRNTMSLKYSFPGGESKIQLPGRVETNSCPTARPGPGRHGWIPQGSELDRLHGGPTTRPVLQSWPCHPSRGCSDGSQPHTSSPGETISFVLLASERSEASTFLKKVIKCIIGKLDSQATTPSPRRAPPPSSPFSPLPLLPQTSGFPLAYSWGNHSADVHFPTVSSAAPRVAPGPKGLCRGQAVSPLPACSPDEANSFSEMSCRPGAGRHQPVFPFLVIPQPEAPFLGTPGLKGTSESCHCHSRVSIQGVPFSSSPRWVNVATIQKAQKFLFPHLRPLSNTRRKCSCLPINIYSGTISKASKESSQVGYLACGRRDRGTNPPTISFRWLIGAQGGKQVKQQGGGDLAVMHLLPDSEAWQEEATPASPALTPAPHPVTLWLWPLVALVPKITMPVATSLIFSKSIIEEQVILDDGFLIYKRRISLGVEQKGNHLMAPFFSSMNTFNETILLYLRKWRVEHSNQINSQLIAIKLKRKEINPESILNTAKSSEPQNLAFPSHKVHEHVNTHTHTHTHTHTLTHSPTPQTYLKLRNSTESPHANSCLLSSTWVREGEQTRQQPVPGLRKRQAHPLAPSTQHNRGWRAVRAWRCLGPTSQPQLLGLQGWAEDGVLALGLP

SEQ ID NO: 877437 - protein, 520 aa, Homo sapiens
MGKRQHQKDKMYITCAEYTHFYGGKKPDLPQTNFRRLPFDHCSLSLQPFVYPVCTPDGIVFDLLNIVPWLKKYGTNPSNGEKLDGRSLIKLNFSKNSEGKYHCPVLFTVFTNNTHIVAVRTTGNVYAYEAVEQLNIKAKNFRDLLTDEPFSRQDIITLQDPTNLDKFNVSNFYHVKNNMKIIDPDEEKAKQDPSYYLKNTNAETRETLQELYKEFKGDEILAATMKAPEKKKVDKLNAAHYSTGKVSASFTSTAMVPETTHEAAAIDEDVLRYQFVKKKGYVRLHTNKGDLNLELHCDLTPKTCENFIRLCKKHYYDGTIFHRSIRNFVIQGGDPTGTGTGGESYWGKPFKDEFRPNLSHTGRGILSMANSGPNSNRSQFFITFRSCAYLDKKHTIFGRVVGGFDVLTAMENVESDPKTDRPKEEIRIDATTVFVDPYEEADAQIAQERKTQLKVAPETKVKSSQPQAGSQGPQTFRQGVGKYINPAATKRAAEEEPSTSATVPMSKKKPSRGFGDFSSW

SEQ ID NO: 877438 - protein, 520 aa, Homo sapiens; identical to SEQ ID NO: 877437

SEQ ID NO: 877439 - protein, 520 aa, Homo sapiens; identical to SEQ ID NO: 877437

SEQ ID NO: 877440 - protein, 475 aa, Homo sapiens
MGKRQHQKDKMYITCAEYTHFYGGKKPDLPQTNFRRLPFDHCSLSLQPFVYPVCTPDGIVFDLLNIVPWLKKYGTNPSNGEKLDGRSLIKLNFSKNSEGKYHCPVLFTVFTNNTHIVAVRTTGNVYAYEAVEQLNIKAKNFRDLLTDEPFSRQDIITLQDPTNLDKFNVSNFYHVKNNMKIIDPDEEKAKQDPSYYLKNTNAETRETLQELYKEFKGDEILAATMKAPEKKKVDKLNAAHYSTGKVSASFTSTAMVPETTHEAAAIDEDVLRYQFVKKKGYVRLHTNKGDLNLELHCDLTPKTCENFIRLCKKHYYDGTIFHRSIRNFVIQGGDPTGTGTGGESYWGKPFKDEFRPNLSHTGRGILSMANSGPNSNRSQFFITFRSCAYLDKKHTIFGRVVGGFDVLTAMENVESDPKTDRPKEEIRIDATTVFVGKYINPAATKRAAEEEPSTSATVPMSKKKPSRGFGDFSSW

SEQ ID NO: 877441 - protein, 583 aa, Homo sapiens
NSAAAPWSELSAVVFSCSLVAAAAPPWGSDSTKRTKCTLPVLNTLTFMVARSQFIRNKKNDNIFSCQNYQDYNNKSTVIILMEVKSMHFSNLPQTNFRRLPFDHCSLSLQPFVYPVCTPDGIVFDLLNIVPWLKKYGTNPSNGEKLDGRSLIKLNFSKNSEGKYHCPVLFTVFTNNTHIVAVRTTGNVYAYEAVEQLNIKAKNFRDLLTDEPFSRQDIITLQDPTNLDKFNVSNFYHVKNNMKIIDPDEEKAKQDPSYYLKNTNAETRETLQELYKEFKGDEILAATMKAPEKKKVDKLNAAHYSTGKVSASFTSTAMVPETTHEAAAIDEDVLRYQFVKKKGYVRLHTNKGDLNLELHCDLTPKTCENFIRLCKKHYYDGTIFHRSIRNFVIQGGDPTGTGTGGESYWGKPFKDEFRPNLSHTGRGILSMANSGPNSNRSQFFITFRSCAYLDKKHTIFGRVVGGFDVLTAMENVESDPKTDRPKEEIRIDATTVFVDPYEEADAQIAQERKTQLKVAPETKVKSSQPQAGSQGPQTFRQGVGKYINPAATKRAAEEEPSTSATVPMSKKKPSRGFGDFSSW

SEQ ID NO: 877442 - protein, 512 aa, Homo sapiens
MYITCAEYTSSYYWLAMNDHLPQTNFRRLPFDHCSLSLQPFVYPVCTPDGIVFDLLNIVPWLKKYGTNPSNGEKLDGRSLIKLNFSKNSEGKYHCPVLFTVFTNNTHIVAVRTTGNVYAYEAVEQLNIKAKNFRDLLTDEPFSRQDIITLQDPTNLDKFNVSNFYHVKNNMKIIDPDEEKAKQDPSYYLKNTNAETRETLQELYKEFKGDEILAATMKAPEKKKVDKLNAAHYSTGKVSASFTSTAMVPETTHEAAAIDEDVLRYQFVKKKGYVRLHTNKGDLNLELHCDLTPKTCENFIRLCKKHYYDGTIFHRSIRNFVIQGGDPTGTGTGGESYWGKPFKDEFRPNLSHTGRGILSMANSGPNSNRSQFFITFRSCAYLDKKHTIFGRVVGGFDVLTAMENVESDPKTDRPKEEIRIDATTVFVDPYEEADAQIAQERKTQLKVAPETKVKSSQPQAGSQGPQTFRQGVGKYINPAATKRAAEEEPSTSATVPMSKKKPSRGFGDFSSW

SEQ ID NO: 877443 - protein, 520 aa, Homo sapiens; identical to SEQ ID NO: 877437

SEQ ID NO: 877444 - protein, 549 aa, Homo sapiens
MGKRQHQKDKMYITCAEYTHFYGGKKPDLPQTNFRRLPFDHCSLSLQPFVYPVCTPDGIVFDLLNIVPWLKKYGTNPSNGEKLDGRSLIKLNFSKNSEGRCCRPEAKALLPRLSEPRARSPVGAAFAGKYHCPVLFTVFTNNTHIVAVRTTGNVYAYEAVEQLNIKAKNFRDLLTDEPFSRQDIITLQDPTNLDKFNVSNFYHVKNNMKIIDPDEEKAKQDPSYYLKNTNAETRETLQELYKEFKGDEILAATMKAPEKKKVDKLNAAHYSTGKVSASFTSTAMVPETTHEAAAIDEDVLRYQFVKKKGYVRLHTNKGDLNLELHCDLTPKTCENFIRLCKKHYYDGTIFHRSIRNFVIQGGDPTGTGTGGESYWGKPFKDEFRPNLSHTGRGILSMANSGPNSNRSQFFITFRSCAYLDKKHTIFGRVVGGFDVLTAMENVESDPKTDRPKEEIRIDATTVFVDPYEEADAQIAQERKTQLKVAPETKVKSSQPQAGSQGPQTFRQGVGKYINPAATKRAAEEEPSTSATVPMSKKKPSRGFGDFSSW

SEQ ID NO: 877445 - protein, 520 aa, Homo sapiens; identical to SEQ ID NO: 877437

SEQ ID NO: 877446 - protein, 520 aa, Homo sapiens; identical to SEQ ID NO: 877437

SEQ ID NO: 877447 - protein, 520 aa, Homo sapiens; identical to SEQ ID NO: 877437

SEQ ID NO: 877448 - protein, 520 aa, Homo sapiens; identical to SEQ ID NO: 877437

SEQ ID NO: 877449 - protein, 209 aa, Homo sapiens
  misc_feature (33)..(33): Xaa can be any naturally occurring amino acid
GLQEFGTSGPAEEGHSEDTVTAQVSTHLEASEXASRVQVRVVGMKACPGREKQVWRGPCAHPNSNRSQFFITFRSCAYLDKKHTIFGRVVGGFDVLTAMENVESDPKTDRPKEEIRIDATTVFVDPYEEADAQIAQERKTQLKVAPETKVKSSQPQAGSQGPQTFRQGVGKYINPAATKRAAEEEPSTSATVPMSKKKPSRGFGDFSSW

SEQ ID NO: 877450 - protein, 520 aa, Homo sapiens; identical to SEQ ID NO: 877437

SEQ ID NO: 877451 - protein, 248 aa, Homo sapiens
MGKRQHQKDKMYITCAEYTHFYGGKKPDLPQTNFRRLPFDHCSLSLQPFVYPVCTPDGIVFDLLNIVPWLKKYGTNPSNGEKLDGRSLIKLNFSKNSEGKYHCPVLFTVFTNNTHIVAVRTTGNVYAYEAVEQLNIKAKNFRDLLTDEPFSRQDIITLQDPTNLDKFNVSNFYHVKNNMKIIDPDEEKAKQDPSYYLKNTNAETRETLQELYKEFKGDEILAATMKAPEKKKVDKLNAVSGGGHSAKP

SEQ ID NO: 877452 - protein, 219 aa, Homo sapiens
MGKRQHQKDKMYITCAEYTHFYGGKKPDLPQTNFRRLPFDHCSLSLQPFVYPVCTPDGIVFDLLNIVPWLKKYGTNPSNGEKLDGRSLIKLNFSKNSEGKYHCPVLFTVFTNNTHIVAVRTTGNVYAYEAVEQLNIKAKNFRDLLTDEPFSRQDIITLQDPTNLDKFNVSNFYHVKNNMKIIDPDSEGLENQSPCQCLHGYRALFCGDVYQLLHIRYDA

SEQ ID NO: 877453 - protein, 300 aa, Homo sapiens
LASSESLLPWPPKVLELQAHYSTGKVSASFTSTAMVPETTHEAAAIDEDVLRYQFVKKKGYVRLHTNKGDLNLELHCDLTPKTCENFIRLCKKHYYDGTIFHRSIRNFVIQGGDPTGTGTGGESYWGKPFKDEFRPNLSHTGRGILSMANSGPNSNRSQFFITFRSCAYLDKKHTIFGRVVGGFDVLTAMENVESDPKTDRPKEEIRIDATTVFVDPYEEADAQIAQERKTQLKVAPETKVKSSQPQAGSQGPQTFRQGVGKYINPAATKRAAEEEPSTSATVPMSKKKPSRGFGDFSSW

SEQ ID NO: 877454 - protein, 175 aa, Homo sapiens
MGKRQHQKDKMNIVPWLKKYGTNPSNGEKLDGRSLIKLNFSKNSEGKYHCPVLFTVFTNNTHIVAVRTTGNVYAYEAVEQLNIKAKNFRDLLTDEPFSRQDIITLQDPTNLDKFNVSNFYHASRAKKTKNKKKKKNPGSFPGRKKVKRQGKVFRPFWKRGKTGPKKGENQNRRTK

SEQ ID NO: 877455 - protein, 520 aa, Homo sapiens; identical to SEQ ID NO: 877437

SEQ ID NO: 877456 - protein, 452 aa, Homo sapiens
MGKRQHQKDKMYITCAEYTHFYGGKKPDLPQTNFRRLPFDHCSLSLQPFVYPVCTPDGIVFDLLNIVPWLKKYGTNPSNGEKLDGRSLIKLNFSKNSEGKYHCPVLFTVFTNNTHIVAVRTTGNVYAYEAVEQLNIKAKNFRDLLTDEPFSRQDIITLQDPTNLDKFNVSNFYHVKNNMKIIDPDEEKAKQDPSYYLKNTNAETRETLQELYKEFKGDEILAATMKAPEKKKVDKLNAAHYSTGKVSASFTSTAMVPETTHEAAAIDEDVLRYQFVKKKGYVRLHTNKGDLNLELHCDLTPKTCENFIRLCKKHYYDGTIFHRSIRNFVIQGGDPTGTGTGGESYWGKPFKDEFRPNLSHTGRGILSMANSGPNSNRSQFFITFRSCAYLDKKHTIFGRVVGGFDVLTAMENVESDPKTDRPKEEIRIDATTVFVDPYEEADAQVRGHDATT

SEQ ID NO: 877457 - protein, 502 aa, Homo sapiens
MEVKSSTFPNLPQTNFRRLPFDHCSLSLQPFVYPVCTPDGIVFDLLNIVPWLKKYGTNPSNGEKLDGRSLIKLNFSKNSEGKYHCPVLFTVFTNNTHIVAVRTTGNVYAYEAVEQLNIKAKNFRDLLTDEPFSRQDIITLQDPTNLDKFNVSNFYHVKNNMKIIDPDEEKAKQDPSYYLKNTNAETRETLQELYKEFKGDEILAATMKAPEKKKVDKLNAAHYSTGKVSASFTSTAMVPETTHEAAAIDEDVLRYQFVKKKGYVRLHTNKGDLNLELHCDLTPKTCENFIRLCKKHYYDGTIFHRSIRNFVIQGGDPTGTGTGGESYWGKPFKDEFRPNLSHTGRGILSMANSGPNSNRSQFFITFRSCAYLDKKHTIFGRVVGGFDVLTAMENVESDPKTDRPKEEIRIDATTVFVDPYEEADAQIAQERKTQLKVAPETKVKSSQPQAGSQGPQTFRQGVGKYINPAATKRAAEEEPSTSATVPMSKKKPSRGFGDFSSW

SEQ ID NO: 877458 - protein, 502 aa, Homo sapiens
MEEKVCTFPNLPQTNFRRLPFDHCSLSLQPFVYPVCTPDGIVFDLLNIVPWLKKYGTNPSNGEKLDGRSLIKLNFSKNSEGKYHCPVLFTVFTNNTHIVAVRTTGNVYAYEAVEQLNIKAKNFRDLLTDEPFSRQDIITLQDPTNLDKFNVSNFYHVKNNMKIIDPDEEKAKQDPSYYLKNTNAETRETLQELYKEFKGDEILAATMKAPEKKKVDKLNAAHYSTGKVSASFTSTAMVPETTHEAAAIDEDVLRYQFVKKKGYVRLHTNKGDLNLELHCDLTPKTCENFIRLCKKHYYDGTIFHRSIRNFVIQGGDPTGTGTGGESYWGKPFKDEFRPNLSHTGRGILSMANSGPNSNRSQFFITFRSCAYLDKKHTIFGRVVGGFDVLTAMENVESDPKTDRPKEEIRIDATTVFVDPYEEADAQIAQERKTQLKVAPETKVKSSQPQAGSQGPQTFRQGVGKYINPAATKRAAEEEPSTSATVPMSKKKPSRGFGDFSSW

SEQ ID NO: 877459 - protein, 529 aa, Homo sapiens
NSAAAPWSELSAVVFSCSLVAAAAPPWGSDSTKRTKYLPQTNFRRLPFDHCSLSLQPFVYPVCTPDGIVFDLLNIVPWLKKYGTNPSNGEKLDGRSLIKLNFSKNSEGKYHCPVLFTVFTNNTHIVAVRTTGNVYAYEAVEQLNIKAKNFRDLLTDEPFSRQDIITLQDPTNLDKFNVSNFYHVKNNMKIIDPDEEKAKQDPSYYLKNTNAETRETLQELYKEFKGDEILAATMKAPEKKKVDKLNAAHYSTGKVSASFTSTAMVPETTHEAAAIDEDVLRYQFVKKKGYVRLHTNKGDLNLELHCDLTPKTCENFIRLCKKHYYDGTIFHRSIRNFVIQGGDPTGTGTGGESYWGKPFKDEFRPNLSHTGRGILSMANSGPNSNRSQFFITFRSCAYLDKKHTIFGRVVGGFDVLTAMENVESDPKTDRPKEEIRIDATTVFVDPYEEADAQIAQERKTQLKVAPETKVKSSQPQAGSQGPQTFRQGVGKYINPAATKRAAEEEPSTSATVPMSKKKPSRGFGDFSSW

SEQ ID NO: 877460 - protein, 489 aa, Homo sapiens
MGKRQHQKDKMYITCAEYTHFYGGKKPDLPQTNFRRLPFDHCSLSLQPFVYPVCTPDGIVFDLLNIVPWLKKYGTNPSNGEKLDGRSLIKLNFSKNSEGKYHCPVLFTVFTNNTHIVAVRTTGNVYAYEAVEQLNIKAKNFRDLLTDEPFSRQDIITLQDPTNLDKFNVSNFYHVKNNMKIIDPDEEKAKQDPSYYLKNTNAETRETLQELYKEFKGDEILAATMKAPEKKKVDKLNAAHYSTGKVSASFTSTAMVPETTHEAAAIDEDVLRYQFVKKKGYVRLHTNKGDLNLELHCDLTPKTCENFIRLCKKHYYDGTIFHRSIRNFVIQGGDPTGTGTGGESYWGKPFKDEFRPNLSHTGRGILSMANSGPNSNRSQFFITFRSCAYLDKKHTIFGRVVGGFDVLTAMENVESDPKTDRPKEEIRIDATTVFVDPYEEADAQIAQERKTQLKVAPETKVKSSQPQAGSQGPQTFRQGVGKYINPAAT

SEQ ID NO: 877461 - protein, 380 aa, Homo sapiens
EQVGRRIIFFFRQDIITLQDPTNLDKFNVSNFYHVKNNMKIIDPDEEKAKQDPSYYLKNTNAETRETLQELYKEFKGDEILAATMKAPEKKKVDKLNAAHYSTGKVSASFTSTAMVPETTHEAAAIDEDVLRYQFVKKKGYVRLHTNKGDLNLELHCDLTPKTCENFIRLCKKHYYDGTIFHRSIRNFVIQGGDPTGTGTGGESYWGKPFKDEFRPNLSHTGRGILSMANSGPNSNRSQFFITFRSCAYLDKKHTIFGRVVGGFDVLTAMENVESDPKTDRPKEEIRIDATTVFVDPYEEADAQIAQERKTQLKVAPETKVKSSQPQAGSQGPQTFRQGVGKYINPAATKRAAEEEPSTSATVPMSKKKPSRGFGDFSSW

SEQ ID NO: 877462 - protein, 520 aa, Homo sapiens; identical to SEQ ID NO: 877437

SEQ ID NO: 877463 - protein, 480 aa, Homo sapiens
MGKRQHQKDKMYITCAEYTHFYGGKKPDLPQTNFRRLPFDHCSLSLQPFVYPVCTPDGIVFDLLNIVPWLKKYGTNPSNGEKLDGRSLIKLNFSKNSEGKYHCPVLFTVFTNNTHIVAVRTTGNVYAYEAVEQLNIKAKNFRDLLTDEPFSRQDIITLQDPTNLDKFNVSNFYHVKNNMKIIDPDEEKAKQDPSYYLKNTNAETRETLQELYKEFKGDEILAATMKAPEKKKVDKLNAAHYSTGKVSASFTSTAMVPETTHEAAAIDEDVLRYQFVKKKGYVRLHTNKGDLNLELHCDLTPKTCENFIRLCKKHYYDGTIFHRSIRNFVIQGGDPTGTGTGGESYWGKPFKDEFRPNLSHTGRGILSMANSGPNSNRSQFFITFRSCAYLDKKHTIFGRVVGGFDVLTAMENVESDPKTDRPKEEIRIDATTVFVDPYEEADAQIAQERKTQLKVAPETKVKSSQPQAGKAGLERTLCPP

SEQ ID NO: 877464 - protein, 209 aa, Homo sapiens; identical to SEQ ID NO: 877449
  misc_feature (33)..(33): Xaa can be any naturally occurring amino acid

SEQ ID NO: 877465 - protein, 520 aa, Homo sapiens; identical to SEQ ID NO: 877437

SEQ ID NO: 877466 - protein, 211 aa, Homo sapiens
MGKRQHQKDKMYITCAEYTHFYGGKKPDLPQTNFRRLPFDHCSLSLQPFVYPVCTPDGIVFDLLNIVPWLKKYGTNPSNGEKLDGRSLIKLNFSKNSEGKYHCPVLFTVFTNNTHIVAVRTTGNVYAYEAVEQLNIKAKNFRDLLTDEPFSRQDIITLQDPTNLDKFNVSNFYHVKNNMKIIDPDEEKAKQDPSYYLKNTNAQVNTTVWPP

SEQ ID NO: 877467 - protein, 68 aa, Homo sapiens [sequence omitted]

SEQ ID NO: 877468 - protein, 154 aa, Homo sapiens
AATRAGGGRVRRGRARPSLASWLASSARRLPGTPRGHALRARPRPHPHLPSCGTGFRPGPRPLAGATQAARDVAALPGLVGGSWGSGSSGRNTAMTAPVARVTLPRAAVGAQEPFHFTARLSSGSSSEQKVSRSLFATSYNIETDSVPFKGDNN

SEQ ID NO: 877469 - protein, 145 aa, Homo sapiens
TETGSREIRTHLHLQSQVPSRDDLHNNLRVLVVEKLREEKTSRTVSNRPQARRSSINATTITLRLEYNGTISARRNLHLLGSSDSPASASRVAGITGSKSLLRPLKHGTIPNEVNGSSMTGWKYKCQHLCESQEGKLETKRKKRT

SEQ ID NO: 877470 - protein, 154 aa, Homo sapiens; identical to SEQ ID NO: 877468

SEQ ID NO: 877471 - protein, 154 aa, Homo sapiens; identical to SEQ ID NO: 877468

SEQ ID NO: 877472 - protein, 154 aa, Homo sapiens; identical to SEQ ID NO: 877468

SEQ ID NO: 877473 - protein, 169 aa, Homo sapiens
TLAVVSEPLRFQALGGEGQSADLRPLLTDFRLQFICAPASSLSLRRLRLRPQKEISILCPEQNRMAMSQESLTFKDVFVDFTLEEWQQLDSAQKNLYRDVMLENYSHLVSVGYLVAKPDVIFRLGPGEESWMADGGTPVRTCAGEEYSPSEIPAESLWYLTRPIITGGI

SEQ ID NO: 877474 - protein, 226 aa, Homo sapiens
SHLVSVGYLVAKPDVIFRLWGVNGQSADLRPLLTDFRLQFICAPASSLSLRRLRLRPQKEISILCPEQNRMAMSQESLTFKDVFVDFTLEEWQQLDSAQKNLYRDVMLENYSHLVSVGYLVAKPDVIFRLGPGEESWMADGGTPVRTCAGEEDRVSPCCPDWSQTPGFKQSTRLGLPKCWDYRSVTTNRGTRHAAPALEKQRCGGNLSHSQSLGLDLLPTTAVQFC

SEQ ID NO: 877475 - protein, 247 aa, Homo sapiens
TLAVVSEPLRFQALGGEGQSADLRPLLTDFRLQFICAPASSLSLRRLRLRPQKEISILCPEQNRMAMSQESLTFKDVFVDFTLEEWQQLDSAQKNLYRDVMLENYSHLVSVGYLVAKPDVIFRLGPGEESWMADGGTPVRTCAGEECIHFCLMYFEVLLLEVWQVDEQIDHYKESQDKLPWQAAFIGKETLKDESGQESRTCRKSIYLSTEFDSVRQRLPKYYSWEKAFKTSFKLSWSKWKLCKKER

SEQ ID NO: 877476 - protein, 150 aa, Homo sapiens
TLAVVSEPLRFQALGGEGQSADLRPLLTDFRLQFICAPASSLSLRRLRLRPQKEISILCPEQNRMAMSQESLTFKDVFVDFTLEEWQQLDSAQKNLYRDVMLENYSHLVSVGYLVAKPDVIFRLGPGEESWMADGGTPVRTCAGEESLAS

SEQ ID NO: 877477 - protein, 115 aa, Homo sapiens
YFTGGGDPGTDLCRCIHFCLMYFEVLLLEVWQVDEQIDHYKESQDKLPWQAAFIGKETLKDESGQESRTCRKSIYLSTEFDSVRQRLPKYYSWEKAFKTSFKLSWSKWKLCKKER

SEQ ID NO: 877478 - protein, 293 aa, Homo sapiens
MTEDSQRNFRSVYYEKVGFRGVEEKKSLEILLKDDRLDTEKLCTFSQRFPLPSMYRALVWKVLLGILPPHHESHAKVMMYRKEQYLDVLHALKVVRFVSDATPQAEVYLRMYQLESGKLPRSPSFPLEPDDEVFLAIAKAMEEMVEDSVDCYWITRRFVNQLNTKYRDSLPQLPKAFEQYLNLEDGRLLTHLRMCSAAPKLPYDLWFKRCFAGCLPESSLQRVWDKVVSGSCKILVFVAVEILLTFKIKVMALNSAEKITKFLENIPQDSSDAIVSKAIDLWHKHCGTPVHSS

SEQ ID NO: 877479 - protein, 293 aa, Homo sapiens; identical to SEQ ID NO: 877478

SEQ ID NO: 877480 - protein, 293 aa, Homo sapiens; identical to SEQ ID NO: 877478

SEQ ID NO: 877481 - protein, 293 aa, Homo sapiens; identical to SEQ ID NO: 877478

SEQ ID NO: 877482 - protein, 293 aa, Homo sapiens; identical to SEQ ID NO: 877478

SEQ ID NO: 877483 - protein, 293 aa, Homo sapiens; identical to SEQ ID NO: 877478

SEQ ID NO: 877484 - protein, 266 aa, Homo sapiens
MTEDSQRNFRSVYYEKVGFRGVEEKKSLEILLKDDRLGILPPHHESHAKVMMYRKEQYLDVLHALKVVRFVSDATPQAEVYLRMYQLESGKLPRSPSFPLEPDDEVFLAIAKAMEEMVEDSVDCYWITRRFVNQLNTKYRDSLPQLPKAFEQYLNLEDGRLLTHLRMCSAAPKLPYDLWFKRCFAGCLPESSLQRVWDKVVSGSCKILVFVAVEILLTFKIKVMALNSAEKITKFLENIPQDSSDAIVSKAIDLWHKHCGTPVHSS

SEQ ID NO: 877485 - protein, 266 aa, Homo sapiens; identical to SEQ ID NO: 877484

SEQ ID NO: 877486 - protein, 325 aa, Homo sapiens
MTEDSQRNFRSVYYEKVGFRGVEEKKSLEILLKDDRLDTEKLCTFSQRFPLPSMYRALVWKVLLGILPPHHESHAKVMMYRKEQYLDVLHALKVVRFVSDATPQAEVYLRMYQLESGKLPRSPSFPLKLGSPGFRGYIGEGLLADDSLQGPEVAQAIIMEPDDEVFLAIAKAMEEMVEDSVDCYWITRRFVNQLNTKYRDSLPQLPKAFEQYLNLEDGRLLTHLRMCSAAPKLPYDLWFKRCFAGCLPESSLQRVWDKVVSGSCKILVFVAVEILLTFKIKVMALNSAEKITKFLENIPQDSSDAIVSKAIDLWHKHCGTPVHSS

SEQ ID NO: 877487 - protein, 130 aa, Homo sapiens
MTEDSQRNFRSVYYEKVGFRGVEEKKSLEILLKDDRLDTEKLCTFSQRFPLPSMYRALVWKVLLGILPPHHESHAKVMMYRKEQYLDVLHALKVVRFVSDATPQAEVYLRMYQLESGKLPRSPSFPLSQA

SEQ ID NO: 877488 - protein, 293 aa, Homo sapiens; identical to SEQ ID NO: 877478

SEQ ID NO: 877489 - protein, 293 aa, Homo sapiens; identical to SEQ ID NO: 877478

SEQ ID NO: 877490 - protein, 293 aa, Homo sapiens; identical to SEQ ID NO: 877478

SEQ ID NO: 877491 - protein, 266 aa, Homo sapiens; identical to SEQ ID NO: 877484

SEQ ID NO: 877492 - protein, 266 aa, Homo sapiens; identical to SEQ ID NO: 877484

SEQ ID NO: 877493 - protein, 247 aa, Homo sapiens
MTEDSQRNFRSVYYEKVGFRGVEEKKSLEILLKDDRLDTEKLCTFSQRFPLPSMYRALVWKVLLGILPPHHESHAKVMMYRKEQYLDVLHALKVVRFVSDATPQAEVYLRMYQLESGKLPRSPSFPLPKAFEQYLNLEDGRLLTHLRMCSAAPKLPYDLWFKRCFAGCLPESSLQRVWDKVVSGSCKILVFVAVEILLTFKIKVMALNSAEKITKFLENIPQDSSDAIVSKAIDLWHKHCGTPVHSS

SEQ ID NO: 877494 - protein, 627 aa, Homo sapiens
MAAAVLTDRAQVSVTFDDVAVTFTKEEWGQLDLAQRTLYQEVMLENCGLLVSLGCPVPKAELICHLEHGQEPWTRKEDLSQDTCPGDKGKPKTTEPTTCEPALSEGISLQGQVTQGNSVDSQLGQAEDQDGLSEMQEGHFRPGIDPQEKSPGKMSPECDGLGTADGVCSRIGQEQVSPGDRVRSHNSCESGKDPMIQEEENNFKCSECGKVFNKKHLLAGHEKIHSGVKPYECTECGKTFIKSTHLLQHHMIHTGERPYECMECGKAFNRKSYLTQHQRIHSGEKPYKCNECGKAFTHRSNFVLHNRRHTGEKSFVCTECGQVFRHRPGFLRHYVVHSGENPYECLECGKVFKHRSYLMWHQQTHTGEKPYECSECGKVFLESAALIHHYVIHTGEKPFECLECGKAFNHRSYLKRHQRIHTGEKPFVCSECGKAFTHCSTFILHKRAHTGEKPFECKECGKAFSNRKDLIRHFSIHTGEKPYECVECGKAFTRMSGLTRHKRIHSGEKPYECVECGKSFCWSTNLIRHAIIHTGEKPYKCSECGKAFSRSSSLTQHQRMHTGKNPISVTDVGRPFTSGQTSVTLRELLLGKDFLNVTTEANILPEETSSSASDQPYQRETPQVSSL

SEQ ID NO: 877495 - protein, 120 aa, Homo sapiens
SGPLCRSLVRTEQGSRIGIPAAPLYEPDPFRGFVPGSPSSCGLSSPALQPRGLQGRRPGSGTRLPPRRRRPCVWNAVATEEAAAPSAPGSPGQPARVGHRWGPSGRPGLLCPSSAAQGVT

SEQ ID NO: 877496 - protein, 554 aa, Homo sapiens
MAEAATGFLEQLKSCIVWSWTYLWTVWFFIVLFLVYILRVPLKINDNLSTVSMFLNTLTPKFYVALTGTSSLISGLILIFEWWYFRKYGTSFIEQVSVSHLRPLLGGVDNNSSNNSNSSNGDSDSNRQSVSECKVWRNPLNLFRGAEYNRYTWVTGREPLTYYDMNLSAQDHQTFFTCDSDHLRPADAIMQKAWRERNPQARISAAHEALEINECATAYILLAEEEATTIAEAEKLFKQALKAGDGCYRRSQQLQHHGSQYEAQHRRDTNVLVYIKRRLAMCARRLGRTREAVKMMRDLMKEFPLLSMFNIHENLLEALLELQAYADVQAVLAKYDDISLPKSATICYTAALLKARAVSDKFSPEAASRRGLSTAEMNAVEAIHRAVEFNPHVPKYLLEMKSLILPPEHILKRGDSEAIAYAFFHLAHWKRVEGALNLLHCTWEGTFRMIPYPLEKGHLFYPYPICTETADRELLPSFHEVSVYPKKELPFFILFTAGLCSFTAMLALLTHQFPELMGVFAKAFLSTLFAPLNFVMEKVESILPSSLWHQLTRI

SEQ ID NO: 877497 - protein, 585 aa, Homo sapiens
MAEAATGFLEQLKSCIVWSWTYLWTVWFFIVLFLVYILRVPLKINDNLSTVSMFLNTLTPKFYVALTGTSSLISGLILIFEWWYFRKYGTSFIEQVSVSHLRPLLGGVDNNSSNNSNSSNGDSDSNRQSVSECKVWRNPLNLFRGAEYNRYTWVTGREPLTYYDMNLSAQDHQTFFTCDSDHLRPADAIMQKAWRERNPQARISAAHEALEINEIRSRVEVPLIASSTIWEIKLLPKCATAYILLAEEEATTIAEAEKLFKQALKAGDGCYRRSQQLQHHGSQYEAQHRRDTNVLVYIKRRLAMCARRLGRTREAVKMMRDLMKEFPLLSMFNIHENLLEALLELQAYADVQAVLAKYDDISLPKSATICYTAALLKARAVSDKFSPEAASRRGLSTAEMNAVEAIHRAVEFNPHVPKYLLEMKSLILPPEHILKRGDSEAIAYAFFHLAHWKRVEGALNLLHCTWEGTFRMIPYPLEKGHLFYPYPICTETADRELLPSFHEVSVYPKKELPFFILFTAGLCSFTAMLALLTHQFPELMGVFAKAMIDIFCSAEFRDWNCKSIFMRVEDELEIPPAPQSQHFQN

SEQ ID NO: 877498 - protein, 511 aa, Homo sapiens
MFGTESSVSMFLNTLTPKFYVALTGTSSLISGLILIFEWWYFRKYGTSFIEQVSVSHLRPLLGGVDNNSSNNSNSSNGDSDSNRQSVSECKVWRNPLNLFRGAEYNRYTWVTGREPLTYYDMNLSAQDHQTFFTCDSDHLRPADAIMQKAWRERNPQARISAAHEALEINECATAYILLAEEEATTIAEAEKLFKQALKAGDGCYRRSQQLQHHGSQYEAQHRRDTNVLVYIKRRLAMCARRLGRTREAVKMMRDLMKEFPLLSMFNIHENLLEALLELQAYADVQAVLAKYDDISLPKSATICYTAALLKARAVSDKFSPEAASRRGLSTAEMNAVEAIHRAVEFNPHVPKYLLEMKSLILPPEHILKRGDSEAIAYAFFHLAHWKRVEGALNLLHCTWEGTFRMIPYPLEKGHLFYPYPICTETADRELLPSFHEVSVYPKKELPFFILFTAGLCSFTAMLALLTHQFPELMGVFAKAFLSTLFAPLNFVMEKVESILPSSLWHQLTRI

SEQ ID NO: 877499 - protein, 229 aa, Homo sapiens
LRLHVFPELSTDISLPKSATICYTAALLKARAVSDKFSPEAASRRGLSTAEMNAVEAIHRAVEFNPHVPKYLLEMKSLILPPEHILKRGDSEAIAYAFFHLAHWKRVEGALNLLHCTWEGTFRMIPYPLEKGHLFYPYPICTETADRELLPSFHEVSVYPKKELPFFILFTAGLCSFTAMLALLTHQFPELMGVFAKAFLSTLFAPLNFVMEKVESILPSSLWHQLTRI

SEQ ID NO: 877500 - protein, 209 aa, Homo sapiens
MFWLQLLSSGILQLVAAWGTSTNWSWAVGVISTAYHQDKQRSYLLEMKSLILPPEHILKRGDSEAIAYAFFHLAHWKRVEGALNLLHCTWEGTFRMIPYPLEKGHLFYPYPICTETADRELLPSFHEVSVYPKKELPFFILFTAGLCSFTAMLALLTHQFPELMGVFAKAMIDIFCSAEFRDWNCKSIFMRVEDELEIPPAPQSQHFQN

SEQ ID NO: 877501 - protein, 402 aa, Homo sapiens
MQKAWRERNPQARISAAHEALEINECATAYILLAEEEATTIAEAEKLFKQALKAGDGCYRRSQQLQHHGSQYEAQHRRDTNVLVYIKRRLAMCARRLGRTREAVKMMRDLMKEFPLLSMFNIHENLLEALLELQAYADVQAVLAKYDDISLPKSATICYTAALLKARAVSDKFSPEAASRRGLSTAEMNAVEAIHRAVEFNPHVPKYLLEMKSLILPPEHILKRGDSEAIAYAFFHLAHWKRVEGALNLLHCTWEGTFRMIPYPLEKGHLFYPYPICTETADRELLPSFHEVSVYPKKELPFFILFTAGLCSFTAMLALLTHQFPELMGVFAKAMIDIFCSAEFRDWNCKSIFMRVEDELEIPPAPQSQHIPMRCNKNSCSDTRFCCLFLFPDFLQPSPFRA

SEQ ID NO: 877502 - protein, 342 aa, Homo sapiens
MQKAWRERNPQARISAAHEALEINECATAYILLAEEEATTIAEAEKLFKQALKAGDGCYRRSQQLQHHGSQYEAQHRRDTNVLVYIKRRLAMCARRLGRTREAVKMMRDLMKEFPLLSMFNIHENLLEALLELQAYADVQAVLAKYDDISLPKSATICYTAALLKARAVSDKFSPEAASRRGLSTAEMNAVEAIHRAVEFNPHVPKYLLEMKSLILPPEHILKRGDSEAIAYAFFHLAHWKRVEGALNLLHCTWEGTFRMIPYPLEKGHLFYPYPICTETADRELLPSFHEVSVYPKKELPFFILFTAGLCSFTAMLALLTHQFPELMGVFAKAVSVCLEGG

SEQ ID NO: 877503 - protein, 534 aa, Homo sapiens
MFGTESSVSMFLNTLTPKFYVALTGTSSLISGLILIFEWWYFRKYGTSFIEQVSVSHLRPLLGGVDNNSSNNSNSSNGDSDSNRQSVSECKVWRNPLNLFRGAEYNRYTWVTGREPLTYYDMNLSAQDHQTFFTCDSDHLRPADAIMQKAWRERNPQARISAAHEALEINEIRSRVEVPLIASSTIWEIKLLPKCATAYILLAEEEATTIAEAEKLFKQALKAGDGCYRRSQQLQHHGSQYEAQHRRDTNVLVYIKRRLAMCARRLGRTREAVKMMRDLMKEFPLLSMFNIHENLLEALLELQAYADVQAVLAKYDDISLPKSATICYTAALLKARAVSDKFSPEAASRRGLSTAEMNAVEAIHRAVEFNPHVPKYLLEMKSLILPPEHILKRGDSEAIAYAFFHLAHWKRVEGALNLLHCTWEGTFRMIPYPLEKGHLFYPYPICTETADRELLPSFHEVSVYPKKELPFFILFTAGLCSFTAMLALLTHQFPELMGVFAKAFLSTLFAPLNFVMEKVESILPSSLWHQLTRI

SEQ ID NO: 877504 - protein, 365 aa, Homo sapiens
MQKAWRERNPQARISAAHEALEINECATAYILLAEEEATTIAEAEKLFKQALKAGDGCYRRSQQLQHHGSQYEAQHRRDTNVLVYIKRRLAMCARRLGRTREAVKMMRDLMKEFPLLSMFNIHENLLEALLELQAYADVQAVLAKYDDISLPKSATICYTAALLKARAVSDKFSPEAASRRGLSTAEMNAVEAIHRAVEFNPHVPKYLLEMKSLILPPEHILKRGDSEAIAYAFFHLAHWKRVEGALNLLHCTWEGTFRMIPYPLEKGHLFYPYPICTETADRELLPSFHEVSVYPKKELPFFILFTAGLCSFTAMLALLTHQFPELMGVFAKAFLSTLFAPLNFVMEKVESILPSSLWHQLTRI

SEQ ID NO: 877505 - protein, 338 aa, Homo sapiens
MQKAWRERNPQARISAAHEALEINECATAYILLAEEEATTIAEAEKLFKQALKAGDGCYRRSQQLQHHGSQYEAQHRRDTNVLVYIKRRLAMCARRLGRTREAVKMMRDLMKEFPLLSMFNIHENLLEALLELQAYADVQAVLAKYDDISLPKSATICYTAALLKARAVSDKFSPEAASRRGLSTAEMNAVEAIHRAVEFNPHVPKYLLEMKSLILPPEHILKRGDSEAIAYAFFHLAHWKRVEGALNLLHCTWEGTFRMIPYPLEKGHLFYPYPICTETADRELLPSMLALLTHQFPELMGVFAKAFLSTLFAPLNFVMEKVESILPSSLWHQLTRI

SEQ ID NO: 877506 - protein, 373 aa, Homo sapiens
MQKAWRERNPQARISAAHEALEINECATAYILLAEEEATTIAEAEKLFKQALKAGDGCYRRSQQLQHHGSQYEAQHRRDTNVLVYIKRRLAMCARRLGRTREAVKMMRDLMKEFPLLSMFNIHENLLEALLELQAYADVQAVLAKYDDISLPKSATICYTAALLKARAVSDKFSPEAASRRGLSTAEMNAVEAIHRAVEFNPHVPKYLLEMKSLILPPEHILKRGDSEAIAYAFFHLAHWKRVEGALNLLHCTWEGTFRMIPYPLEKGHLFYPYPICTETADRELLPSFHEVSVYPKKELPFFILFTAGLCSFTAMLALLTHQFPELMGVFAKAMIDIFCSAEFRDWNCKSIFMRVEDELEIPPAPQSQHFQN

SEQ ID NO: 877507 - protein, 261 aa, Homo sapiens
SRPIGSRLRRRGGKCGYMSRRQSQSALSLVPVVQPAARAGMWAGGRSSCQAEVLRATRGGAARGNAAPGRALEMVPGAAGWCCLVLWLPACVAAHGFRIHDYLYFQVLSPGDIRYIFTATPAKDFGGIFHTRYEQIHLVPAEPPEACGELSNGFFIQDQIALVERGGCSFLSKTRVVQEHGGRAVIISDNAVDNDSFYVEMIQDSTQRTADIPALFLLGRDGYMIRRSLEQHGLPWAIISIPVNVTSIPTFELLQPPWTFW

SEQ ID NO: 877508 - protein, 140 aa, Homo sapiens
SRPIGSRLRRRGGKCGYMSRRQSQSALSLVPVVQPAARAGMWAGGRSSCQAEVLRATRGGAARGNAAPGRALEMVPGAAGWCCLVLWLPACVAAHGFRIHDYLYFQVLSPGDIRYIFTATPAKGVSCYKKRQETGPRASG

SEQ ID NO: 877509 - protein, 181 aa, Homo sapiens
GGREVQAPVVFLLVPLFRHGPNQDNALQGGVWAIRKSPATLPKDFGGIFHTRYEQIHLVPAEPPEACGELSNGFFIQDQIALVERGGCSFLSKTRVVQEHGGRAVIISDNAVDNDSFYVEMIQDSTQRTADIPALFLLGRDGYMIRRSLEQHGLPWAIISIPVNVTSIPTFELLQPPWTFW

SEQ ID NO: 877510 - protein, 76 aa, Homo sapiens
SGEGGARTCLSFGLITTSSRGCSFLSKTRVVQEHGGRAVIISDNAVDNDSFYVEMIQDSTQRTADIPALFLLGRDG

SEQ ID NO: 877511 - protein, 261 aa, Homo sapiens; identical to SEQ ID NO: 877507

SEQ ID NO: 877512 - protein, 177 aa, Homo sapiens
SRPIGSRLRRRGGKCGYMSRRQSQSALSLVPVVQPAARAGMWAGGRSSCQAEVLRATRGGAARGNAAPGRALEMVPGAAGWCCLVLWLPACVAAHGFRIHDYLYFQVLSPGDIRYIFTATPAKDFGGIFHTRYEQIHLVPAEPPEACGELSNGFFIQDQIALVERGLGWSRSTAGGR

SEQ ID NO: 877513 - protein, 120 aa, Homo sapiens
VLRAKMANWFHQAKQAQTIATQDGSLISPGPPMRQANEIFTWTHHHQHFKKTVVWMIKTIYHPSQPAPFQKKEHVSAPTPTKKSDCFKTGTVRWANFLNVSQIFLFISSYKRCFPQIPRY

SEQ ID NO: 877514 - protein, 1171 aa, Homo sapiens
MENNLKTCPKEDGDFVSDKIKFKIEEEDDDGIPPDSLERMDFKSEQEDMKQTDSGGERAGLGGTGCSCKPPGKYLSAESEDDYGALFSQYSSTLYDVAMEAVTQSLLSSRNMSSRKKSPAWKHFFISPRDSTKAICMYCVKEFSRGKNEKDLSTSCLMRHVRRAHPTVLIQENGSVSAVSSFPSPSLLLPPQPADAGDLSTILSPIKLVQKVASKIPSPDRITEESVSVVSSEEISSDMSVSEKCGREEALVGSSPHLPALHYDEPAENLAEKSLPLPKSTSGSRRRSAVWKHFYLSPLDNSKAVCIHCMNEFSRGKNGKDLGTSCLIRHMWRAHRAIVLQENGGTGIPPLYSTPPTLLPSLLPPEGELSSVSSSPVKPVRESPSASSSPDRLTEDLQSHLNPGDGLMEDVAAFSSSDDVGEASASSPEKQQADGLSPRLFESGAIFQQNKKVMKRLKSEVWHHFSLAPMDSLKAECRYCGCAISRGKKGDVGTSCLMRHLYRRHPEVVGSQKGFLGASLANSPYATLASAESSSSKLTDLPTVVTKNNQVMFPVNSKKTSKLWNHFSICSADSTKVVCLHCGRTISRGKKPTNLGTSCLLRHLQRFHSNVLKTEVSETARPSSPDTRVPRGTELSGASSFDDTNEKFYDSHPVAKKITSLIAEMIALDLQPYSFVDNVGFNRLLEYLKPQYSLPAPSYFSRTAIPGMYDNVKQIIMSHLKEAESGVIHFTSGIWMSNQTREYLTLTAHWVSFESPARPRCDDHHCSALLDVSQVDCDYSGNSIQKQLECWWEAWVTSTGLQVGITVTDNASIGKTLNEGEHSSVQCFSHTVNLIVSEAIKSQRMVQNLLSLARKICERVHRSPKAKEKLAELQREYALPQHHLIQDVPSKWSTSFHMLERLIEQKRAINEMSVECNFRELISCDQWEVMQSVCRALKPFEAASREMSTQMSTLSQVIPMVHILNRKVEMLFEETMGIDTMLRSLKEAMVSRLSATLHDPRYVFATLLDPRYKASLFTEEEAEQYKQDLIRELELMNSTSEDVAASHRCDAGSPSKDSAAEENLWSLVAKVKKKDPREKLPEAMVLAYLEEEVLEHSCDPLTYWNLKKASWPGLSALAVRFLGCPPSIVPSEKLFNTPTENGSLGQSRLMMEHFEKLIFLKVNLPLIYFQY

SEQ ID NO: 877515 - protein, 1008 aa, Homo sapiens
AEQARKAAEWEGWSTVAGCPCPRSPATRWPADAGDLSTILSPIKLVQKVASKIPSPDRITEESVSVVSSEEISSDMSVSEKCGREEALVGSSPHLPALHYDEPAENLAEKSLPLPKSTSGSRRRSAVWKHFYLSPLDNSKAVCIHCMNEFSRGKNGKDLGTSCLIRHMWRAHRAIVLQENGGTGIPPLYSTPPTLLPSLLPPEGELSSVSSSPVKPVRESPSASSSPDRLTEDLQSHLNPGDGLMEDVAAFSSSDDVGEASASSPEKQQADGLSPRLFESGAIFQQNKKVMKRLKSEVWHHFSLAPMDSLKAECRYCGCAISRGKKGDVGTSCLMRHLYRRHPEVVGSQKGFLGASLANSPYATLASAESSSSKLTDLPTVVTKNNQVMFPVNSKKTSKLWNHFSICSADSTKVVCLHCGRTISRGKKPTNLGTSCLLRHLQRFHSNVLKTEVSETARPSSPDTRVPRGTELSGASSFDDTNEKFYDSHPVAKKITSLIAEMIALDLQPYSFVDNVGFNRLLEYLKPQYSLPAPSYFSRTAIPGMYDNVKQIIMSHLKEAESGVIHFTSGIWMSNQTREYLTLTAHWVSFESPARPRCDDHHCSALLDVSQVDCDYSGNSIQKQLECWWEAWVTSTGLQVGITVTDNASIGKTLNEGEHSSVQCFSHTVNLIVSEAIKSQRMVQNLLSLARKICERVHRSPKAKEKLAELQREYALPQHHLIQDVPSKWSTSFHMLERLIEQKRAINEMSVECNFRELISCDQWEVMQSVCRALKPFEAASREMSTQMSTLSQVIPMVHILNRKVEMLFEETMGIDTMLRSLKEAMVSRLSATLHDPRYVFATLLDPRYKASLFTEEEAEQYKQDLIRELELMNSTSEDVAASHRCDAGSPSKDSAAEENLWSLVAKVKKKDPREKLPEAMVLAYLEEEVLEHSCDPLTYWNLKKASWPGLSALAVRFLGCPPSIVPSEKLFNTPTENGSLGQSRLMMEHFEKLIFLKVNLPLIYFQY

SEQ ID NO: 877516 - protein, 628 aa, Homo sapiens
KLVRAGLKFGRGLIEVYSKLWNHFSICSADSTKVVCLHCGRTISRGKKPTNLGTSCLLRHLQRFHSNVLKTEVSETARPSSPDTRVPRGTELSGASSFDDTNEKFYDSHPVAKKITSLIAEMIALDLQPYSFVDNVGFNRLLEYLKPQYSLPAPSYFSRTAIPGMYDNVKQIIMSHLKEAESGVIHFTSGIWMSNQTREYLTLTAHWVSFESPARPRCDDHHCSALLDVSQVDCDYSGNSIQKQLECWWEAWVTSTGLQVGITVTDNASIGKTLNEGEHSSVQCFSHTVNLIVSEAIKSQRMVQNLLSLARKICERVHRSPKAKEKLAELQREYALPQHHLIQDVPSKWSTSFHMLERLIEQKRAINEMSVECNFRELISCDQWEVMQSVCRALKPFEAASREMSTQMSTLSQVIPMVHILNRKVEMLFEETMGIDTMLRSLKEAMVSRLSATLHDPRYVFATLLDPRYKASLFTEEEAEQYKQDLIRELELMNSTSEDVAASHRCDAGSPSKDSAAEENLWSLVAKVKKKDPREKLPEAMVLAYLEEEVLEHSCDPLTYWNLKKASWPGLSALAVRFLGCPPSIVPSEKLFNTPTENGSLGQSRLMMEHFEKLIFLKVNLPLIYFQY

SEQ ID NO: 877517 - protein, 1171 aa, Homo sapiens; identical to SEQ ID NO: 877514

SEQ ID NO: 877518 - protein, 822 aa, Homo sapiens
MLSRAGFNLAEACRRVKGELSSVSSSPVKPVRESPSASSSPDRLTEDLQSHLNPGDGLMEDVAAFSSSDDVGEASASSPEKQQADGLSPRLFESGAIFQQNKKVMKRLKSEVWHHFSLAPMDSLKAECRYCGCAISRGKKGDVGTSCLMRHLYRRHPEVVGSQKGFLGASLANSPYATLASAESSSSKLTDLPTVVTKNNQVMFPVNSKKTSKLWNHFSICSADSTKVVCLHCGRTISRGKKPTNLGTSCLLRHLQRFHSNVLKTEVSETARPSSPDTRVPRGTELSGASSFDDTNEKFYDSHPVAKKITSLIAEMIALDLQPYSFVDNVGFNRLLEYLKPQYSLPAPSYFSRTAIPGMYDNVKQIIMSHLKEAESGVIHFTSGIWMSNQTREYLTLTAHWVSFESPARPRCDDHHCSALLDVSQVDCDYSGNSIQKQLECWWEAWVTSTGLQVGITVTDNASIGKTLNEGEHSSVQCFSHTVNLIVSEAIKSQRMVQNLLSLARKICERVHRSPKAKEKLAELQREYALPQHHLIQDVPSKWSTSFHMLERLIEQKRAINEMSVECNFRELISCDQWEVMQSVCRALKPFEAASREMSTQMSTLSQVIPMVHILNRKVEMLFEETMGIDTMLRSLKEAMVSRLSATLHDPRYVFATLLDPRYKASLFTEEEAEQYKQDLIRELELMNSTSEDVAASHRCDAGSPSKDSAAEENLWSLVAKVKKKDPREKLPEAMVLAYLEEEVLEHSCDPLTYWNLKKASWPGLSALAVRFLGCPPSIVPSEKLFNTPTENGSLGQSRLMMEHFEKLIFLKVNLPLIYFQY

SEQ ID NO: 877519 - protein, 1171 aa, Homo sapiens; identical to SEQ ID NO: 877514

SEQ ID NO: 877520 - protein, 1177 aa, Homo sapiens
MENNLKTCPKEDGDFVSDKIKFKIEEEDDDGIPPDSLERMDFKSEQEDMKQTDSGGERAGLGGTGCSCKPPGKYLSAESEDDYGALFSQYSSTLYDVAMEAVTQSLLSSRNMSSRKKSPAWKHFFISPRDSTKAICMYCVKEFSRGKNEKDLSTSCLMRHVRRAHPTVLIQENGSVSAVSSFPSPSLLLPPQPADAGDLSTILSPIKLVQKVASKIPSPDRITEESVSVVSSEEISSDMSVSEKCGREEALVGSSPHLPALHYDEPAENLAEKSLPLPKSTSGSRRRSAVWKHFYLSPLDNSKAVCIHCMNEFSRGKNGKDLGTSCLIRHMWRAHRAIVLQENGGTGIPPLYSTPPTLLPSLLPPEGELSSVSSSPVKPVRESPSASSSPDRLTEDLQSHLNPGDGLMEDVAAFSSSDDVGEASASSPEKQQADGLSPRLFESGAIFQQNKKVMKRLKSEVWHHFSLAPMDSLKAECRYCGCAISRGKKGDVGTSCLMRHLYRRHPEVVGSQKGFLGASLANSPYATLASAESSSSKLTDLPTVVTKNNQVMFPVNSKKTSKLWNHFSICSADSTKVVCLHCGRTISRGKKPTNLGTSCLLRHLQRFHSNVLKTEVSETARPSSPDTRVPRGTELSGASSFDDTNEKFYDSHPVAKKITSLIAEMIALDLQPYSFVDNVGFNRLLEYLKPQYSLPAPSYFSRTAIPGMYDNVKQIIMSHLKEAESGVIHFTSGIWMSNQTREYLTLTAHWVSFESPARPRCDDHHCSALLDVSQVDCDYSGNSIQKQLECWWEAWVTSTGLQVGITVTDNASIGKTLNEGEHSSVQCFSHTVNLIVSEAIKSQRMVQNLLSLARKICERVHRSPKAKEKLAELQREYALPQHHLIQDVPSKWSTSFHMLERLIEQKRAINEMSVECNFRELISCDQWEVMQSVCRALKPFEAASREMSTQMSTLSQVIPMVHILNRKVEMLFEETMGIDTMLRSLKEAMVSRLSATLHDPRYVFATLLDPRYKASLFTEEEAEQYKQDLIRELELMNSTSEDVAASHRCDAGSPSKDSAAEENLWSLVAKVKKKDPREKLPEAMVLAYLEEEVLEHSCDPLTYWNLKKASWPGLSALAVRFLGCPPSIVPSEKLFNTPIGQRRGCPSVSSPEGLPWPQPLCTLFLVSSYPVAVRLFP

SEQ ID NO: 877521 - protein, 837 aa, Homo sapiens
MSLSHLYRDGEGRIDDDDDERENFEITDWDLQNEFNPNRQRHWQTKEEATYGVWAERDSDDERPSFGGKRARDYSAPVNFISAGLKKGAAEEAELEDSDDEEKPVKQDDFPKDFGPRKLKTGGNFKPSQKGFAGGTKSFMDFGSWERHTKGIGQKLLQKMGYVPGRGLGKNAQGIINPIEAKQRKGKGAVGAYGSERTTQSMQDFPVVDSEEEAEEEFQKELSQWRKDPSGSKKKPKYSYKTVEELKAKGRISKKLTAPQKELSQVKVIDMTGREQKVYYSYSQISHKHNVPDDGLPLQSQQLPQSGKEAKAPGFALPELEHNLQLLIDLTEQEIIQNDRQLQYERDMVVNLFHELEKMTEVLDHEERVISNLSKVLEMVEECERRMQPDCSNPLTLDECARIFETLQDKYYEEYRMSDRVDLAVAIVYPLMKEYFKEWDPLKDCTYGTEIISKWKSLLENDQLLSHGGQDLSADAFHRLIWEVWMPFVRNIVTQWQPRNCDPMVDFLDSWVHIIPVWILDNILDQLIFPKLQKEVENWNPLTDTVPIHSWIHPWLPLMQARLEPLYSPIRSKLSSALQKWHPSDSSAKLILQPWKDVFTPGSWEAFMVKNIVPKLGMCLGELVINPHQQHMDAFYWVIDWEGMISVSSLVGLLEKHFFPKWLQVLCSWLSNSPNYEEITKWYLGWKSMFSDQVLAHPSVKDKFNEALDIMNRAVSSNVGAYMQPGARENIAYLTHTERRKDFQYEAMQERREAENMAQRGIGVAASSVPMNFKDLIETKAEEHNIVFMPVIGKRHEGKQLYTFGRIVIYIDRGVVFVQGEKTWVPTSLQSLIDMAK

SEQ ID NO: 877522 - protein, 196 aa, Homo sapiens
MATSEILPSFVATMDASNFSFWQVLCSWLSNSPNYEEITKWYLGWKSMFSDQVLAHPSVKDKFNEALDIMNRAVSSNVGAYMQPGARENIAYLTHTERRKDFQYEAMQERREAENMAQRGIGVAASSVPMNFKDLIETKAEEHNIVFMPVIGKRHEGKQLYTFGRIVIYIDRGVVFVQGEKTWVPTSLQSLIDMAK

SEQ ID NO: 877523 - protein, 837 aa, Homo sapiens; identical to SEQ ID NO: 877521

SEQ ID NO: 877524 - protein, 837 aa, Homo sapiens; identical to SEQ ID NO: 877521

SEQ ID NO: 877525 - protein, 721 aa, Homo sapiens [sequence omitted]

SEQ ID NO: 877526 - protein, 515 aa, Homo sapiens
MSLSHLYRDGEGRIDDDDDERENFEITDWDLQNEFNPNRQRHWQTKEEATYGVWAERDSDDERPSFGGKRARDYSAPVNFISAGLKKGAAEEAELEDSDDEEKPVKQDDFPKDFGPRKLKTGGNFKPSQKGFAGGTKSFMDFGSWERHTKGIGQKLLQKMGYVPGRGLGKNAQGIINPIEAKQRKGKGAVGAYGSERTTQSMQDFPVVDSEEEAEEEFQKELSQWRKDPSGSKKKPKYSYKTVEELKAKGRISKKLTAPQKELSQVKVIDMTGREQKVYYSYSQISHKHNVPDDGLPLQSQQLPQSGKEAKAPGFALPELEHNLQLLIDLTEQEIIQNDRQLQYERDMVVNLFHELEKMTEVLDHEERVISNLSKVLEMVEECERRMQPDCSNPLTLDECARIFETLQDKYYEEYRMSDRVDLAVAIVYPLMKEYFKEWDPLKDCTYGTEIISKWKSLLENDQLLSHGGQDLSADAFHRLIWEVWMPFVRNIVTQWLLGSIHGQKHSAQAGDVSW

SEQ ID NO: 877527 - protein, 721 aa, Homo sapiens [sequence omitted]

SEQ ID NO: 877528 - protein, 667 aa, Homo sapiens
MSLSHLYRDGEGRIDDDDDERENFEITDWDLQNEFNPNRQRHWQTKEEATYGVWAERDSDDERPSFGGKRARDYSAPVNFISAGLKKGAAEEAELEDSDDEEKPVKQDDFPKDFGPRKLKTGGNFKPSQKGFAGGTKSFMDFGSWERHTKGIGQKLLQKMGYVPGRGLGKNAQGIINPIEAKQRKGKGAVGAYGSERTTQSMQDFPVVDSEEEAEEEFQKELSQWRKDPSGSKKKPKYSYKTVEELKAKGRISKKLTAPQKELSQVKVIDMTGREQKVYYSYSQISHKHNVPDDGLPLQSQQLPQSGKEAKAPGFALPELEHNLQLLIDLTEQEIIQNDRQLQYERDMVVNLFHELEKMTEVLDHEERVISNLSKVLEMVEECERRMQPDCSNPLTLDECARIFETLQDKYYEEYRMSDRVDLAVAIVYPLMKEYFKEWDPLKDCTYGTEIISKWKSLLENDQLLSHGGQDLSADAFHRLIWEVWMPFVRNIVTQWQPRNCDPMVDFLDSWVHIIPVWILDNILDQLIFPKLQKEVENWNPLTDTVPIHSWIHPWLPLMQARLEPLYSPIRSKLSSAMQERREAENMAQRGIGVAASSVPMNFKDLIETKAEEHNIVFMPVIGKRHEGKQLYTFGRIVIYIDRGVVFVQGEKTWVPTSLQSLIDMAK

SEQ ID NO: 877529 - protein, 837 aa, Homo sapiens; identical to SEQ ID NO: 877521

SEQ ID NO: 877530 - protein, 837 aa, Homo sapiens; identical to SEQ ID NO: 877521

SEQ ID NO: 877531 - protein, 772 aa, Homo sapiens
LTGADEVDWRRVVNFISAGLKKGAAEEAELEDSDDEEKPVKQDDFPKDFGPRKLKTGGNFKPSQKGFAGGTKSFMDFGSWERHTKGIGQKLLQKMGYVPGRGLGKNAQGIINPIEAKQRKGKGAVGAYGSERTTQSMQDFPVVDSEEEAEEEFQKELSQWRKDPSGSKKKPKYSYKTVEELKAKGRISKKLTAPQKELSQVKVIDMTGREQKVYYSYSQISHKHNVPDDGLPLQSQQLPQSGKEAKAPGFALPELEHNLQLLIDLTEQEIIQNDRQLQYERDMVVNLFHELEKMTEVLDHEERVISNLSKVLEMVEECERRMQPDCSNPLTLDECARIFETLQDKYYEEYRMSDRVDLAVAIVYPLMKEYFKEWDPLKDCTYGTEIISKWKSLLENDQLLSHGGQDLSADAFHRLIWEVWMPFVRNIVTQWQPRNCDPMVDFLDSWVHIIPVWILDNILDQLIFPKLQKEVENWNPLTDTVPIHSWIHPWLPLMQARLEPLYSPIRSKLSSALQKWHPSDSSAKLILQPWKDVFTPGSWEAFMVKNIVPKLGMCLGELVINPHQQHMDAFYWVIDWEGMISVSSLVGLLEKHFFPKWLQVLCSWLSNSPNYEEITKWYLGWKSMFSDQVLAHPSVKDKFNEALDIMNRAVSSNVGAYMQPGARENIAYLTHTERRKDFQYEAMQERREAENMAQRGIGVAASSVPMNFKDLIETKAEEHNIVFMPVIGKRHEGKQLYTFGRIVIYIDRGVVFVQGEKTWVPTSLQSLIDMAK

SEQ ID NO: 877532 - protein, 490 aa, Homo sapiens
MVVNLFHELEKMTEVLDHEERVISNLSKVLEMVEECERRMQPDCSNPLTLDECARIFETLQDKYYEEYRMSDRVDLAVAIVYPLMKEYFKEWDPLKDCTYGTEIISKWKSLLENDQLLSHGGQDLSADAFHRLIWEVWMPFVRNIVTQWQPRNCDPMVDFLDSWVHIIPVWILDNILDQLIFPKLQKEVENWNPLTDTVPIHSWIHPWLPLMQARLEPLYSPIRSKLSSALQKWHPSDSSAKLILQPWKDVFTPGSWEAFMVKNIVPKLGMCLGELVINPHQQHMDAFYWVIDWEGMISVSSLVGLLEKHFFPKWLQVLCSWLSNSPNYEEITKWYLGWKSMFSDQVLAHPSVKDKFNEALDIMNRAVSSNVGAYMQPGARENIAYLTHTERRKDFQYEAMQERREAENMAQRGIGVAASSVPMNFKDLIETKAEEHNIVFMPVIGKRHEGKQLYTFGRIVIYIDRGVVFVQGEKTWVPTSLQSLIDMAK

SEQ ID NO: 877533 - protein, 792 aa, Homo sapiens
  misc_feature (764)..(764): Xaa can be any naturally occurring amino acid
MSLSHLYRDGEGRIDDDDDERENFEITDWDLQNEFNPNRQRHWQTKEEATYGVWAERDSDDERPSFGGKRARDYSAPVNFISAGLKKGAAEEAELEDSDDEEKPVKQDDFPKDFGPRKLKTGGNFKPSQKGFAGGTKSFMDFGSWERHTKGIGQKLLQKMGYVPGRGLGKNAQGIINPIEAKQRKGKGAVGAYGSERTTQSMQDFPVVDSEEEAEEEFQKELSQWRKDPSGSKKKPKYSYKTVEELKAKGRISKKLTAPQKELSQVKVIDMTGREQKVYYSYSQISHKHNVPDDGLPLQSQQLPQSGKEAKAPGFALPELEHNLQLLIDLTEQEIIQNDRQLQYERDMVVNLFHELEKMTEVLDHEERVISNLSKVLEMVEECERRMQPDCSNPLTLDECARIFETLQDKYYEEYRMSDRVDLAVAIVYPLMKEYFKEWDPLKDCTYGTEIISKWKSLLENDQLLSHGGQDLSADAFHRLIWEVWMPFVRNIVTQWQPRNCDPMVDFLDSWVHIIPVWILDNILDQLIFPKLQKEVENWNPLTDTVPIHSWIHPWLPLMQARLEPLYSPIRSKLSSALQKWHPSDSSAKLILQPWKDVFTPGSWEAFMVKNIVPKLGMCLGELVINPHQQHMDAFYWVIDWEGMISVSSLVGLLEKHFFPKWLQVLCSWLSNSPNYEEITKWYLGWKSMFSDQVLAHPSVKDKFNEALDIMNRAVSSNVGAYMQPGARENIAYLTHTERRKDFQYEAMQERREAENMAAAAVQXRVVARDLGGLGADQGDLATLRSVAAGEA

SEQ ID NO: 877534 - protein, 128 aa, Homo sapiens
MSLSHLYRDGEGRIDDDDDERENFEITDWDLQNEFNPNRQRHWQTKEEATYGVWAERDSDDERPSFGGKRARDYSAPVNFISAGLKKGAAEEAELEDSDDEEKPVKQDDFPKDFGPRKLKTSLIDMAK

SEQ ID NO: 877535 - protein, 920 aa, Homo sapiens
MFNKSFGTPFGGGTGGFGTTSTFGQNTGFGTTSGGAFGTSAFGSSNNTGGLFGNSQTKPGGLFGTSSFSQPATSTSTGFGFGTSTGTANTLFGTASTGTSLFSSQNNAFAQNKPTGFGNFGTSTSSGGLFGTTNTTSNPFGSTSGSLFGPSSFTAAPTGTTIKFNPPTGTDTMVKAGVSTNISTKHQCITAMKEYESKSLEELRLEDYQANRKGPQNQVGAGTTTGLFGSSPATSSATGLFSSSTTNSGFAYGQNKTAFGTSTTGFGTNPGGLFGQQNQQTTSLFSKPFGQATTTQNTGFSFGNTSTIGQPSTNTMGLFGVTQASQPGGLFGTATNTSTGTAFGTGTGLFGQTNTGFGAVGSTLFGNNKLTTFGSSTTSAPSFGTTSGGLFGFGTNTSGNSIFGSKPAPGTLGTGLGAGFGTALGAGQASLFGNNQPKIGGPLGTGAFGAPGFNTTTATLGFGAPQAPVALTDPNASAAQQAVLQQHINSLTYSPFGDSPLFRNPMSDPKKKEERLKPTNPAAQKALTTPTHYKLTPRPATRVRPKALQTTGTAKSHLFDGLDDDEPSLANGAFMPKKSIKKLVLKNLNNSNLFSPVNRDSENLASPSEYPENGERFSFLSKPVDENHQQDGDEDSLVSHFYTNPIAKPIPQTPESAGNKHSNSNSVDDTIVALNMRAALRNGLEGSSEETSFHDESLQDDREEIENNSYHMHPAGIILTKVGYYTIPSMDDLAKITNEKGECIVSDFTIGRKGYGSIYFEGDVNLTNLNLDDIVHIRRKEVVVYLDDNQKPPVGEGLNRKAEVTLDGVWPTDKTSRCLIKSPDRLADINYEGRLEAVSRKQGAQFKEYRPETGSWVFKVSHFSKYGLQDSDEEEEEHPSKTSTKKLKTAPLPPASQTTPLQMALNGKPAPPPQVEKKGQ

SEQ ID NO: 877536 - protein, 569 aa, Homo sapiens
MFNKSFGTPFGGGTGGFGTTSTFGQNTGFGTTSGGAFGTSAFGSSNNTGGLFGNSQTKPGGLFGTSSFSQPATSTSTGFGFGTSTGTANTLFGTASTGTSLFSSQNNAFAQNKPTGFGNFGTSTSSGGLFGTTNTTSNPFGSTSGSLFGPSSFTAAPTGTTIKFNPPTGTDTMVKAGVSTNISTKHQCITAMKEYESKSLEELRLEDYQANRKGPQNQVGAGTTTGLFGSSPATSSATGLFSSSTTNSGFAYGQNKTAFGTSTTGFGTNPGGLFGQQNQQTTSLFSKPFGQATTTQNTGFSFGNTSTIGQPSTNTMGLFGVTQASQPGGLFGTATNTSTGTAFGTGTGLFGQTNTGFGAVGSTLFGNNKLTTFGSSTTSAPSFGTTSGGLFGNKPTLTLGTNTNTSNFGFGTNTSGNSIFGSKPAPGTLGTGLGAGFGTALGAGQASLFGNNQPKIGGPLGTGAFGAPGFNTTTATLGFGAPQAPVVDVALNQPDMCVYRRGRKKRVPYTKLQLKELENEYAINKFINKDKRRRISAATNLSERQVTIWFQNRRVKDKKIVSKLKDTVS

SEQ ID NO: 877537 - protein, 1695 aa, Homo sapiens
MFNKSFGTPFGGGTGGFGTTSTFGQNTGFGTTSGGAFGTSAFGSSNNTGGLFGNSQTKPGGLFGTSSFSQPATSTSTGFGFGTSTGTANTLFGTASTGTSLFSSQNNAFAQNKPTGFGNFGTSTSSGGLFGTTNTTSNPFGSTSGSLFGPSSFTAAPTGTTIKFNPPTGTDTMVKAGVSTNISTKHQCITAMKEYESKSLEELRLEDYQANRKGPQNQVGAGTTTGLFGSSPATSSATGLFSSSTTNSGFAYGQNKTAFGTSTTGFGTNPGGLFGQQNQQTTSLFSKPFGQATTTQNTGFSFGNTSTIGQPSTNTMGLFGVTQASQPGGLFGTATNTSTGTAFGTGTGLFGQTNTGFGAVGSTLFGNNKLTTFGSSTTSAPSFGTTSGGLFGFGTNTSGNSIFGSKPAPGTLGTGLGAGFGTALGAGQASLFGNNQPKIGGPLGTGAFGAPGFNTTTATLGFGAPQAPVALTDPNASAAQQAVLQQHINSLTYSPFGDSPLFRNPMSDPKKKEERLKPTNPAAQKALTTPTHYKLTPRPATRVRPKALQTTGTAKSHLFDGLDDDEPSLANGAFMPKKSIKKLVLKNLNNSNLFSPVNRDSENLASPSEYPENGERFSFLSKPVDENHQQDGDEDSLVSHFYTNPIAKPIPQTPESAGNKHSNSNSVDDTIVALNMRAALRNGLEGSSEETSFHDESLQDDREEIENNSYHMHPAGIILTKVGYYTIPSMDDLAKITNEKGECIVSDFTIGRKGYGSIYFEGDVNLTNLNLDDIVHIRRKEVVVYLDDNQKPPVGEGLNRKAEVTLDGVWPTDKTSRCLIKSPDRLADINYEGRLEAVSRKQGAQFKEYRPETGSWVFKVSHFSKYGLQDSDEEEEEHPSKTSTKKLKTAPLPPASQTTPLQMALNGKPAPPPQSQSPEVEQLGRVVELDSDMVDITQEPVLDTMLEESMPEDQEPVSASTHIASSLGINPHVLQIMKASLLTDEEDVDMALDQRFSRLPSKADTSQEICSPRLPISASHSSKTRSLVGGLLQSKFTSGAFLSPSVSVQECRTPRAASLMNIPSTSSWSVPPPLTSVFTMPSPAPEVPLKTVGTRRQLGLVPREKSVTYGKGKLLMDMALFMGRSFRVGWGPNWTLANSGEQLNGSHELENHQIADSMEFGFLPNPVAVKPLTESPFKVHLEKLSLRQRKPDEDMKLYQTPLELKLKHSTVHVDELCPLIVPNLGVAVIHDYADWVKEASGDLPEAQIVKHWSLTWTLCEALWGHLKELDSQLNEPREYIQILERRRAFSRWLSCTATPQIEEEVSLTQKNSPVEAVFSYLTGKRISEACSLAQQSGDHRLALLLSQFVGSQSVRELLTMQLVDWHQLQADSFIQDERLRIFALLAGKPVWQLSEKKQINVCSQLDWKRSLAIHLWYLLPPTASISRALSMYEEAFQNTSDSDRYACSPLPSYLEGSGCVIAEEQNSQTPLRDVCFHLLKLYSDRHYDLNQLLEPRSITADPLDYRLSWHLWEVLRALNYTHLSAQCEGVLQASYAGQLESEGLWEWAIFVLLHIDNSGIREKAVRELLTRHCQLLETPESWAKETFLTQKLRVPAKWIHEAKAVRAHMESDKHLEALCLFKAEHWNRCHKLIIRHLASDAIINENYDYLKGFLEDLAPPERSSLIQDWETSGLVYLDYIRVIEMLRHIQQGAFQ

SEQ ID NO: 877538 - protein, 1817 aa, Homo sapiens
MFNKSFGTPFGGGTGGFGTTSTFGQNTGFGTTSGGAFGTSAFGSSNNTGGLFGNSQTKPGGLFGTSSFSQPATSTSTGFGFGTSTGTANTLFGTASTGTSLFSSQNNAFAQNKPTGFGNFGTSTSSGGLFGTTNTTSNPFGSTSGSLFGPSSFTAAPTGTTIKFNPPTGTDTMVKAGVSTNISTKHQCITAMKEYESKSLEELRLEDYQANRKGPQNQVGAGTTTGLFGSSPATSSATGLFSSSTTNSGFAYGQNKTAFGTSTTGFGTNPGGLFGQQNQQTTSLFSKPFGQATTTQNTGFSFGNTSTIGQPSTNTMGLFGVTQASQPGGLFGTATNTSTGTAFGTGTGLFGQTNTGFGAVGSTLFGNNKLTTFGSSTTSAPSFGTTSGGLFGNKPTLTLGTNTNTSNFGFGTNTSGNSIFGSKPAPGTLGTGLGAGFGTALGAGQASLFGNNQPKIGGPLGTGAFGAPGFNTTTATLGFGAPQAPVALTDPNASAAQQAVLQQHINSLTYSPFGDSPLFRNPMSDPKKKEERLKPTNPAAQKALTTPTHYKLTPRPATRVRPKALQTTGTAKSHLFDGLDDDEPSLANGAFMPKKSIKKLVLKNLNNSNLFSPVNRDSENLASPSEYPENGERFSFLSKPVDENHQQDGDEDSLVSHFYTNPIAKPIPQTPESAGNKHSNSNSVDDTIVALNMRAALRNGLEGSSEETSFHDESLQDDREEIENNSYHMHPAGIILTKVGYYTIPSMDDLAKITNEKGECIVSDFTIGRKGYGSIYFEGDVNLTNLNLDDIVHIRRKEVVVYLDDNQKPPVGEGLNRKAEVTLDGVWPTDKTSRCLIKSPDRLADINYEGRLEAVSRKQGAQFKEYRPETGSWVFKVSHFSKYGLQDSDEEEEEHPSKTSTKKLKTAPLPPASQTTPLQMALNGKPAPPPQSQSPEVEQLGRVVELDSDMVDITQEPVLDTMLEESMPEDQEPVSASTHIASSLGINPHVLQIMKASLLTDEEDVDMALDQRFSRLPSKADTSQEICSPRLPISASHSSKTRSLVGGLLQSKFTSGAFLSPSVSVQECRTPRAASLMNIPSTSSWSVPPPLTSVFTMPSPAPEVPLKTVGTRRQLGLVPREKSVTYGKGKLLMDMALFMGRSFRVGWGPNWTLANSGEQLNGSHELENHQIADSMEFGFLPNPVAVKPLTESPFKVHLEKLSLRQRKPDEDMKLYQTPLELKLKHSTVHVDELCPLIVPNLGVAVIHDYADWVKEASGDLPEAQIVKHWSLTWTLCEALWGHLKELDSQLNEPREYIQILERRRAFSRWLSCTATPQIEEEVSLTQKNSPVEAVFSYLTGKRISEACSLAQQSGDHRLALLLSQFVGSQSVRELLTMQLVDWHQLQADSFIQDERLRIFALLAGKPVWQLSEKKQINVCSQLDWKRSLAIHLWYLLPPTASISRALSMYEEAFQNTSDSDRYACSPLPSYLEGSGCVIAEEQNSQTPLRDVCFHLLKLYSDRHYDLNQLLEPRSITADPLDYRLSWHLWEVLRALNYTHLSAQCEGVLQASYAGQLESEGLWEWAIFVLLHIDNSGIREKAVRELLTRHCQLLETPESWAKETFLTQKLRVPAKWIHEAKAVRAHMESDKHLEALCLFKAEHWNRCHKLIIRHLASDAIINENYDYLKGFLEDLAPPERSSLIQDWETSGLVYLDYIRVIEMLRHIQQVDCSGNDLEQLHIKVTSLCSRIEQIQCYSAKDRLAQSDMAKRVANLLRVVLSLHHPPDRTSDSTPDPQRVPLRLLAPHIGRLPMPEDYAMDELRSLTQSYLRELAVGSL

SEQ ID NO: 877539 - protein, 1359 aa, Homo sapiens
NILVCTPGRLLQHMDETVSFHATDLQMLALTDPNASAAQQAVLQQHINSLTYSPFGDSPLFRNPMSDPKKKEERLKPTNPAAQKALTTPTHYKLTPRPATRVRPKALQTTGTAKSHLFDGLDDDEPSLANGAFMPKKSIKKLVLKNLNNSNLFSPVNRDSENLASPSEYPENGERFSFLSKPVDENHQQDGDEDSLVSHFYTNPIAKPIPQTPESAGNKHSNSNSVDDTIVALNMRAALRNGLEGSSEETSFHDESLQDDREEIENNSYHMHPAGIILTKVGYYTIPSMDDLAKITNEKGECIVSDFTIGRKGYGSIYFEGDVNLTNLNLDDIVHIRRKEVVVYLDDNQKPPVGEGLNRKAEVTLDGVWPTDKTSRCLIKSPDRLADINYEGRLEAVSRKQGAQFKEYRPETGSWVFKVSHFSKYGLQDSDEEEEEHPSKTSTKKLKTAPLPPASQTTPLQMALNGKPAPPPQSQSPEVEQLGRVVELDSDMVDITQEPVLDTMLEESMPEDQEPVSASTHIASSLGINPHVLQIMKASLLTDEEDVDMALDQRFSRLPSKADTSQEICSPRLPISASHSSKTRSLVGGLLQSKFTSGAFLSPSVSVQECRTPRAASLMNIPSTSSWSVPPPLTSVFTMPSPAPEVPLKTVGTRRQLGLVPREKSVTYGKGKLLMDMALFMGRSFRVGWGPNWTLANSGEQLNGSHELENHQIADSMEFGFLPNPVAVKPLTESPFKVHLEKLSLRQRKPDEDMKLYQTPLELKLKHSTVHVDELCPLIVPNLGVAVIHDYADWVKEASGDLPEAQIVKHWSLTWTLCEALWGHLKELDSQLNEPREYIQILERRRAFSRWLSCTATPQIEEEVSLTQKNSPVEAVFSYLTGKRISEACSLAQQSGDHRLALLLSQFVGSQSVRELLTMQLVDWHQLQADSFIQDERLRIFALLAGKPVWQLSEKKQINVCSQLDWKRSLAIHLWYLLPPTASISRALSMYEEAFQNTSDSDRYACSPLPSYLEGSGCVIAEEQNSQTPLRDVCFHLLKLYSDRHYDLNQLLEPRSITADPLDYRLSWHLWEVLRALNYTHLSAQCEGVLQASYAGQLESEGLWEWAIFVLLHIDNSGIREKAVRELLTRHCQLLETPESWAKETFLTQKLRVPAKWIHEAKAVRAHMESDKHLEALCLFKAEHWNRCHKLIIRHLASDAIINENYDYLKGFLEDLAPPERSSLIQDWETSGLVYLDYIRVIEMLRHIQQVDCSGNDLEQLHIKVTSLCSRIEQIQCYSAKDRLAQSDMAKRVANLLRVVLSLHHPPDRTSDSTPDPQRVPLRLLAPHIGRLPMPEDYAMDELRSLTQSYLRELAVGSL

SEQ ID NO: 877540 - protein, 1071 aa, Homo sapiens
MDDLAKITNEKGECIVSDFTIGRKGYGSIYFEGDVNLTNLNLDDIVHIRRKEVVVYLDDNQKPPVGEGLNRKAEVTLDGVWPTDKTSRCLIKSPDRLADINYEGRLEAVSRKQGAQFKEYRPETGSWVFKVSHFSKYGLQDSDEEEEEHPSKTSTKKLKTAPLPPASQTTPLQMALNGKPAPPPQSQSPEVEQLGRVVELDSDMVDITQEPVLDTMLEESMPEDQEPVSASTHIASSLGINPHVLQIMKASLLTDEEDVDMALDQRFSRLPSKADTSQEICSPRLPISASHSSKTRSLVGGLLQSKFTSGAFLSPSVSVQECRTPRAASLMNIPSTSSWSVPPPLTSVFTMPSPAPEVPLKTVGTRRQLGLVPREKSVTYGKGKLLMDMALFMGRSFRVGWGPNWTLANSGEQLNGSHELENHQIADSMEFGFLPNPVAVKPLTESPFKVHLEKLSLRQRKPDEDMKLYQTPLELKLKHSTVHVDELCPLIVPNLGVAVIHDYADWVKEASGDLPEAQIVKHWSLTWTLCEALWGHLKELDSQLNEPREYIQILERRRAFSRWLSCTATPQIEEEVSLTQKNSPVEAVFSYLTGKRISEACSLAQQSGDHRLALLLSQFVGSQSVRELLTMQLVDWHQLQADSFIQDERLRIFALLAGKPVWQLSEKKQINVCSQLDWKRSLAIHLWYLLPPTASISRALSMYEEAFQNTSDSDRYACSPLPSYLEGSGCVIAEEQNSQTPLRDVCFHLLKLYSDRHYDLNQLLEPRSITADPLDYRLSWHLWEVLRALNYTHLSAQCEGVLQASYAGQLESEGLWEWAIFVLLHIDNSGIREKAVRELLTRHCQLLETPESWAKETFLTQKLRVPAKWIHEAKAVRAHMESDKHLEALCLFKAEHWNRCHKLIIRHLASDAIINENYDYLKGFLEDLAPPERSSLIQDWETSGLVYLDYIRVIEMLRHIQQVDCSGNDLEQLHIKVTSLCSRIEQIQCYSAKDRLAQSDMAKRVANLLRVVLSLHHPPDRTSDSTPDPQRVPLRLLAPHIGRLPMPEDYAMDELRSLTQSYLRELAVGSL

SEQ ID NO: 877541 - protein, 1621 aa, Homo sapiens
MFNKSFGTPFGGGTGGFGTTSTFGQNTGFGTTSGGAFGTSAFGSSNNTGGLFGNSQTKPGGLFGTSSFSQPATSTSTGFGFGTSTGTANTLFGTASTGTSLFSSQNNAFAQNKPTGFGNFGTSTSSGGLFGTTNTTSNPFGSTSGSLFGPSSFTAAPTGTTIKFNPPTGTDTMVKAGVSTNISTKHQCITAMKEYESKSLEELRLEDYQANRKGPQNQVGAGTTTGLFGSSPATSSATGLFSSSTTNSGFAYGQNKTAFGTSTTGFGTNPGGLFGQQNQQTTSLFSKPFGQATTTQNTGFSFGNTSTIGQPSTNTMGLFGVTQASQPGGLFGTATNTSTGTAFGTGTGLFGQTNTGFGAVGSTLFGNNKLTTFGSSTTSAPSFGTTSGGLFGFGTNTSGNSIFGSKPAPGTLGTGLGAGFGTALGAGQASLFGNNQPKIGGPLGTGAFGAPGFNTTTATLGFGAPQAPVALTDPNASAAQQAVLQQHINSLTYSPFGDSPLFRNPMSDPKKKEERLKPTNPAAQKALTTPTHYKLTPRPATRVRPKALQTTGTAKSHLFDGLDDDEPSLANGAFMPKKSIKKLVLKNLNNSNLFSPVNRDSENLASPSEYPENGERFSFLSKPVDENHQQDGDEDSLVSHFYTNPIAKPIPQTPESAGNKHSNSNSVDDTIVALNMRAALRNGLEGSSEETSFHDESLQDDREEIENNSYHMHPAGIILTKVGYYTIPSMDDLAKITNEKGECIVSDFTIGRKGYGSIYFEGDVNLTNLNLDDIVHIRRKEVVVYLDDNQKPPVGEGLNRKAEVTLDGVWPTDKTSRCLIKSPDRLADINYEGRLEAVSRKQGAQFKEYRPETGSWVFKVSHFSKYGLQDSDEEEEEHPSKTSTKKLKTAPLPPASQTTPLQMALNGKPAPPPQSQSPEVEQLGRVVELDSDMVDITQEPVLDTMLEESMPEDQEPVSASTHIASSLGINPHVLQIMKASLLTDEEDVDMALDQRFSRLPSKADTSQEICSPRLPISASHSSKTRSLVGGLLQSKFTSGAFLSPSVSVQECRTPRAASLMNIPSTSSWSVPPPLTSVFTMPSPAPEVPLKTVGTRRQLGLVPREKSVTYGKGKLLMDMALFMGRSFRVGWGPNWTLANSGEQLNGSHELENHQIADSMEFGFLPNPVAVKPLTESPFKVHLEKLSLRQRKPDEDMKLYQTPLELKLKHSTVHVDELCPLIVPNLGVAVIHDYADWVKEASGDLPEAQIVKHWSLTWTLCEALWGHLKELDSQLNEPREYIQILERRRAFSRWLSCTATPQIEEEVSLTQKNSPVEAVFSYLTGKRISEACSLAQQSGDHRLALLLSQFVGSQSVRELLTMQLVDWHQLQADSFIQDERLRIFALLAGKPVWQLSEKKQINVCSQLDWKRSLAIHLWYLLPPTASISRALSMYEEAFQNTSDSDRYACSPLPSYLEGSGCVIAEEQNSQTPLRDVCFHLLKLYSDSIREKAVRELLTRHCQLLETPESWAKETFLTQKLRVPAKWIHEAKAVRAHMESDKHLEALCLFKAEHWNRCHKLIIRHLASDAIINENYDYLKGFLEDLAPPERSSLIQDWETSGLVYLDYIRVIEMLRHIQQGAFQ

SEQ ID NO: 877542 - protein, 1723 aa, Homo sapiens
MFNKSFGTPFGGGTGGFGTTSTFGQNTGFGTTSGGAFGTSAFGSSNNTGGLFGNSQTKPGGLFGTSSFSQPATSTSTGFGFGTSTGTANTLFGTASTGTSLFSSQNNAFAQNKPTGFGNFGTSTSSGGLFGTTNTTSNPFGSTSGSLFGPSSFTAAPTGTTIKFNPPTGTDTMVKAGVSTNISTKHQCITAMKEYESKSLEELRLEDYQANRKGPQNQVGAGTTTGLFGSSPATSSATGLFSSSTTNSGFAYGQNKTAFGTSTTGFGTNPGGLFGQQNQQTTSLFSKPFGQATTTQNTGFSFGNTSTIGQPSTNTMGLFGVTQASQPGGLFGTATNTSTGTAFGTGTGLFGQTNTGFGAVGSTLFGNNKLTTFGSSTTSAPSFGTTSGGLFGFGTNTSGNSIFGSKPAPGTLGTGLGAGFGTALGAGQASLFGNNQPKIGGPLGTGAFGAPGFNTTTATLGFGAPQAPVALTDPNASAAQQAVLQQHINSLTYSPFGDSPLFRNPMSDPKKKEERLKPTNPAAQKALTTPTHYKLTPRPATRVRPKALQTTGTAKSHLFDGLDDDEPSLANGAFMPKKSIKKLVLKNLNNSNLFSPVNRDSENLASPSEYPENGERFSFLSKPVDENHQQDGDEDSLVSHFYTNPIAKPIPQTPESAGNKHSNSNSVDDTIVALNMRAALRNGLEGSSEETSFHDESLQDDREEIENNSYHMHPAGIILTKVGYYTIPSMDDLAKITNEKGECIVSDFTIGRKGYGSIYFEGDVNLTNLNLDDIVHIRRKEVVVYLDDNQKPPVGEGLNRKAEVTLDGVWPTDKTSRCLIKSPDRLADINYEGRLEAVSRKQGAQFKEYRPETGSWVFKVSHFSKYGLQDSDEEEEEHPSKTSTKKLKTAPLPPASQTTPLQMALNGKPAPPPQSQSPEVEQLGRVVELDSDMVDITQEPVLDTMLEESMPEDQEPVSASTHIASSLGINPHVLQIMKASLLTDEEDVDMALDQRFSRLPSKADTSQEICSPRLPISASHSSKTRSLVGGLLQSKFTSGAFLSPSVSVQECRTPRAASLMNIPSTSSWSVPPPLTSVFTMPSPAPEVPLKTVGTRRQLGLVPREKSVTYGKGKLLMDMALFMGRSFRVGWGPNWTLANSGEQLNGSHELENHQIADSMEFGFLPNPVAVNLVKHWSLTWTLCEALWGHLKELDSQLNEPREYIQILERRRAFSRWLSCTATPQIEEEVSLTQKNSPVEAVFSYLTGKRISEACSLAQQSGDHRLALLLSQFVGSQSVRELLTMQLVDWHQLQADSFIQDERLRIFALLAGKPVWQLSEKKQINVCSQLDWKRSLAIHLWYLLPPTASISRALSMYEEAFQNTSDSDRYACSPLPSYLEGSGCVIAEEQNSQTPLRDVCFHLLKLYSDRHYDLNQLLEPRSITADPLDYRLSWHLWEVLRALNYTHLSAQCEGVLQASYAGQLESEGLWEWAIFVLLHIDNSGIREKAVRELLTRHCQLLETPESWAKETFLTQKLRVPAKWIHEAKAVRAHMESDKHLEALCLFKAEHWNRCHKLIIRHLASDAIINENYDYLKGFLEDLAPPERSSLIQDWETSGLVYLDYIRVIEMLRHIQQVDCSGNDLEQLHIKVTSLCSRIEQIQCYSAKDRLAQSDMAKRVANLLRVVLSLHHPPDRTSDSTPDPQRVPLRLLAPHIGRLPMPEDYAMDELRSLTQSYLRELAVGSL

SEQ ID NO: 877543 - protein, 1644 aa, Homo sapiens
MFNKSFGTPFGGGTGGFGTTSTFGQNTGFGTTSGGAFGTSAFGSSNNTGGLFGNSQTKPGGLFGTSSFSQPATSTSTGFGFGTSTGTANTLFGTASTGTSLFSSQNNAFAQNKPTGFGNFGTSTSSGGLFGTTNTTSNPFGSTSGSLFGPSSFTAAPTGTTIKFNPPTGTDTMVKAGVSTNISTKHQCITAMKEYESKSLEELRLEDYQANRKGPQNQVGAGTTTGLFGSSPATSSATGLFSSSTTNSGFAYGQNKTAFGTSTTGFGTNPGGLFGQQNQQTTSLFSKPFGQATTTQNTGFSFGNTSTIGQPSTNTMGLFGVTQASQPGGLFGTATNTSTGTAFGTGTGLFGQTNTGFGAVGSTLFGNNKLTTFGSSTTSAPSFGTTSGGLFGFGTNTSGNSIFGSKPAPGTLGTGLGAGFGTALGAGQASLFGNNQPKIGGPLGTGAFGAPGFNTTTATLGFGAPQAPVALTDPNASAAQQAVLQQHINSLTYSPFGDSPLFRNPMSDPKKKEERLKPTNPAAQKALTTPTHYKLTPRPATRVRPKALQTTGTAKSHLFDGLDDDEPSLANGAFMPKKSIKKLVLKNLNNSNLFSPVNRDSENLASPSEYPENGERFSFLSKPVDENHQQDGDEDSLVSHFYTNPIAKPIPQTPESAGNKHSNSNSVDDTIVALNMRAALRNGLEGSSEETSFHDESLQDDREEIENNSYHMHPAGIILTKVGYYTIPSMDDLAKITNEKGECIVSDFTIGRKGYGSIYFEGDVNLTNLNLDDIVHIRRKEVVVYLDDNQKPPVGEGLNRKAEVTLDGVWPTDKTSRCLIKSPDRLADINYEGRLEAVSRKQGAQFKEYRPETGSWVFKVSHFSKYGLQDSDEEEEEHPSKTSTKKLKTAPLPPASQTTPLQMALNGKPAPPPQSQSPEVEQLGRVVELDSDMVDITQEPVLDTMLEESMPEDQEPVSASTHIASSLGINPHVLQIMKASLLTDEEDVDMALDQRFSRLPSKADTSQEICSPRLPISASHSSKTRSLVGGLLQSKFTSGAFLSPSVSVQECRTPRAASLMNIPSTSSWSVPPPLTSVFTMPSPAPEVPLKTVGTRRQLGLVPREKSVTYGKGKLLMDMALFMGRSFRVGWGPNWTLANSGEQLNGSHELENHQIADSMEFGFLPNPVAVKPLTESPFKVHLEKLSLRQRKPDEDMKLYQTPLELKLKHSTVHVDELCPLIVPNLGVAVIHDYADWVKEASGDLPEAQIVKHWSLTWTLCEALWGHLKELDSQLNEPREYIQILERRRAFSRWLSCTATPQIEEEVSLTQKNSPVEAVFSYLTGKRISEACSLAQQSGDHRLALLLSQFVGSQSVRELLTMQLVDWHQLQADSFIQDERLRIFALLAGKPVWQLSEKKQINVCSQLDWKRSLAIHLWYLLPPTASISRALSMYEEAFQNTSDSDRYACSPLPSYLEGSGCVIAEEQNSQTPLRDVCFHLLKLYSDRHYDLNQLLEPRSITADPLDYRLSWHLWEVLRALNYTHLSAQCEGVLQASYAGQLESEGLWEWAIFVLLHIDNSGIREKAVRELLTRHCQLLETPESWAKETFLTQKLRVPAKWIHEAKAVRAHMESDKHLEALCLFKAEHWNRCHKLIIRHLASGGLLR

SEQ ID NO: 877544 - protein, 1621 aa, Homo sapiens; identical to SEQ ID NO: 877541

SEQ ID NO: 877545 - protein, 441 aa, Homo sapiens [sequence omitted]

SEQ ID NO: 877546 - protein, 299 aa, Homo sapiens
MYCFIKLFLQNTSDSDRYACSPLPSYLEGSGCVIAEEQNSQTPLRDVCFHLLKLYSDSIREKAVRELLTRHCQLLETPESWAKETFLTQKLRVPAKWIHEAKAVRAHMESDKHLEALCLFKAEHWNRCHKLIIRHLASDAIINENYDYLKGFLEDLAPPERSSLIQDWETSGLVYLDYIRVIEMLRHIQQVDCSGNDLEQLHIKVTSLCSRIEQIQCYSAKDRLAQSDMAKRVANLLRVVLSLHHPPDRTSDSTPDPQRVPLRLLAPHIGRLPMPEDYAMDELRSLTQSYLRELAVGSL

SEQ ID NO: 877547 - protein, 129 aa, Homo sapiens
AGITGVSHSACPPLAFCIQQVDCSGNDLEQLHIKVTSLCSRIEQIQCYSAKDRLAQSDMAKRVANLLRVVLSLHHPPDRTSDSTPDPQRVPLRLLAPHIGRLPMPEDYAMDELRSLTQSYLRELAVGSL

SEQ ID NO: 877548 - protein, 1800 aa, Homo sapiens
MFNKSFGTPFGGGTGGFGTTSTFGQNTGFGTTSGGAFGTSAFGSSNNTGGLFGNSQTKPGGLFGTSSFSQPATSTSTGFGFGTSTGTANTLFGTASTGTSLFSSQNNAFAQNKPTGFGNFGTSTSSGGLFGTTNTTSNPFGSTSGSLFGPSSFTAAPTGTTIKFNPPTGTDTMVKAGVSTNISTKHQCITAMKEYESKSLEELRLEDYQANRKGPQNQVGAGTTTGLFGSSPATSSATGLFSSSTTNSGFAYGQNKTAFGTSTTGFGTNPGGLFGQQNQQTTSLFSKPFGQATTTQNTGFSFGNTSTIGQPSTNTMGLFGVTQASQPGGLFGTATNTSTGTAFGTGTGLFGQTNTGFGAVGSTLFGNNKLTTFGSSTTSAPSFGTTSGGLFGFGTNTSGNSIFGSKPAPGTLGTGLGAGFGTALGAGQASLFGNNQPKIGGPLGTGAFGAPGFNTTTATLGFGAPQAPVALTDPNASAAQQAVLQQHINSLTYSPFGDSPLFRNPMSDPKKKEERLKPTNPAAQKALTTPTHYKLTPRPATRVRPKALQTTGTAKSHLFDGLDDDEPSLANGAFMPKKSIKKLVLKNLNNSNLFSPVNRDSENLASPSEYPENGERFSFLSKPVDENHQQDGDEDSLVSHFYTNPIAKPIPQTPESAGNKHSNSNSVDDTIVALNMRAALRNGLEGSSEETSFHDESLQDDREEIENNSYHMHPAGIILTKVGYYTIPSMDDLAKITNEKGECIVSDFTIGRKGYGSIYFEGDVNLTNLNLDDIVHIRRKEVVVYLDDNQKPPVGEGLNRKAEVTLDGVWPTDKTSRCLIKSPDRLADINYEGRLEAVSRKQGAQFKEYRPETGSWVFKVSHFSKYGLQDSDEEEEEHPSKTSTKKLKTAPLPPASQTTPLQMALNGKPAPPPQSQSPEVEQLGRVVELDSDMVDITQEPVLDTMLEESMPEDQEPVSASTHIASSLGINPHVLQIMKASLLTDEEDVDMALDQRFSRLPSKADTSQEICSPRLPISASHSSKTRSLVGGLLQSKFTSGAFLSPSVSVQECRTPRAASLMNIPSTSSWSVPPPLTSVFTMPSPAPEVPLKTVGTRRQLGLVPREKSVTYGKGKLLMDMALFMGRSFRVGWGPNWTLANSGEQLNGSHELENHQIADSMEFGFLPNPVAVKPLTESPFKVHLEKLSLRQRKPDEDMKLYQTPLELKLKHSTVHVDELCPLIVPNLGVAVIHDYADWVKEASGDLPEAQIVKHWSLTWTLCEALWGHLKELDSQLNEPREYIQILERRRAFSRWLSCTATPQIEEEVSLTQKNSPVEAVFSYLTGKRISEACSLAQQSGDHRLALLLSQFVGSQSVRELLTMQLVDWHQLQADSFIQDERLRIFALLAGKPVWQLSEKKQINVCSQLDWKRSLAIHLWYLLPPTASISRALSMYEEAFQNTSDSDRYACSPLPSYLEGSGCVIAEEQNSQTPLRDVCFHLLKLYSDRHYDLNQLLEPRSITADPLDYRLSWHLWEVLRALNYTHLSAQCEGVLQASYAGQLESEGLWEWAIFVLLHIDNSGIREKAVRELLTRHCQLLETPESWAKETFLTQKLRVPAKWIHEAKAVRAHMESDKHLEALCLFKAEHWNRCHKLIIRHLASDAIINENYDYLKGFLEDLAPPERSSLIQDWETSGLVYLDYIRVIEMLRHIQQVDCSGNDLEQLHIKVTSLCSRIEQIQCYSAKDRLAQSDMAKRVANLLRVVLSLHHPPDRTSDSTPDPQRVPLRLLAPHIGRLPMPEDYAMDELRSLTQSYLRELAVGSL

SEQ ID NO: 877549 - protein, 1495 aa, Homo sapiens
MFNKSFGTPFGGGTGGFGTTSTFGQNTGFGTTSGGAFGTSAFGSSNNTGGLFGNSQTKPGGLFGTSSFSQPATSTSTGFGFGTSTGTANTLFGTASTGTSLFSSQNNAFAQNKPTGFGNFGTSTSSGGLFGTTNTTSNPFGSTSGSLFGPSSFTAAPTGTTIKFNPPTGTDTMVKAGVSTNISTKHQCITAMKEYESKSLEELRLEDYQANRKGPQNQVGAGTTTGLFGSSPATSSATGLFSSSTTNSGFAYGQNKTAFGTSTTGFGTNPGGLFGQQNQQTTSLFSKPFGQATTTQNTGFSFGNTSTIGQPSTNTMGLFGVTQASQPGGLFGTATNTSTGTAFGTGTGLFGQTNTGFGAVGSTLFGNNKLTTFGSSTTSAPSFGTTSGGLFGFGTNTSGNSIFGSKPAPGTLGTGLGAGFGTALGAGQASLFGNNQPKIGGPLGTGAFGAPGFNTTTATLGFGAPQAPVALTDPNASAAQQAVLQQHINSLTYSPFGDSPLFRNPMSDPKKKEERLKPTNPAAQKALTTPTHYKLTPRPATRVRPKALQTTGTAKSHLFDGLDDDEPSLANGAFMPKKSIKKLVLKNLNNSNLFSPVNRDSENLASPSEYPENGERFSFLSKPVDENHQQDGDEDSLVSHFYTNPIAKPIPQTPESAGNKHSNSNSVDDTIVALNMRAALRNGLEGSSEETSFHDESLQDDREEIENNSYHMHPAGIILTKVGYYTIPSMDDLAKITNEKGECIVSDFTIGRKGYGSIYFEGDVNLTNLNLDDIVHIRRKEVVVYLDDNQKPPVGEGLNRKAEVTLDGVWPTDKTSRCLIKSPDRLADINYEGRLEAVSRKQGAQFKEYRPETGSWVFKVSHFSKYGLQDSDEEEEEHPSKTSTKKLKTAPLPPASQTTPLQMALNGKPAPPPQSQSPEVEQLGRVVELDSDMVDITQEPVLDTMLEESMPEDQEPVSASTHIASSLGINPHVLQIMKASLLTDEEDVDMALDQRFSRLPSKADTSQEICSPRLPISASHSSKTRSLVGGLLQSKFTSGAFLSPSVSVQECRTPRAASLMNIPSTSSWSVPPPLTSVFTMPSPAPEVPLKTVGTRRQLGLVPREKSVTYGKGKLLMDMALFMGRSFRVGWGPNWTLANSGEQLNGSHELENHQIADSMEFGFLPNPVAVKPLTESPFKVHLEKLSLRQRKPDEDMKLYQTPLELKLKHSTVHVDELCPLIVPNLGVAVIHDYADWVKEASGDLPEAQIVKHWSLTWTLCEALWGHLKELDSQLNEPREYIQILERRRAFSRWLSCTATPQIEEEVSLTQKNSPVEAVFSYLTGKRISEACSLAQQSGDHRLALLLSQFVGSQSVRELLTMQLVDWHQLQADSFIQDERLRIFALLAGKPVWQLSEKKQINVCSQLDWKRSLAIHLWYLLPPTASISRALSMYEEAFQVYVANRAKQKSCWVLKYCQIEAEPGNLMGNYPLLLPLDKATSPSVCFYFIKYHEIPQL

SEQ ID NO: 877550 - protein, 992 aa, Homo sapiens
MFNKSFGTPFGGGTGGFGTTSTFGQNTGFGTTSGGAFGTSAFGSSNNTGGLFGNSQTKPGGLFGTSSFSQPATSTSTGFGFGTSTGTANTLFGTASTGTSLFSSQNNAFAQNKPTGFGNFGTSTSSGGLFGTTNTTSNPFGSTSGSLFGPSSFTAAPTGTTIKFNPPTGTDTMVKAGVSTNISTKHQCITAMKEYESKSLEELRLEDYQANRKGPQNQVGAGTTTGLFGSSPATSSATGLFSSSTTNSGFAYGQNKTAFGTSTTGFGTNPGGLFGQQNQQTTSLFSKPFGQATTTQNTGFSFGNTSTIGQPSTNTMGLFGVTQASQPGGLFGTATNTSTGTAFGTGTGLFGQTNTGFGAVGSTLFGNNKLTTFGSSTTSAPSFGTTSGGLFGFGTNTSGNSIFGSKPAPGTLGTGLGAGFGTALGAGQASLFGNNQPKIGGPLGTGAFGAPGFNTTTATLGFGAPQAPVALTDPNASAAQQAVLQQHINSLTYSPFGDSPLFRNPMSDPKKKEERLKPTNPAAQKALTTPTHYKLTPRPATRVRPKALQTTGTAKSHLFDGLDDDEPSLANGAFMPKKSIKKLVLKNLNNSNLFSPVNRDSENLASPSEYPENGERFSFLSKPVDENHQQDGDEDSLVSHFYTNPIAKPIPQTPESAGNKHSNSNSVDDTIVALNMRAALRNGLEGSSEETSFHDESLQDDREEIENNSYHMHPAGIILTKVGYYTIPSMDDLAKITNEKGECIVSDFTIGRKGYGSIYFEGDVNLTNLNLDDIVHIRRKEVVVYLDDNQKPPVGEGLNRKAEVTLDGVWPTDKTSRCLIKSPDRLADINYEGRLEAVSRKQGAQFKEYRPETGSWVFKVSHFSKYGLQDSDEEEEEHPSKTSTKKLKTAPLPPASQTTPLQMALNGKPAPPPQSQSPEVEQLGRVVELDSDMVDITQEPVLDTMLAPKHFPPSIYPFQKQKQTMTEAGMELGVRGRQRAFATLLTAIGSPR

SEQ ID NO: 877551 - protein, 1171 aa, Homo sapiens
MFNKSFGTPFGGGTGGFGTTSTFGQNTGFGTTSGGAFGTSAFGSSNNTGGLFGNSQTKPGGLFGTSSFSQPATSTSTGFGFGTSTGTANTLFGTASTGTSLFSSQNNAFAQNKPTGFGNFGTSTSSGGLFGTTNTTSNPFGSTSGSLFGPSSFTAAPTGTTIKFNPPTGTDTMVKAGVSTNISTKHQCITAMKEYESKSLEELRLEDYQANRKGPQNQVGAGTTTGLFGSSPATSSATGLFSSSTTNSGFAYGQNKTAFGTSTTGFGTNPGGLFGQQNQQTTSLFSKPFGQATTTQNTGFSFGNTSTIGQPSTNTMGLFGVTQASQPGGLFGTATNTSTGTAFGTGTGLFGQTNTGFGAVGSTLFGNNKLTTFGSSTTSAPSFGTTSGGLFGFGTNTSGNSIFGSKPAPGTLGTGLGAGFGTALGAGQASLFGNNQPKIGGPLGTGAFGAPGFNTTTATLGFGAPQAPVALTDPNASAAQQAVLQQHINSLTYSPFGDSPLFRNPMSDPKKKEERLKPTNPAAQKALTTPTHYKLTPRPATRVRPKALQTTGTAKSHLFDGLDDDEPSLANGAFMPKKSIKKLVLKNLNNSNLFSPVNRDSENLASPSEYPENGERFSFLSKPVDENHQQDGDEDSLVSHFYTNPIAKPIPQTPESAGNKHSNSNSVDDTIVALNMRAALRNGLEGSSEETSFHDESLQDDREEIENNSYHMHPAGIILTKVGYYTIPSMDDLAKITNEKGECIVSDFTIGRKGYGSIYFEGDVNLTNLNLDDIVHIRRKEVVVYLDDNQKPPVGEGLNRKAEVTLDGVWPTDKTSRCLIKSPDRLADINYEGRLEAVSRKQGAQFKEYRPETGSWVFKVSHFSKYGLQDSDEEEEEHPSKTSTKKLKTAPLPPASQTTPLQMALNGKPAPPPQSQSPEVEQLGRVVELDSDMVDITQEPVLDTMLEESMPEDQEPVSASTHIASSLGINPHVLQIMKASLLTDEEDVDMALDQRFSRLPSKADTSQEICSPRLPISASHSSKTRSLVGGLLQSKFTSGAFLSPSVSVQECRTPRAASLMNIPSTSSWSVPPPLTSVFTMPSPAPEVPLKTVGTRRQLGLVPREKSVTYGKGKLLMDMALFMGRSFRVGWGPNWTLANSGEQLNGSHELENHQIADSMEFGFLPNPVAVKP

SEQ ID NO: 877552 - protein, 549 aa, Homo sapiens
MFNKSFGTPFGGGTGGFGTTSTFGQNTGFGTTSGGAFGTSAFGSSNNTGGLFGNSQTKPGGLFGTSSFSQPATSTSTGFGFGTSTGTANTLFGTASTGTSLFSSQNNAFAQNKPTGFGNFGTSTSSGGLFGTTNTTSNPFGSTSGSLFGPSSFTAAPTGTTIKFNPPTGTDTMVKAGVSTNISTKHQCITAMKEYESKSLEELRLEDYQANRKGPQNQVGAGTTTGLFGSSPATSSATGLFSSSTTNSGFAYGQNKTAFGTSTTGFGTNPGGLFGQQNQQTTSLFSKPFGQATTTQNTGFSFGNTSTIGQPSTNTMGLFGVTQASQPGGLFGTATNTSTGTAFGTGTGLFGQTNTGFGAVGSTLFGNNKLTTFGSSTTSAPSFGTTSGGLFGFGTNTSGNSIFGSKPAPGTLGTGLGAGFGTALGAGQASLFGNNQPKIGGPLGTGAFGAPGFNTTTATLGFGAPQAPVVLDEADRILDMGFADTMNAVIENLPKKRQTLLFSATQTKSVKDLARLSLKNPEYVWVHEKAKYSTPATLEQNYIVCELQQ

SEQ ID NO: 877553 - protein, 428 aa, Homo sapiens [sequence omitted]

SEQ ID NO: 877554 - protein, 67 aa, Homo sapiens
ELRLEDYQANRKGPQNQVGAGTTTGLFGSSPATSSATGLFSSSTTNSGFAYGQNKTAFGTSKHLISC

SEQ ID NO: 877555 - protein, 937 aa, Homo sapiens
MFNKSFGTPFGGGTGGFGTTSTFGQNTGFGTTSGGAFGTSAFGSSNNTGGLFGNSQTKPGGLFGTSSFSQPATSTSTGFGFGTSTGTANTLFGTASTGTSLFSSQNNAFAQNKPTGFGNFGTSTSSGGLFGTTNTTSNPFGSTSGSLFGPSSFTAAPTGTTIKFNPPTGTDTMVKAGVSTNISTKHQCITAMKEYESKSLEELRLEDYQANRKGPQNQVGAGTTTGLFGSSPATSSATGLFSSSTTNSGFAYGQNKTAFGTSTTGFGTNPGGLFGQQNQQTTSLFSKPFGQATTTQNTGFSFGNTSTIGQPSTNTMGLFGVTQASQPGGLFGTATNTSTGTAFGTGTGLFGQTNTGFGAVGSTLFGNNKLTTFGSSTTSAPSFGTTSGGLFGNKPTLTLGTNTNTSNFGFGTNTSGNSIFGSKPAPGTLGTGLGAGFGTALGAGQASLFGNNQPKIGGPLGTGAFGAPGFNTTTATLGFGAPQAPVALTDPNASAAQQAVLQQHINSLTYSPFGDSPLFRNPMSDPKKKEERLKPTNPAAQKALTTPTHYKLTPRPATRVRPKALQTTGTAKSHLFDGLDDDEPSLANGAFMPKKSIKKLVLKNLNNSNLFSPVNRDSENLASPSEYPENGERFSFLSKPVDENHQQDGDEDSLVSHFYTNPIAKPIPQTPESAGNKHSNSNSVDDTIVALNMRAALRNGLEGSSEETSFHDESLQDDREEIENNSYHMHPAGIILTKVGYYTIPSMDDLAKITNEKGECIVSDFTIGRKGYGSIYFEGDVNLTNLNLDDIVHIRRKEVVVYLDDNQKPPVGEGLNRKAEVTLDGVWPTDKTSRCLIKSPDRLADINYEGRLEAVSRKQGAQFKEYRPETGSWVFKVSHFSKYGLQDSDEEEEEHPSKTSTKKLKTAPLPPASQTTPLQMALNGKPAPPPQVEKKGQ

SEQ ID NO: 877556 - protein, 1800 aa, Homo sapiens; identical to SEQ ID NO: 877548

SEQ ID NO: 877557 - protein, 1753 aa, Homo sapiens
MFNKSFGTPFGGGTGGFGTTSTFGQNTGFGTTSGGAFGTSAFGSSNNTGGLFGNSQTKPGGLFGTSSFSQPATSTSTGFGFGTSTGTANTLFGTASTGTSLFSSQNNAFAQNKPTGFGNFGTSTSSGGLFGTTNTTSNPFGSTSGSLFGPSSFTAAPTGTTIKFNPPTGTDTMVKAGVSTNISTKHQCITAMKEYESKSLEELRLEDYQANRKGPQNQVGAGTTTGLFGSSPATSSATGLFSSSTTNSGFAYGQNKTAFGTSTTGFGTNPGGLFGQQNQQTTSLFSKPFGQATTTQNTGFSFGNTSTIGQPSTNTMGLFGVTQASQPGGLFGTATNTSTGTAFGTGTGLFGQTNTGFGAVGSTLFGNNKLTTFGSSTTSAPSFGTTSGGLFGFGTNTSGNSIFGSKPAPGTLGTGLGAGFGTALTDPNASAAQQAVLQQHINSLTYSPFGDSPLFRNPMSDPKKKEERLKPTNPAAQKALTTPTHYKLTPRPATRVRPKALQTTGTAKSHLFDGLDDDEPSLANGAFMPKKSIKKLVLKNLNNSNLFSPVNRDSENLASPSEYPENGERFSFLSKPVDENHQQDGDEDSLVSHFYTNPIAKPIPQTPESAGNKHSNSNSVDDTIVALNMRAALRNGLEGSSEETSFHDESLQDDREEIENNSYHMHPAGIILTKVGYYTIPSMDDLAKITNEKGECIVSDFTIGRKGYGSIYFEGDVNLTNLNLDDIVHIRRKEVVVYLDDNQKPPVGEGLNRKAEVTLDGVWPTDKTSRCLIKSPDRLADINYEGRLEAVSRKQGAQFKEYRPETGSWVFKVSHFSKYGLQDSDEEEEEHPSKTSTKKLKTAPLPPASQTTPLQMALNGKPAPPPQSQSPEVEQLGRVVELDSDMVDITQEPVLDTMLEESMPEDQEPVSASTHIASSLGINPHVLQIMKASLLTDEEDVDMALDQRFSRLPSKADTSQEICSPRLPISASHSSKTRSLVGGLLQSKFTSGAFLSPSVSVQECRTPRAASLMNIPSTSSWSVPPPLTSVFTMPSPAPEVPLKTVGTRRQLGLVPREKSVTYGKGKLLMDMALFMGRSFRVGWGPNWTLANSGEQLNGSHELENHQIADSMEFGFLPNPVAVKPLTESPFKVHLEKLSLRQRKPDEDMKLYQTPLELKLKHSTVHVDELCPLIVPNLGVAVIHDYADWVKEASGDLPEAQIVKHWSLTWTLCEALWGHLKELDSQLNEPREYIQILERRRAFSRWLSCTATPQIEEEVSLTQKNSPVEAVFSYLTGKRISEACSLAQQSGDHRLALLLSQFVGSQSVRELLTMQLVDWHQLQADSFIQDERLRIFALLAGKPVWQLSEKKQINVCSQLDWKRSLAIHLWYLLPPTASISRALSMYEEAFQNTSDSDRYACSPLPSYLEGSGCVIAEEQNSQTPLRDVCFHLLKLYSDRHYDLNQLLEPRSITADPLDYRLSWHLWEVLRALNYTHLSAQCEGVLQASYAGQLESEGLWEWAIFVLLHIDNSGIREKAVRELLTRHCQLLETPESWAKETFLTQKLRVPAKWIHEAKAVRAHMESDKHLEALCLFKAEHWNRCHKLIIRHLASDAIINENYDYLKGFLEDLAPPERSSLIQDWETSGLVYLDYIRVIEMLRHIQQVDCSGNDLEQLHIKVTSLCSRIEQIQCYSAKDRLAQSDMAKRVANLLRVVLSLHHPPDRTSDSTPDPQRVPLRLLAPHIGRLPMPEDYAMDELRSLTQSYLRELAVGSL

SEQ ID NO: 877558 - protein, 1697 aa, Homo sapiens
MFNKSFGTPFGGGTGGFGTTSTFGQNTGFGTTSGGAFGTSAFGSSNNTGGLFGNSQTKPGGLFGTSSFSQPATSTSTGFGFGTSTGTANTLFGTASTGTSLFSSQNNAFAQNKPTGFGNFGTSTSSGGLFGTTNTTSNPFGSTSGSLFGPSSFTAAPTGTTIKFNPPTGTDTMVKAGVSTNISTKHQCITAMKEYESKSLEELRLEDYQANRKGPQNQVGAGTTTGLFGSSPATSSATGLFSSSTTNSGFAYGQNKTAFGTSTTGFGTNPGGLFGQQNQQTTSLFSKPFGQATTTQNTGFSFGNTSTIGQPSTNTMGLFGVTQASQPGGLFGTATNTSTGTAFGTGTGLFGQTNTGFGAVGSTLFGNNKLTTFGSSTTSAPSFGTTSGGLFGFGTNTSGNSIFGSKPAPGTLGTGLGAGFGTALGAGQASLFGNNQPKIGGPLGTGAFGAPGFNTTTATLGFGAPQAPVALTDPNASAAQQAVLQQHINSLTYSPFGDSPLFRNPMSDPKKKEERLKPTNPAAQKALTTPTHYKLTPRPATRVRPKALQTTGTAKSHLFDGLDDDEPSLANGAFMPKKSIKKLVLKNLNNSNLFSPVNRDSENLASPSEYPENGERFSFLSKPVDENHQQDGDEDSLVSHFYTNPIAKPIPQTPESAGNKHSNSNSVDDTIVALNMRAALRNGLEGSSEETSFHDESLQDDREEIENNSYHMHPAGIILTKVGYYTIPSMDDLAKITNEKGECIVSDFTIGRKGYGSIYFEGDVNLTNLNLDDIVHIRRKEVVVYLDDNQKPPVGEGLNRKAEVTLDGVWPTDKTSRCLIKSPDRLADINYEGRLEAVSRKQGAQFKEYRPETGSWVFKVSHFSKYGLQDSDEEEEEHPSKTSTKKLKTAPLPPASQTTPLQMALNGKPAPPPQSQSPEVEQLGRVVELDSDMVDITQEPVLDTMLEESMPEDQEPVSASTHIASSLGINPHVLQIMKASLLTDEEDVDMALDQRFSRLPSKADTSQEICSPRLPISASHSSKTRSLVGGLLQSKFTSGAFLSPSVSVQECRTPRAASLMNIPSTSSCLTESPFKVHLEKLSLRQRKPDEDMKLYQTPLELKLKHSTVHVDELCPLIVPNLGVAVIHDYADWVKEASGDLPEAQIVKHWSLTWTLCEALWGHLKELDSQLNEPREYIQILERRRAFSRWLSCTATPQIEEEVSLTQKNSPVEAVFSYLTGKRISEACSLAQQSGDHRLALLLSQFVGSQSVRELLTMQLVDWHQLQADSFIQDERLRIFALLAGKPVWQLSEKKQINVCSQLDWKRSLAIHLWYLLPPTASISRALSMYEEAFQNTSDSDRYACSPLPSYLEGSGCVIAEEQNSQTPLRDVCFHLLKLYSDRHYDLNQLLEPRSITADPLDYRLSWHLWEVLRALNYTHLSAQCEGVLQASYAGQLESEGLWEWAIFVLLHIDNSGIREKAVRELLTRHCQLLETPESWAKETFLTQKLRVPAKWIHEAKAVRAHMESDKHLEALCLFKAEHWNRCHKLIIRHLASDAIINENYDYLKGFLEDLAPPERSSLIQDWETSGLVYLDYIRVIEMLRHIQQVDCSGNDLEQLHIKVTSLCSRIEQIQCYSAKDRLAQSDMAKRVANLLRVVLSLHHPPDRTSDSTPDPQRVPLRLLAPHIGRLPMPEDYAMDELRSLTQSYLRELAVGSL

SEQ ID NO: 877559 - protein, 1800 aa, Homo sapiens; identical to SEQ ID NO: 877548

SEQ ID NO: 877560 - protein, 441 aa, Homo sapiens [sequence omitted]

SEQ ID NO: 877561 - protein, 1697 aa, Homo sapiens; identical to SEQ ID NO: 877558

SEQ ID NO: 877562 - protein, 1800 aa, Homo sapiens; identical to SEQ ID NO: 877548

SEQ ID NO: 877563 - protein, 1360 aa, Homo sapiens [sequence omitted]

SEQ ID NO: 877564 - protein, 593 aa, Homo sapiens
MFNKSFGTPFGGGTGGFGTTSTFGQNTGFGTTSGGAFGTSAFGSSNNTGGLFGNSQTKPGGLFGTSSFSQPATSTSTGFGFGTSTGTANTLFGTASTGTSLFSSQNNAFAQNKPTGFGNFGTSTSSGGLFGTTNTTSNPFGSTSGSLFGPSSFTAAPTGTTIKFNPPTGTDTMVKAGVSTNISTKHQCITAMKEYESKSLEELRLEDYQANRKGPQNQVGAGTTTGLFGSSPATSSATGLFSSSTTNSGFAYGQNKTAFGTSTTGFGTNPGGLFGQQNQQTTSLFSKPFGQATTTQNTGFSFGNTSTIGQPSTNTMGLFGVTQASQPGGLFGTATNTSTGTAFGTGTGLFGQTNTGFGAVGSTLFGNNKLTTFGSSTTSAPSFGTTSGGLFGFGTNTSGNSIFGSKPAPGTLGTGLGAGFGTALGAGQASLFGNNQPKIGGPLGTGAFGAPGFNTTTATLGFGAPQAPVALTDPNASAAQQAVLQQHINSLTYSPFGDSPLFRNPMSDPKKKEERLKPTNPAAQKALTTPTHYKLTPRPATRVRPKALQTTGTAKSHLFDGLDDDEPSLANGAFMPNTPATLEQNYIVCELQQ

SEQ ID NO: 877565 - protein, 540 aa, Homo sapiens
MFNKSFGTPFGGGTGGFGTTSTFGQNTGFGTTSGGAFGTSAFGSSNNTGGLFGNSQTKPGGLFGTSSFSQPATSTSTGFGFGTSTGTANTLFGTASTGTSLFSSQNNAFAQNKPTGFGNFGTSTSSGGLFGTTNTTSNPFGSTSGSLFGPSSFTAAPTGTTIKFNPPTGTDTMVKAGVSTNISTKHQCITAMKEYESKSLEELRLEDYQANRKGPQNQVGAGTTTGLFGSSPATSSATGLFSSSTTNSGFAYGQNKTAFGTSTTGFGTNPGGLFGQQNQQTTSLFSKPFGQATTTQNTGFSFGNTSTIGQPSTNTMGLFGVTQASQPGGLFGTATNTSTGTAFGTGTGLFGQTNTGFGAVGSTLFGNNKLTTFGSSTTSAPSFGTTSGGLFGFGTNTSGNSIFGSKPAPGTLGTGLGAGFGTALGAGQASLFGNNQPKIGGPLGTGAFGAPGFNTTTATLGFGAPQAPVVDREKQPSEGAFSENNAENESGGDKPPIDPNNPAANWLHARSTRKKRCPYTKHQTLELEKEFLFNMYLTRD

SEQ ID NO: 877566 - protein, 418 aa, Homo sapiens [sequence omitted]

SEQ ID NO: 877567 - protein, 79 aa, Homo sapiens
PAISLRNFGRVRGTPRPPHLLRFRAEEGGDPEAAARIEEESAESGDEALEALRSRLPPPGFPHPLPSFPPVPGPASQLY

SEQ ID NO: 877568 - protein, 1433 aa, Homo sapiens
KRGLVQDKTELEDENQEGMTVHSSVHSNNLNSMPAAEKGKDTLKSAYDDTENDLKGAAIHISKGMLHEEKPGEQILEGGSESESAQKAAGNQMNDRKIQQESLGSAPLMGDDHPNASRDSVEGDALVNGAKLHTLSVEHQREELKEELVLKTQNQPRFSSPDEIDLPRELEDEVPILGRNLPWQQERDVAATASKQMSEKIRLSEGEAKEDSLDEEFFHHKAMQGTEVGQTDQTDSTGGPAFLSKVEEDDYPSEELLEDENAINAKRSKEKNPGNQGRQFDVNLQVPDRAVLGTIHPDPEIEESKQETSMILDSEKTSETAAKGVNTGGREPNTMVEKERPLADKKAQRPFERSDFSDSIKIQTPELGEVFQNKDSDYLKNDNPEEHLKTSGLAGEPEGELSKEDHGNTEKYMGTESQGSAAAEPEDDSFHWTPHTSVEPGHSDKREDLLIISSFFKEQQSLQRFQKYFNVHELEALLQEMSSKLKSAQQESLPYNMEKVLDKVFRASESQILSIAEKMLDTRVAENRDLGMNENNIFEEAAVLDDIQDLIYFVRYKHSTAEETATLVMAPPLEEGLGGAMEEMQPLHEDNFSREKTAELNVQVPEEPTHLDQRVIGDTHASEVSQKPNTEKDLDPGPVTTEDTPMDAIDANKQPETAAEEPASVTPLENAILLIYSFMFYLTKSLVATLPDDVQPGPDFYGLPWKPVFITAFLGIASFAIFLWRTVLVVKDRVYQVTEQQISEKLKTIMKENTELVQKLSNYEQKIKESKKHVQETRKQNMILSDEAIKYKDKIKTLEKNQEILDDTAKNLRVMLESEREQNVKNQDLISENKKSIEKLKDVISMNASEFSEVQIALNEAKLSEEKVKSECHRVQEENARLKKKKEQLQQEIEDWSKLHAELSEQIKSFEKSQKDLEVALTHKDDNINALTNCITQLNLLECESESEGQNKGGNDSDELANGEVGGDRNEKMKNQIKQMMDVSRTQTAISVVEEDLKLLQLKLRASVSTKCNLEDQVKKLEDDRNSLQAAKAGLEDECKTLRQKVEILNELYQQKEMALQKKLSQEEYERQEREHRLSAADEKAVSAAEEVKTYKRRIEEMEDELQKTERSFKNQIATHEKKAHENWLKARAAERAIAEEKREAANLRHKLLELTQKMAMLQEEPVIVKPMPGKPNTQNPPRRGPLSQNGSFGPSPVSGGECSPPLTVEPPVRPLSATLNRRDMPRSEFGSVDGPLPHPRWSAEASGKPSPSDPGSGTATMMNSSSRGSSPTRVLDEGKVNMAPKGPPPFPGVPLMSTPMGGPVPPPIRYGPPPQLCGPFGPRPLPPPFGPGMRPPLGLREFAPGVPPGRRDLPLHPRGFLPGHAPFRPLGSLGPREYFIPGTRLPPPTHGPQEYPPPPAVRDLLPSGSRDEPPPASQSTSQDCSQALKQSP

SEQ ID NO: 877569 - protein, 175 aa, Homo sapiens
MTHWFHRNPLKATAPVSFNYYGVVTGPSASKICNDLRSSRARLLELFTDLSCNPEMMKNAADSYFSLLQGFINSLDESTQESKLRYIQNFKWTDTLQGQVPSAQQDAVFELISMGFNVALWYTKYASRLAGKENITDDEATRTFIEAYKMQWDLRASKANVHLAKIITPGDTGDD

SEQ ID NO: 877570 - protein, 785 aa, Homo sapiens
MDSVPATVPSIAATPGDPELVGPLSVLYAAFIAKLLELVATLPDDVQPGPDFYGLPWKPVFITAFLGIASFAIFLWRTVLVVKDRVYQVTEQQISEKLKTIMKENTELVQKLSNYEQKIKESKKHVQETRKQNMILSDEAIKYKDKIKTLEKNQEILDDTAKNLRVMLESEREQNVKNQDLISENKKSIEKLKDVISMNASEFSEVQIALNEAKLSEEKVKSECHRVQEENARLKKKKEQLQQEIEDWSKLHAELSEQIKSFEKSQKDLEVALTHKDDNINALTNCITQLNLLECESESEGQNKGGNDSDELANGEVGGDRNEKMKNQIKQMMDVSRTQTAISVVEEDLKLLQLKLRASVSTKCNLEDQVKKLEDDRNSLQAAKAGLEDECKTLRQKVEILNELYQQKEMALQKKLSQEEYERQEREHRLSAADEKAVSAAEEVKTYKRRIEEMEDELQKTERSFKNQIATHEKKAHENWLKARAAERAIAEEKREAANLRHKLLELTQKMAMLQEEPVIVKPMPGKPNTQNPPRRGPLSQNGSFGPSPVSGGECSPPLTVEPPVRPLSATLNRRDMPRSEFGSVDGPLPHPRWSAEASGKPSPSDPGSGTATMMNSSSRGSSPTRVLDEGKVNMAPKGPPPFPGVPLMSTPMGGPVPPPIRYGPPPQLCGPFGPRPLPPPFGPGMRPPLGLREFAPGVPPGRRDLPLHPRGFLPGHAPFRPLGSLGPREYFIPGTRLPPPTHGPQEYPPPPAVRDLLPSGSRDEPPPASQSTSQDCSQALKQSP

SEQ ID NO: 877571 - protein, 1288 aa, Homo sapiens
KRGLVQDKTELEDENQEGMTVHSSVHSNNLNSMPAAEKGKDTLKSAYDDTENDLKGAAIHISKGMLHEEKPGEQILEGGSESESAQKAAGNQMNDRKIQQESLGSAPLMGDDHPNASRDSVEGDALVNGAKLHTLSVEHQREELKEELVLKTQNQPRFSSPDEIDLPRELEDEVPILGRNLPWQQERDVAATASKQMSEKIRLSEGEAKEDSLDEEFFHHKAMQGTEVGQTDQTDSTGGPAFLSKVEEDDYPSEELLEDENAINAKRSKEKNPGNQGRQFDVNLQVPDRAVLGTIHPDPEIEESKQETSMILDSEKTSETAAKGVNTGGREPNTMVEKERPLADKKAQRPFERSDFSDSIKIQTPELGEVFQNKDSDYLKNDNPEEHLKTSGLAGEPEGELSKEDHGNTEKYMGTESQGSAAAEPEDDSFHWTPHTSVEPGHSDKREDLLIISSFFKEQQSLQRFQKYFNVHELEALLQEMSSKLKSAQQESLPYNMEKVLDKVFRASESQILSIAEKMLDTRVAENRDLGMNENNIFEEAAVLDDIQDLIYFVRYKHSTAEETATLVMAPPLEEGLGGAMEEMQPLHEDNFSREKTAELNVQVPEEPTHLDQRVIGDTHASEVSQKPNTEKDLDPGPVTTEDTPMDAIDANKQPETAAEEPASVTPLENAILLIYSFMFYLTKSLVATLPDDVQPGPDFYGLPWKPVFITAFLGIASFAIFLWRTVLVVKDRVYQVTEQQISEKLKTIMKENTELVQKLSNYEQKIKESKKHVQETRKQNMILSDEAIKYKDKIKTLEKNQEILDDTAKNLRVMLESEREQNVKNQDLISENKKSIEKLKDVISMNASEFSEVQIALNEAKLSEEKVKSECHRVQEENARLKKKKEQLQQEIEDWSKLHAELSEQIKSFEKSQKDLEVALTHKDDNINALTNCITQLNLLECESESEGQNKGGNDSDELANGEVGGDRNEKMKNQIKQMMDVSRTQTAISVVEEDLKLLQLKLRASVSTKCNLEDQVKKLEDDRNSLQAAKAGLEDECKTLRQKVEILNELYQQKEMALQKKLSQEEYERQEREHRLSAADEKAVSAAEEVKTYKRRIEEMEDELQKTERSFKNQIATHEKKAHENWLKARAAERAIAEEKREAANLRHKLLELTQKMAMLQEEPVIVKPMPGKPNTQNPPRRGPLSQNGSFGPSPVSGGECSPPLTVEPPVRPLSATLNRRDMPRSEFGSVDGPLPHPRWSAEASGKPSPSDPGSGTATMMNSSSRGSSPTRVLDEGKVNAPILNN

SEQ ID NO: 877572 - protein, 889 aa, Homo sapiens
KRGLVQDKTELEDENQEGMTVHSSVHSNNLNSMPAAEKGKDTLKSAYDDTENDLKGAAIHISKGMLHEEKPGEQILEGGSESESAQKAAGNQMNDRKIQQESLGSAPLMGDDHPNASRDSVEGDALVNGAKLHTLSVEHQREELKEELVLKTQNQPRFSSPDEIDLPRELEDEVPILGRNLPWQQERDVAATASKQMSEKIRLSEGEAKEDSLDEEFFHHKAMQGTEVGQTDQTDSTGGPAFLSKVEEDDYPSEELLEDENAINAKRSKEKNPGNQGRQFDVNLQVPDRAVLGTIHPDPEIEESKQETSMILDSEKTSETAAKGVNTGGREPNTMVEKERPLADKKAQRPFERSDFSDSIKIQTPELGEVFQNKDSDYLKNDNPEEHLKTSGLAGEPEGELSKEDHGNTEKYMGTESQGSAAAEPEDDSFHWTPHTSVEPGHSDKREDLLIISSFFKEQQSLQRFQKYFNVHELEALLQEMSSKLKSAQQESLPYNMEKVLDKVFRASESQILSIAEKMLDTRVAENRDLGMNENNIFEEAAVLDDIQDLIYFVRYKHSTAEETATLVMAPPLEEGLGGAMEEMQPLHEDNFSREKTAELNVQVPEEPTHLDQRVIGDTHASEVSQKPNTEKDLDPGPVTTEDTPMDAIDANKQPETAAEEPASVTPLENAILLIYSFMFYLTKSLVATLPDDVQPGPDFYGLPWKPVFITAFLGIASFAIFLWRTVLVVKDRVYQVTEQQISEKLKTIMKENTELVQKLSNYEQKIKESKKHVQETRKQNMILSDEAIKYKDKIKTLEKNQEILDDTAKNLRVMLESEREQNVKNQDLISENKKSIEKLKDVISMNASEFSEVQIALNEAKLSEEKVKSECHRVQEENARLKKKKEQQ

SEQ ID NO: 877573 - protein, 1433 aa, Homo sapiens; identical to SEQ ID NO: 877568

SEQ ID NO: 877574 - protein, 1433 aa, Homo sapiens; identical to SEQ ID NO: 877568

SEQ ID NO: 877575 - protein, 1348 aa, Homo sapiens
KRGLVQDKTELEDENQEGMTVHSSVHSNNLNSMPAAEKGKDTLKSAYDDTENDLKGAAIHISKGMLHEEKPGEQILEGGSESESAQKAAGNQMNDRKIQQESLGSAPLMGDDHPNASRDSVEGDALVNGAKLHTLSVEHQREELKEELVLKTQNQPRFSSPDEIDLPRELEDEVPILGRNLPWQQERDVAATASKQMSEKIRLSEGEAKEDSLDEEFFHHKAMQGTEVGQTDQTDSTGGPAFLSKVEEDDYPSEELLEDENAINAKRSKEKNPGNQGRQFDVNLQVPDRAVLGTIHPDPEIEESKQETSMILDSEKTSETAAKGVNTGGREPNTMVEKERPLADKKAQRPFERSDFSDSIKIQTPELGEVFQNKDSDYLKNDNPEEHLKTSGLAGEPEGELSKEDHGNTEKYMGTESQGSAAAEPEDDSFHWTPHTSVEPGHSDKREDLLIISSFFKEQQSLQRFQKYFNVHELEALLQEMSSKLKSAQQESLPYNMEKVLDKVFRASESQILSIAEKMLDTRVAENRDLGMNENNIFEEAAVLDDIQDLIYFVRYKHSTAEETATLVMAPPLEEGLGGAMEEMQPLHEDNFSREKTAELNVQVPEEPTHLDQRVIGDTHASEVSQKPNTEKDLDPGPVTTEDTPMDAIDANKQPETAAEEPASVTPLENAILLIYSFMFYLTKSLVATLPDDVQPGPDFYGLPWKPVFITAFLGIASFAIFLWRTVLVVKDRVYQVTEQQISEKLKTIMKENTELVQKLSNYEQKIKESKKHVQETRKQNMILSDEAIKYKDKIKTLEKNQEILDDTAKNLRVMLESEREQNVKNQDLISENKKSIEKLKDVISMNASEFSEVQIALNEAKLSEEKVKSECHRVQEENARLKKKKEQLQQEIEDWSKLHAELSEQIKSFEKSQKDLEVALTHKDDNINALTNCITQLNLLECESESEGQNKGGNDSDELANGEVGGDRNEKMKNQIKQMMDVSRTQTAISVVEEDLKLLQLKLRASVSTKCNLEDQVKKLEDDRNSLQAAKAGLEDECKTLRQKVEILNELYQQKEMALQKKLSQEEYERQEREHRLSAADEKAVSAAEEVKTYKRRIEEMEDELQKTERSFKNQIATHEKKAHENWLKARAAERAIAEEKREAANLRHKLLELTQKMAMLQEEPVIVKPMPGKPNTQNPPRRGPLSQNGSFGPSPVSGGECSPPLTVEPPVRPLSATLNRRDMPRSEFGSVDGPLPHPRWSAEASGKPSPSDPGSGTATMMNSSSRGSSPTRVLDEGKVNMAPKGPPPFPGVPLMSTPMGGPVPPPIRYGPPPQLCGPFGPRPLPPPFDKDGRPGTVAHACNPSTL

SEQ ID NO: 877576 - protein, 1288 aa, Homo sapiens
  misc_feature (1259)..(1259): Xaa can be any naturally occurring amino acid
  misc_feature (1267)..(1267): Xaa can be any naturally occurring amino acid
  misc_feature (1286)..(1286): Xaa can be any naturally occurring amino acid
KRGLVQDKTELEDENQEGMTVHSSVHSNNLNSMPAAEKGKDTLKSAYDDTENDLKGAAIHISKGMLHEEKPGEQILEGGSESESAQKAAGNQMNDRKIQQESLGSAPLMGDDHPNASRDSVEGDALVNGAKLHTLSVEHQREELKEELVLKTQNQPRFSSPDEIDLPRELEDEVPILGRNLPWQQERDVAATASKQMSEKIRLSEGEAKEDSLDEEFFHHKAMQGTEVGQTDQTDSTGGPAFLSKVEEDDYPSEELLEDENAINAKRSKEKNPGNQGRQFDVNLQVPDRAVLGTIHPDPEIEESKQETSMILDSEKTSETAAKGVNTGGREPNTMVEKERPLADKKAQRPFERSDFSDSIKIQTPELGEVFQNKDSDYLKNDNPEEHLKTSGLAGEPEGELSKEDHGNTEKYMGTESQGSAAAEPEDDSFHWTPHTSVEPGHSDKREDLLIISSFFKEQQSLQRFQKYFNVHELEALLQEMSSKLKSAQQESLPYNMEKVLDKVFRASESQILSIAEKMLDTRVAENRDLGMNENNIFEEAAVLDDIQDLIYFVRYKHSTAEETATLVMAPPLEEGLGGAMEEMQPLHEDNFSREKTAELNVQVPEEPTHLDQRVIGDTHASEVSQKPNTEKDLDPGPVTTEDTPMDAIDANKQPETAAEEPASVTPLENAILLIYSFMFYLTKSLVATLPDDVQPGPDFYGLPWKPVFITAFLGIASFAIFLWRTVLVVKDRVYQVTEQQISEKLKTIMKENTELVQKLSNYEQKIKESKKHVQETRKQNMILSDEAIKYKDKIKTLEKNQEILDDTAKNLRVMLESEREQNVKNQDLISENKKSIEKLKDVISMNASEFSEVQIALNEAKLSEEKVKSECHRVQEENARLKKKKEQLQQEIEDWSKLHAELSEQIKSFEKSQKDLEVALTHKDDNINALTNCITQLNLLECESESEGQNKGGNDSDELANGEVGGDRNEKMKNQIKQMMDVSRTQTAISVVEEDLKLLQLKLRASVSTKCNLEDQVKKLEDDRNSLQAAKAGLEDECKTLRQKVEILNELYQQKEMALQKKLSQEEYERQEREHRLSAADEKAVSAAEEVKTYKRRIEEMEDELQKTERSFKNQIATHEKKAHENWLKARAAERAIAEEKREAANLRHKLLELTQKMAMLQEEPVIVKPMPGKPNTQNPPRRGPLSQNGSFGPSPVSGGECSPPLTVEPPVRPLSATLNRRDMPRSEFGSVDGPLPHPRWSAEASGKPSPSDPRIWXQLPMMNHXSRKLLSPYQGYLRWKGQGXNY

SEQ ID NO: 877577 - protein, 355 aa, Homo sapiens
MKNAADSYFSLLQGFINSLDESTQESKLRYIQNFKWTDTLQGQVPSAQQDAVFELISMGFNVALWYTKYASRLAGKENITEDEAKEVHRSLKIAAGIFKHLKESHLPKLITPAEKGRDLESRLIEAYVIQCQAEAQEVTIARAIELKHAPGLIAALAYETANFYQKADHTLSSLEPAYSAKWREYLHLKMCFYTAYAYCYHGETLLASDKCGEAIRSLQEAEKLYAKAEALCKEYGETKGPGPTVKPSGHLFFRKLGNLVKNTLEKCQRENGFIYFQKIPTEAPQLELKANYGLVEPIPFEFPPTSVQWTPETLAAFDLTKRPKDDSTKPKPEEEVKPVKEPDIKPQKDTGCYIS

SEQ ID NO: 877578 - protein, 282 aa, Homo sapiens
MDSVPATVPSIAATPGDPELVGPLSVLYAAFIAKLLELVATLPDDVQPGPDFYGLPWKPVFITAFLGIASFAIFLWRTVLVVKDRVYQVTEQQISEKLKTIMKENTELVQKLSNYEQKIKESKKHVQETRKQNMILSDEAIKYKDKIKTLEKNQEILDDTAKNLRVMLESEREQNVKNQDLISENKKSIEKLKDVISMNASEFSEVQIALNEAKLSEEKVKSECHRVQEENARLKKKKEQLQQEIEDWSKLHAELSEQIKSFEKSQKKGENFLFFFWGGGGG

SEQ ID NO: 877579 - protein, 689 aa, Homo sapiens
KRGLVQDKTELEDENQEGMTVHSSVHSNNLNSMPAAEKGKDTLKSAYDDTENDLKGAAIHISKGMLHEEKPGEQILEGGSESESAQKAAGNQMNDRKIQQESLGSAPLMGDDHPNASRDSVEGDALVNGAKLHTLSVEHQREELKEELVLKTQNQPRFSSPDEIDLPRELEDEVPILGRNLPWQQERDVAATASKQMSEKIRLSEGEAKEDSLDEEFFHHKAMQGTEVGQTDQTDSTGGPAFLSKVEEDDYPSEELLEDENAINAKRSKEKNPGNQGRQFDVNLQVPDRAVLGTIHPDPEIEESKQETSMILDSEKTSETAAKGVNTGGREPNTMVEKERPLADKKAQRPFERSDFSDSIKIQTPELGEVFQNKDSDYLKNDNPEEHLKTSGLAGEPEGELSKEDHGNTEKYMGTESQGSAAAEPEDDSFHWTPHTSVEPGHSDKREDLLIISSFFKEQQSLQRFQKYFNVHELEALLQEMSSKLKSAQQESLPYNMEKVLDKVFRASESQILSIAEKMLDTRVAENRDLGMNENNIFEEAAVLDDIQDLIYFVRYKHSTAEETATLVMAPPLEEGLGGAMEEMQPLHEDNFSREKTAELNVQVPEEPTHLDQRVIGDTHASEVSQKPNTEKDLDPGPVTTEDTPMDAIDANKQPETAAEEPASVTPLENAILLIYSFMFYLTKSVSLT

SEQ ID NO: 877580 - protein, 75 aa, Homo sapiens
KNRGPSAIPQGIVACVQLFYTMDSVPATVPSIAATPGDPELVGPLSVLYAAFIAKLLEVTVPIPGEGPKLSQAGG

SEQ ID NO: 877581 - protein, 1433 aa, Homo sapiens; identical to SEQ ID NO: 877568

SEQ ID NO: 877582 - protein, 1118 aa, Homo sapiens
KRGLVQDKTELEDENQEGMTVHSSVHSNNLNSMPAAEKGKDTLKSAYDDTENDLKGAAIHISKGMLHEEKPGEQILEGGSESESAQKAAGNQMNDRKIQQESLGSAPLMGDDHPNASRDSVEGDALVNGAKLHTLSVEHQREELKEELVLKTQNQPRFSSPDEIDLPRELEDEVPILGRNLPWQQERDVAATASKQMSEKIRLSEGEAKEDSLDEEFFHHKAMQGTEVGQTDQTDSTGGPAFLSKVEEDDYPSEELLEDENAINAKRSKEKNPGNQGRQFDVNLQVPDRAVLGTIHPDPEIEESKQETSMILDSEKTSETAAKGVNTGGREPNTMVEKERPLADKKAQRPFERSDFSDSIKIQTPELGEVFQNKDSDYLKNDNPEEHLKTSGLAGEPEGELSKEDHGNTEKYMGTESQGSAAAEPEDDSFHWTPHTSVEPGHSDKREDLLIISSFFKEQQSLQRFQKYFNVHELEALLQEMSSKLKSAQQESLPYNMEKVLDKVFRASESQILSIAEKMLDTRVAENRDLGMNENNIFEEAAVLDDIQDLIYFVRYKHSTAEETATLVMAPPLEEGLGGAMEEMQPLHEDNFSREKTAELNVQVPEEPTHLDQRVIGDTHASEVSQKPNTEKDLDPGPVTTEDTPMDAIDANKQPETAAEEPASVTPLENAILLIYSFMFYLTKSLVATLPDDVQPGPDFYGLPWKPVFITAFLGIASFAIFLWRTVLVVKDRVYQVTEQQISEKLKTIMKENTELVQKLSNYEQKIKESKKHVQETRKQNMILSDEAIKYKDKIKTLEKNQEILDDTAKNLRVMLESEREQNVKNQDLISENKKSIEKLKDVISMNASEFSEVQIALNEAKLSEEKVKSECHRVQEENARLKKKKEQLQQEIEDWSKLHAELSEQIKSFEKSQKDLEVALTHKDDNINALTNCITQLNLLECESESEGQNKGGNDSDELANGEVGGDRNEKMKNQIKQMMDVSRTQTAISVVEEDLKLLQLKLRASVSTKCNLEGPGMRPPLGLREFAPGVPPGRRDLPLHPRGFLPGHAPFRPLGSLGPREYFIPGTRLPPPTHGPQEYPPPPAVRDLLPSGSRDEPPPASQSTSQDCSQALKQSP

SEQ ID NO: 877583 - protein, 46 aa, Homo sapiens
MSEDGCFSVISPATSPESQAIGSPPFTLVSIDPWTVDQKSPSSALK

SEQ ID NO: 877584 - protein, 1275 aa, Homo sapiens
KRGLVQDKTELEDENQEGMTVHSSVHSNNLNSMPAAEKGKDTLKSAYDDTENDLKGAAIHISKGMLHEEKPGEQILEGGSESESAQKAAGNQMNDRKIQQESLGSAPLMGDDHPNASRDSVEGDALVNGAKLHTLSVEHQREELKEELVLKTQNQPRFSSPDEIDLPRELEDEVPILGRNLPWQQERDVAATASKQMSEKIRLSEGEAKEDSLDEEFFHHKAMQGTEVGQTDQTDSTGGPAFLSKVEEDDYPSEELLEDENAINAKRSKEKNPGNQGRQFDVNLQVPDRAVLGTIHPDPEIEESKQETSMILDSEKTSETAAKGVNTGGREPNTMVEKERPLADKKAQRPFERSDFSDSIKIQTPELGEVFQNKDSDYLKNDNPEEHLKTSGLAGEPEGELSKEDHGNTEKYMGTESQGSAAAEPEDDSFHWTPHTSVEPGHSDKREDLLIISSFFKEQQSLQRFQKYFNVHELEALLQEMSSKLKSAQQESLPYNMEKVLDKVFRASESQILSIAEKMLDTRVAENRDLGMNENNIFEEAAVLDDIQDLIYFVRYKHSTAEETATLVMAPPLEEGLGGAMEEMQPLHEDNFSREKTAELNVQVPEEPTHLDQRVIGDTHASEVSQKPNTEKDLDPGPVTTEDTPMDAIDANKQPETAAEEPASVTPLENAILLIYSFMFYLTKSLVATLPDDVQPGPDFYGLPWKPVFITAFLGIASFAIFLWRTVLVVKDRVYQVTEQQISEKLKTIMKENTELVQKLSNYEQKIKESKKHVQETRKQNMILSDEAIKYKDKIKTLEKNQEILDDTAKNLRVMLESEREQNVKNQDLISENKKSIEKLKDVISMNASEFSEVQIALNEAKLSEEKVKSECHRVQEENARLKKKKEQLQQEIEDWSKLHAELSEQIKSFEKSQKDLEVALTHKDDNINALTNCITQLNLLECESESEGQNKGGNDSDELANGEVGGDRNEKMKNQIKQMMDVSRTQTAISVVEEDLKLLQLKLRASVSTKCNLEDQVKKLEDDRNSLQAAKAGLEDECKTLRQKVEILNELYQQKEMALQKKLSQEEYERQEREHRLSAADEKAVSAAEEVKTYKRRIEEMEDELQKTERSFKNQIATHEKKAHENWLKARAAERAIAEEKREAANLRHKLLELTQKMAMLQEEPVIVKPMPGKPNTQNPPRRGPLSQNGSFGPSPVSGGECSPPLTVEPPVRPLSATLNRRDMPRSEFGSVDGPLPHPRWSAEASGKPSPSGKGARVFKESKTMQEVGRGFFF

SEQ ID NO: 877585 - protein, 778 aa, Homo sapiens
MDSVPATVPSIAATPGDPELVGPLSVLYAAFIAKLLELVATLPDDVQPGPDFYGLPWKPVFITAFLGIASFAIFLWRTVLVVTEQQISEKLKTIMKENTELVQKLSNYEQKIKESKKHVQETRKQNMILSDEAIKYKDKIKTLEKNQEILDDTAKNLRVMLESEREQNVKNQDLISENKKSIEKLKDVISMNASEFSEVQIALNEAKLSEEKVKSECHRVQEENARLKKKKEQLQQEIEDWSKLHAELSEQIKSFEKSQKDLEVALTHKDDNINALTNCITQLNLLECESESEGQNKGGNDSDELANGEVGGDRNEKMKNQIKQMMDVSRTQTAISVVEEDLKLLQLKLRASVSTKCNLEDQVKKLEDDRNSLQAAKAGLEDECKTLRQKVEILNELYQQKEMALQKKLSQEEYERQEREHRLSAADEKAVSAAEEVKTYKRRIEEMEDELQKTERSFKNQIATHEKKAHENWLKARAAERAIAEEKREAANLRHKLLELTQKMAMLQEEPVIVKPMPGKPNTQNPPRRGPLSQNGSFGPSPVSGGECSPPLTVEPPVRPLSATLNRRDMPRSEFGSVDGPLPHPRWSAEASGKPSPSDPGSGTATMMNSSSRGSSPTRVLDEGKVNMAPKGPPPFPGVPLMSTPMGGPVPPPIRYGPPPQLCGPFGPRPLPPPFGPGMRPPLGLREFAPGVPPGRRDLPLHPRGFLPGHAPFRPLGSLGPREYFIPGTRLPPPTHGPQEYPPPPAVRDLLPSGSRDEPPPASQSTSQDCSQALKQSP

SEQ ID NO: 877586 - protein, 72 aa, Homo sapiens
AAAYYYYKSAAASIFFLILLTEYTSQNKSTSVLWSLTDPGSGTATMMNSSSRGSSPTRVLDEGKVNAPILNN

SEQ ID NO: 877587 - protein, 1433 aa, Homo sapiens; identical to SEQ ID NO: 877568

SEQ ID NO: 877588 - protein, 1275 aa, Homo sapiens; identical to SEQ ID NO: 877584

SEQ ID NO: 877589 - protein, 411 aa, Homo sapiens
MTHWFHRNPLKATAPVSFNYYGVVTGPSASKICNDLRSSRARLLELFTDLSCNPEMMKNAADSYFSLLQGFINSLDESTQESKLRYIQNFKWTDTLQGQVPSAQQDAVFELISMGFNVALWYTKYASRLAGKENITEDEAKEVHRSLKIAAGIFKHLKESHLPKLITPAEKGRDLESRLIEAYVIQCQAEAQEVTIARAIELKHAPGLIAALAYETANFYQKADHTLSSLEPAYSAKWREYLHLKMCFYTAYAYCYHGETLLASDKCGEAIRSLQEAEKLYAKAEALCKEYGETKGPGPTVKPSGHLFFRKLGNLVKNTLEKCQRENGFIYFQKIPTEAPQLELKANYGLVEPIPFEFPPTSVQWTPETLAAFDLTKRPKDDSTKPKPEEEVKPVKEPDIKPQKDTGCYIS

SEQ ID NO: 877590 - protein, 324 aa, Homo sapiens
KNSILLGTWNLSLQCISPLEDFELISMGFNVALWYTKYASRLAGKENITEDEAKEVHRSLKIAAGIFKHLKESHLPKLITPAEKGRDLESRLIEAYVIQCQAEAQEVTIARAIELKHAPGLIAALAYETANFYQKADHTLSSLEPAYSAKWREYLHLKMCFYTAYAYCYHGETLLASDKCGEAIRSLQEAEKLYAKAEALCKEYGETKGPGPTVKPSGHLFFRKLGNLVKNTLEKCQRENGFIYFQKIPTEAPQLELKANYGLVEPIPFEFPPTSVQWTPETLAAFDLTKRPKDDSTKPKPEEEVKPVKEPDIKPQKDTGCYIS

SEQ ID NO: 877591 - protein, 807 aa, Homo sapiens
KRGLVQDKTELEDENQEGMTVHSSVHSNNLNSMPAAEKGKDTLKSAYDDTENDLKGAAIHISKGMLHEEKPGEQILEGGSESESAQKAAGNQMNDRKIQQESLGSAPLMGDDHPNASRDSVEGDALVNGAKLHTLSVEHQREELKEELVLKTQNQPRFSSPDEIDLPRELEDEVPILGRNLPWQQERDVAATASKQMSEKIRLSEGEAKEDSLDEEFFHHKAMQGTEVGQTDQTDSTGGPAFLSKVEEDDYPSEELLEDENAINAKRSKEKNPGNQGRQFDVNLQVPDRAVLGTIHPDPEIEESKQETSMILDSEKTSETAAKGVNTGGREPNTMVEKERPLADKKAQRPFERSDFSDSIKIQTPELGEVFQNKDSDYLKNDNPEEHLKTSGLAGEPEGELSKEDHGNTEKYMGTESQGSAAAEPEDDSFHWTPHTSVEPGHSDKREDLLIISSFFKEQQSLQRFQKYFNVHELEALLQEMSSKLKSAQQESLPYNMEKVLDKVFRASESQILSIAEKMLDTRVAENRDLGMNENNIFEEAAVLDDIQDLIYFVRYKHSTAEETATLVMAPPLEEGLGGAMEEMQPLHEDNFSREKTAELNVQVPEEPTHLDQRVIGDTHASEVSQKPNTEKDLDPGPVTTEDTPMDAIDANKQPETAAEEPASVTPLENAILLIYSFMFYLTKSLVATLPDDVQPGPDFYGLPWKPVFITAFLGIASFAIFLWRTVLVVKDRVYQVTEQQISEKLKTIMKENTELVQKLSNYEQKIKESKKHVQETRKQNMILSDEAIKYKDKIKTLSSRGHFASR

SEQ ID NO: 877592 - protein, 72 aa, Homo sapiens
LPNRAPRQAQLWVQHVHVALYVCSSSAGKPWGGRRKGQIWKHADSLSPKNETLHHLETTCRGPRWAPGTTWY

SEQ ID NO: 877593 - protein, 136 aa, Homo sapiens
AHSLRRELNDSRAPAALPARPPLPPRDERGKPLWELGLRWREEGSYWSWPAALVLESPGEAEGRARFGSMQTAFPPRMRLSTTWKQLAEGQDGVLFLLPRLEYSGAVLAQCNLHLLSSSNSPASASQVVGIKGTRH

SEQ ID NO: 877594 - protein, 401 aa, Homo sapiens
LLLLLNSRPSTFFFQFSSIFIIHSRGHASGLSCPHLFPAPEVGTAADSSLGTRQLTDTAASPNSSGMGSASPGLSSVSPSHLLLPPDTVSRTGLEKAAAGAVGLERRDWSPSPPATPEQGLSAFYLSYFDMLYPEDSSWAAKAPGASSREEPPEEPEQCPVIDSQAPAGSLDLVPGGLTLEEHSLEQVQSMVVGEVLKDIETACKLLNITADPMDWSPSNVQKWLLWTEHQYRLPPMGKAFQELAGKELCAMSEEQFRQRSPLGGDVLHAHLDIWKSAAWMKERTSPGAIHYCASTSEESWTDSEVDSSCSGQPIHLWQFLKELLLKPHSYGRFIRWLNKEKGIFKIEDSAQVARLWGIRKNRPAMNYDKLSRSIRQYYKKGIIRKPDISQRLVYQFVHPI

SEQ ID NO: 877595 - protein, 109 aa, Homo sapiens
LLLLLNSRPSTFFFQFSSIFIIHSRGHASGGPLSCLPCLSQALRWGKTGSLLCCSDLPEPKVREGQPTAPGGYGSSGAFGTLGQGCFLLRPSCSPGGQRETGLLPNTCL

SEQ ID NO: 877596 - protein, 335 aa, Homo sapiens
MGSASPGLSSVSPSHLLLPPDTVSRTGLEKAAAGAVGLERRDWSPSPPATPEQGLSAFYLSYFDMLYPEDSSWAAKAPGASSREEPPEEPEQCPVIDSQAPAGSLDLVPGGLTLEEHSLEQVQSMVVGEVLKDIETACKLLNITADPMDWSPSNVQKWLLWTEHQYRLPPMGKAFQELAGKELCAMSEEQFRQRSPLGGDVLHAHLDIWKSAAWMKERTSPGAIHYCASTSEESWTDSEVDSSCSGQPIHLWQFLKELLLKPHSYGRFIRWLNKEKGIFKIEDSAQVARLWGIRKNRPAMNYDKLSRSIRQYYKKGIIRKPDISQRLVYQFVHPI

SEQ ID NO: 877597 - protein, 335 aa, Homo sapiens; identical to SEQ ID NO: 877596

SEQ ID NO: 877598 - protein, 162 aa, Homo sapiens [sequence omitted]

SEQ ID NO: 877599 - protein, 119 aa, Homo sapiens
VVIHEKKVSSFEVFLKEVTGGVQAPFGAVRNIYTPRTGHRIRKLDQIQSGGNYVAGGQEAFKKLNYLDIGEIKKRPMEVVNTEVKPVIHSRINVSARFRKPLQEPCTIFLIANGDLINP

SEQ ID NO: 877600 - protein, 87 aa, Homo sapiens
VVIHEKKVSSFEVFLKEVTGGVQAPFGAVRNIYTPRTGHRIRKLDQIQSGGNYVAGGQEAFKKLNYLDIGEIKKRPMEVVNTELHVL

SEQ ID NO: 877601 - protein, 87 aa, Homo sapiens
RSSGQSACGGRAHGPAGRAGSGRRDEEGRRRAASKDVPRDPRHLPVDFLAGKDVAVPVTCGDTADLPSTDGEKKITLPNVGGSNLVN

SEQ ID NO: 877602 - protein, 70 aa, Homo sapiens
RPLRPHLSLRLAMNSGMETVSISTKSALPNSRLSCSAMAPARGLRIIADVLSMGPFFLHPPNNYCTTLHI

SEQ ID NO: 877603 - protein, 79 aa, Homo sapiens
MSNGAAAVESSLGFLHGSMWSYRPSNSTSGRAPEGMENRCPNKNKHTNTQGSTISSGLKQEQPPRSPLMNGYTPCGGSA

SEQ ID NO: 877604 - protein, 141 aa, Homo sapiens
RARARRCPEARSRGGVAAMATAAGATYFQRGSLFWFTVITLSFGYYTWVVFWPQSIPYQNLGPLGPFTQYLVDHHHTLLCNGYWLAWLIHVGESLYAIVLCKHKGITSGRAQLLWFLQTFFFGIASLTILIAYKRKRQKQT

SEQ ID NO: 877605 - protein, 141 aa, Homo sapiens; identical to SEQ ID NO: 877604

SEQ ID NO: 877606 - protein, 103 aa, Homo sapiens
MATAAGATYFQRGSLFWFTVITLSFGYYTWVVFWPQSIPYQNLGPLGPFTQYLVDHHHTLLCNGYWLAWLIHVGESLYAIVLCKQNELRIRIKMRKLILRDSE

SEQ ID NO: 877607 - protein, 171 aa, Homo sapiens
MATAAGATYFQRGSLFWFTVITLSFGYYTWVVFWPQSIPYQNLGPLGPFTQYLVDHHHTLLCNGYWLAWLIHVGESLYAIVLCKHKGITSGRAQLLWFLQTFFFGIASLTILIAYKRKRQTFFLWGRGGAVIYSVIFLLSRNCPSKLFKTPSLVSFFSYMLWLSLNRPVVT

SEQ ID NO: 877608 - protein, 159 aa, Homo sapiens
GNGACAHAHLTVVSVTHWVVFWPQSIPYQNLGPLGPFTQYLVDHHHTLLCNGYWLAWLIHVGESLYAIVLCKHKGITSGRAQLLWFLQTFFFGIASLTILIAYKRKRQTFFLWGRGGAVIYSVIFLLSRNCPSKLFKTPSLVSFFSYMLWLSLNRPVVT

SEQ ID NO: 877609 - protein, 141 aa, Homo sapiens; identical to SEQ ID NO: 877604

SEQ ID NO: 877610 - protein, 143 aa, Homo sapiens
TAGELPANSVSGFFKRMVKSEASNAATAYFRPARPLPSLVTVLGLGYFAWVVFWPQSIPYQNLGPLGPFTQYLVDHHHTLLCNGYWLAWLIHVGESLYAIVLCKHKGITSGRAQLLWFLQTFFFGIASLTILIAYKRKRQKQT

SEQ ID NO: 877611 - protein, 111 aa, Homo sapiens
GNGACAHAHLTVVSVTHWVVFWPQSIPYQNLGPLGPFTQYLVDHHHTLLCNGYWLAWLIHVGESLYAIVLCKHKGITSGRAQLLWFLQTFFFGIASLTILIAYKRKRQKQT

SEQ ID NO: 877612 - protein, 84 aa, Homo sapiens
GNGACAHAHLTVVSVTHWVVFWPQSIPYQNLGPLGPFTQYLVDHHHTLLCNGYWLAWLIHVGESLYAIVLCKQNELRIRIKVCE

SEQ ID NO: 877613 - protein, 102 aa, Homo sapiens
RARARRCPEARSRGGVAAMATAAGATYFQRGSLFWFTVITLSFGYYTWVVFWPQSIPYQNLGPLGPFTQYLVDHHHTLLCNGYWLAWLIHVGESLYAIVLCK

SEQ ID NO: 877614 - protein, 95 aa, Homo sapiens
RDTYCIQGLCSLVTSAMPTPVPSCTTWFDFCPSSTAYTEPGAPGPRSRITWCTNITPVSVHRGLGLDLVVFHDGTVPLCHEYRGTHVDACNTDYR

SEQ ID NO: 877615 - protein, 141 aa, Homo sapiens; identical to SEQ ID NO: 877604

SEQ ID NO: 877616 - protein, 141 aa, Homo sapiens; identical to SEQ ID NO: 877604

SEQ ID NO: 877617 - protein, 105 aa, Homo sapiens
MSTNLPILPSFFFFFVLFSNDLDVPVGHIVHTGMLNEGGGYENDCSIARLNKRSFFMISPTDQQVHCWAWLKKQSLAGEESQRSDREATGYNRFVNSAKHSGGRA

SEQ ID NO: 877618 - protein, 183 aa, Homo sapiens
MEKPLEFERPQVRLFPPDQGLESPPIFQFCRLFFFVFVLFSNDLDVPVGHIVHTGMLNEGGGYENDCSIARLNKRSFFMISPTDQQVHCWAWLKKHMPKDSNLLLEDVTWKYFALNLIGPRAVDVLSELSYAPMTPDHFPSLFCKEMSVGYANGIRVMSMTHTGEPGFMLYIPIEGNEMLFHK

SEQ ID NO: 877619 - protein, 195 aa, Homo sapiens
  misc_feature (9)..(9): Xaa can be any naturally occurring amino acid
AQTCPGLPXPCSTLMLCGSVPGTLPGRQKGDEELKNQHRDANLAGTSCLFSGHSSLISQPPSLPFQSDKRVPGCPLLTLIHTWCPETFPHTFQPASPPSSVAPWAAWEVGKGLHLLLEDVTWKYTALNLIGPRAVDVLSELSYAPMTPDHFPSLFCKEMSVGYANGIRVMSMTHTGEPGFMLYIPIEGNEMLFHK

SEQ ID NO: 877620 - protein, 280 aa, Homo sapiens
MEKPLEFERPQVRLFPPDQGLESPPIFQFCRLFFFVFVLFSNDLDVPVGHIVHTGMLNEGGGYENDCSIARLNKRSFFMISPTDQQVHCWAWLKKHMPKDSNLLLEDVTWKYFALNLIGPRAVDVLSELSYAPMTPDHFPSLFCKEMSVGYANGIRVMSMTHTGEPGFMLYIPIEMGLHHVVHACLQLLTSSGPHTSASQSAGITGMSHCAWPQAAGVQWQDLGSPQPPPPRFKQFCLSLLSSWDNRHAPPCLANFVFLVETRFHYGGHWSGWSRTPDLR

SEQ ID NO: 877621 - protein, 116 aa, Homo sapiens
MSSFTEFEITTTGDQALEVLQYLFSNDLDVPVGHIVHTGMLNEGGGYENDCSIARLNKRSFFMISPTDQQVHCWAWLKKHMPKDSNLLLEDVTWKYFGLSNPCFSIHLAPCASSRS

SEQ ID NO: 877622 - protein, 167 aa, Homo sapiens
MSSFTEFEITTTGDQALEVLQYLFSNDLDVPVGHIVHTGMLNEGGGYENDCSIARLNKRSFFMISPTDQQVHCWAWLKKHMPKDSNLLLEDVTWKYFALNLIGPRAVDVLSELSYAPMTPDHFPSLFCKEMSVGYANGIRVMSMTHTGEPGFMLYIPIEGNEMLFHK

SEQ ID NO: 877623 - protein, 272 aa, Homo sapiens
MEKPLEFERPQVRLFPPDQGLESPPIFQFCRLFFFVFVLFSNDLDVPVGHIVHTGMLNEGGGYENDCSIARLNKRSFFMISPTDQQVHCWAWLKKHMPKDSNLLLEDVTWKYFALNLIGPRAVDVLSELSYAPMTPDHFPSLFCKEMSVGYANGIRVMSMTHTGEPGFMLYIPIEYALHVYNEVMSVGQKYGIRNAGYYALRSLRIEKLMPSGVKDINNLTTPLECGRESRVKLEKGMDFIGRDALLQQKQNGVYKRLTMFILDRHDSELDL

SEQ ID NO: 877624 - protein, 281 aa, Homo sapiens
MQTDSLSPSPNPVSPVPLNNPTSAPRYGTVIPNRIFVGGIDFKTNESDLRKFFSQYGSVKEVKIVNDRAGVSKGYGFVTFETQEDAQKILQEAEKLNYKDKKLNIGPAIRKQQVGIPRSSIMPAAGTMYLTTSTGYPYTYHNGVAYFHTPEVTSVPPPWPSRSVCSSPVMVAQPIYQQPAYHYQATTQYLPGQWQWSVPQPSASSAPFLYLQPSEVIYQPVEIAQDGGCVPPPLSLMETSVPEPYSDHGVQATYHQVYAPSAITMPAPVMQPEPIKVRNLF

SEQ ID NO: 877625 - protein, 72 aa, Homo sapiens
GKKTKKKKPTNHRRNHEHTIKYRPSPEIADWLPYSDHGVQATYHQVYAPSAITMPAPVMQPEPIKTVWSIHY

SEQ ID NO: 877626 - protein, 283 aa, Homo sapiens
MQTDSLSPSPNPVSPVPLNNPTSAPRYGTVIPNRIFVGGIDFKTNESDLRKFFSQYGSVKEVKIVNDRAGVSKGYGFVTFETQEDAQKILQEAEKLNYKDKKLNIGPAIRKQQVGIPRSSIMPAAGTMYLTTSTGYPYTYHNGVAYFHTPEVTSVPPPWPSRSVCSSPVMVAQPIYQQPAYHYQATTQYLPGQWQWSVPQPSASSAPFLYLQPSEVIYQPVEIAQDGGCVPPPLSLMETSVPEPYSDHGVQATYHQVYAPSAITMPAPVMQPEPIKTVWSIHY

SEQ ID NO: 877627 - protein, 295 aa, Homo sapiens
METESGPQTSNQMQTDSLSPSPNPVSPVPLNNPTSAPRYGTVIPNRIFVGGIDFKTNESDLRKFFSQYGSVKEVKIVNDRAGVSKGYGFVTFETQEDAQKILQEAEKLNYKDKKLNIGPAIRKQQVGIPRSSIMPAAGTMYLTTSTGYPYTYHNGVAYFHTPEVTSVPPPWPSRSVCSSPVMVAQPIYQQPAYHYQATTQYLPGQWQWSVPQPSASSAPFLYLQPSEVIYQPVEIAQDGGCVPPPLSLMETSVPEPYSDHGVQATYHQVYAPSAITMPAPVMQPEPIKTVWSIHY

SEQ ID NO: 877628 - protein, 90 aa, Homo sapiens
RGRFGGYAGLAGAAMLTLASPTAISHPAEEAGAAAETVFHKVHFSGYQVATYLKWCESYSFGTVVDFQIGKSKGPKRQLTGNDLILDGCC

SEQ ID NO: 877629 - protein, 134 aa, Homo sapiens
RGRFGGYAGLAGAAMLTLASPTAISHPAEEAGAAAETVFHKYSHEHSAEMNNQMTSCEIWRREGNGEHASAASVVSVGKHSDEVLSFPQKASQCPITSFTSVEGRAWASIVHQWRSIWHRTDPTIAVVTAVLAF

SEQ ID NO: 877630 - protein, 135 aa, Homo sapiens [sequence omitted]

SEQ ID NO: 877631 - protein, 30 aa, Homo sapiens
MRHALGEVEVPTVAQQSGGVLLLLQGQQQQ

SEQ ID NO: 877632 - protein, 109 aa, Homo sapiens
AALRAPEAAVAGGPPDFSSRPVLERLTGPRPAASLSLALRGLGDWAAGLRVRGGGRLRPGASWQREPRDGGPGRGGGAAAVSLGGEGAAGPARFPARKLREAWTSAHWR

SEQ ID NO: 877633 - protein, 109 aa, Homo sapiens; identical to SEQ ID NO: 877632

SEQ ID NO: 877634 - protein, 101 aa, Homo sapiens
AALRAPEAAVAGGPPDFSSRPVLERLTGPRPAASLSLALRGLGDWAAGLRVRGGGRLRPGASWQREPRDGGPGRGGGAAAVYSCRPGATARTTPPFSYPDS

SEQ ID NO: 877635 - protein, 109 aa, Homo sapiens; identical to SEQ ID NO: 877632

SEQ ID NO: 877636 - protein, 109 aa, Homo sapiens; identical to SEQ ID NO: 877632

SEQ ID NO: 877637 - protein, 53 aa, Homo sapiens
MAILARQGEHSTDCTYGRDCRAPCDRLMRQCKGDLIQPNLAKVCALLRGYCCL

SEQ ID NO: 877638 - protein, 109 aa, Homo sapiens; identical to SEQ ID NO: 877632

SEQ ID NO: 877639 - protein, 109 aa, Homo sapiens; identical to SEQ ID NO: 877632

SEQ ID NO: 877640 - protein, 109 aa, Homo sapiens; identical to SEQ ID NO: 877632

SEQ ID NO: 877641 - protein, 109 aa, Homo sapiens; identical to SEQ ID NO: 877632

SEQ ID NO: 877642 - protein, 96 aa, Homo sapiens
VSKDLSLSVRQVFAASEPTCPQGHSCISCPAVITGMGRLAWGQPLPLPGCCCVFLPARGHCQDHASLFISRFLSSAIVVFWWRKKNRVAVFELPGT

SEQ ID NO: 877643 - protein, 109 aa, Homo sapiens; identical to SEQ ID NO: 877632

SEQ ID NO: 877644 - protein, 204 aa, Homo sapiens
AVAGGPPDFSSRPVLERLTGPRPAASLSLALRGLGDWAAGLRVRGGGRLRPGASWQREPRDGGPGRGGGAAAVSLGGEGAAGPARFPARKLREAWGELSARIRILEKGTPFTHDPSAPAAASLSRSGCGKMFVGIFEKLISYAASGGFLVTVAAQREAVLAGGGLLGCLVGIPPRGPGPLIPAGDQQPAFRGHCVVTPTSPPAN

SEQ ID NO: 877645 - protein, 851 aa, Homo sapiens
MAPDLASQRHSESFPSVNSRPNVILPGREGRREGLPPGGGTRGSLVPTRPVPPSPAPLGTSPYSWSRSGPGRGGGAGSSRVPRGVPGPAVCAPGSLLHHASPTQTMAAADGSLFDNPRTFSRRPPAQASRQAKATKRKYQASSEAPPAKRRNETSFLPAKKTSVKETQRTFKGNAQKMFSPKKHSVSTSDRNQEERQCIKTSSLFKNNPDIPELHRPVVKQVQEKVFTSAAFHELGLHPHLISTINTVLKMSSMTSVQKQSIPVLLEGRDALVRSQTGSGKTLAYCIPVVQSLQAMESKIQRSDGPYALVLVPTRELALQSFDTVQKLLKPFTWIVPGVLMGGEKRKSEKARLRKGINILISTPGRLVDHIKSTKNIHFSRLRWLVFDEADRILDLGFEKDITVILNAVNAECQKRQNVLLSATLTEGVTRLADISLHDPVSISVLDKSHDQLNPKDKAVQEVCPPPAGDKLDSFAIPESLKQHVTVVPSKLRLVCLAAFILQKCKFEEDQKMVVFFSSCELVEFHYSLFLQTLLSSSGAPASGQLPSASMRLKFLRLHGGMEQEERTAVFQEFSHSRRGVLLCTDVAARGLDLPQVTWIVQYNAPSSPAEYIHRIGRTARIGCHGSSLLILAPSEAEYVNSLASHKINVSEIKMEDILCVLTRDDCFKGKRWGAQKSHAVGPQEIRERATVLQTVFEDYVHSSERRVSWAKKALQSFIQAYATYPRELKHIFHVRSLHLGHVAKSFGLRDAPRNLSALTRKKRKAHVKRPDLHKKTQSKHSLAEILRSEYSSGMEADIAKVKKQNAPGEPGGRPLQHSLQPTPCFGRGKTLKWRKTQKGVQRDSKTSQKV

SEQ ID NO: 877646 - protein, 319 aa, Homo sapiens
MAPDLASQRHSESFPSVNSRPNVILPGREGRREGLPPGGGTRGSLVPTRPVPPSPAPLGTSPYSWSRSGPGRGGGAGSSRVPRGVPGPAVCAPGSLLHHASPTQTMAAADGSLFDNPRTFSRRPPAQASRQAKATKRKYQASSEAPPAKRRNETSFLPAKKTSVKETQRTFKGNAQKMFSPKKHSVSTSDRNQEERQCIKTSSLFKNNPDIPELHRPVVKQVQEKVFTSAAFHELGLHPHLISTINTVLKMSSMTSVQKQSIPVLLEGRDALVRSQTGSGKTLAYCIPVVQSLQAMESKIQVLLLSTFYEEEQRLRKVK

SEQ ID NO: 877647 - protein, 156 aa, Homo sapiens
ELGDPGPDSFPPRSLFFSALQSFIQAYATYPRELKHIFHVRSLHLGHVAKSFGLRDAPRNLSALTRKKRKAHVKRPDLHKKTQSKHSLAEILRSEYSSGMEADIAKVKKQNAPGEPGGRPLQHSLQPTPCFGRGKTLKWRKTQKGVQRDSKTSQKV

SEQ ID NO: 877648 - protein, 77 aa, Homo sapiens
TLVGPRWLLCDFTVIKSIINCFIIPDLDSISPLILPSPSQKSHAVGPQEIRERATVLQTVFEDYVHSSERRVSWAKK

SEQ ID NO: 877649 - protein, 585 aa, Homo sapiens
MAPDLASQRHSESFPSVNSRPNVILPGREGRREGLPPGGGTRGSLVPTRPVPPSPAPLGTSPYSWSRSGPGRGGGAGSSRVPRGVPGPAVCAPGSLLHHASPTQTMAAADGSLFDNPRTFSRRPPAQASRQAKATKRKYQASSEAPPAKRRNETSFLPAKKTSVKETQRTFKGNAQKMFSPKKHSVSTSDRNQEERQCIKTSSLFKNNPDIPELHRPVVKQVQEKVFTSAAFHELGLHPHLISTINTVLKMSSMTSVQKQSIPVLLEGRDALVRSQTGSGKTLAYCIPVVQSLQAMESKIQRSDGPYALVLVPTRELALQSFDTVQKLLKPFTWIVPGVLMGGEKRKSEKARLRKGINILISTPGRLVDHIKSTKNIHFSRLRWLVFDEADRILDLGFEKDITVILNAVNAECQKRQNVLLSATLTEGVTRLADISLHDPVSISVLDKSHDQLNPKDKAVQEVCPPPAGDKLDSFAIPESLKQHVTVVPSKLRLVCLAAFILQKCKFEEDQKMVVFFSSCELVEFHYSLFLQTLLSSSGAPASGQLPSASMRLKFLRLHGGMEQEERTAVFQEFSHSRRGVLLCT

SEQ ID NO: 877650 - protein, 708 aa, Homo sapiens
MFSPKKHSVSTSDRNQEERQCIKTSSLFKNNPDIPELHRYVQGRMPFRKKKMCSAFSLLILALMPGFLFIICRPVVKQVQEKVFTSAAFHELGLHPHLISTINTVLKMSSMTSVQKQSIPVLLEGRDALVRSQTGSGKTLAYCIPVVQSLQAMESKIQRSDGPYALVLVPTRELALQSFDTVQKLLKPFTWIVPGVLMGGEKRKSEKARLRKGINILISTPGRLVDHIKSTKNIHFSRLRWLVFDEADRILDLGFEKDITVILNAVNAECQKRQNVLLSATLTEGVTRLADISLHDPVSISVLDKSHDQLNPKDKAVQEVCPPPAGDKLDSFAIPESLKQHVTVVPSKLRLVCLAAFILQKCKFEEDQKMVVFFSSCELVEFHYSLFLQTLLSSSGAPASGQLPSASMRLKFLRLHGGMEQEERTAVFQEFSHSRRGVLLCTDVAARGLDLPQVTWIVQYNAPSSPAEYIHRIGRTARIGCHGSSLLILAPSEAEYVNSLASHKINVSEIKMEDILCVLTRDDCFKGKRWGAQKSHAVGPQEIRERATVLQTVFEDYVHSSERRVSWAKKALQSFIQAYATYPRELKHIFHVRSLHLGHVAKSFGLRDAPRNLSALTRKKRKAHVKRPDLHKKTQSKHSLAEILRSEYSSGMEADIAKVKKQNAPGEPGGRPLQHSLQPTPCFGRGKTLKWRKTQKGVQRDSKTSQKV

SEQ ID NO: 877651 - protein, 333 aa, Homo sapiens
MGASQSTPPKTTPLGCLLRNRKALGLRSGIRSKRLIFYCNTAWPQYQLDNGSQWPENGTFDFNILRDLDNFCHRNEKWSEIPYIQAFFILRNHPSLCHSCSTFQILLTSSKPDSSPVTPPTDPADDSSSFDPVDFLPPRQHHDPPPEHHDPPPYVPAPALPLSPTLSNQPTSDSESSLPPPLTRSRAQCAQQPAPLLPLREVAGVEGIVHVHVPFSFYDLLQIEERLGSFSSDPDTYIKEFKYLTQSYELTWHDLYFILSSTLLPEEKERVWLAAQAYADDLHQQDPTKPVGAAAVPWEEPSWEYQPTEPGQVYCSHMITCLIAGLNKAAHRL

SEQ ID NO: 877652 - protein, 333 aa, Homo sapiens; identical to SEQ ID NO: 877651

SEQ ID NO: 877653 - protein, 110 aa, Homo sapiens [sequence omitted]

SEQ ID NO: 877654 - protein, 112 aa, Homo sapiens [sequence omitted]

SEQ ID NO: 877655 - protein, 333 aa, Homo sapiens; identical to SEQ ID NO: 877651

SEQ ID NO: 877656 - protein, 333 aa, Homo sapiens; identical to SEQ ID NO: 877651

SEQ ID NO: 877657 - protein, 333 aa, Homo sapiens; identical to SEQ ID NO: 877651

SEQ ID NO: 877658 - protein, 333 aa, Homo sapiens; identical to SEQ ID NO: 877651

SEQ ID NO: 877659 - protein, 333 aa, Homo sapiens; identical to SEQ ID NO: 877651

SEQ ID NO: 877660 - protein, 125 aa, Homo sapiens
MGASQSTPPKTTPLGCLLRNRKALGLRSGIRSKRLIFYCNTAWPQYQLDNGSQWPENGTFDFNILRDLDNFCHRNEKWSEIPYIQAFFILRNHPSLCHSCSTFQILLTSSKPDSSPVTPPTDPAA

SEQ ID NO: 877661 - protein, 333 aa, Homo sapiens; identical to SEQ ID NO: 877651

SEQ ID NO: 877662 - protein, 110 aa, Homo sapiens [sequence omitted]

SEQ ID NO: 877663 - protein, 333 aa, Homo sapiens; identical to SEQ ID NO: 877651

SEQ ID NO: 877664 - protein, 333 aa, Homo sapiens; identical to SEQ ID NO: 877651

SEQ ID NO: 877665 - protein, 333 aa, Homo sapiens; identical to SEQ ID NO: 877651

SEQ ID NO: 877666 - protein, 333 aa, Homo sapiens; identical to SEQ ID NO: 877651

SEQ ID NO: 877667 - protein, 333 aa, Homo sapiens; identical to SEQ ID NO: 877651

SEQ ID NO: 877668 - protein, 134 aa, Homo sapiens
MTDAAVSFAKDFLAGGVAAAISKTAVAPIERVKLLLQVQHASKQITADKQYKGIIDCVVRIPKEQGVLSFWRGNLANVIRYFPTQALNFAFKDKYKQIFLGGVDKRTQFVALLCRESGIGWCRRGHIPVFCVPS

SEQ ID NO: 877669 - protein, 134 aa, Homo sapiens; identical to SEQ ID NO: 877668

SEQ ID NO: 877670 - protein, 164 aa, Homo sapiens
MTDAAVSFAKDFLAGGVAAAISKTAVAPIERVKLLLQVQHASKQITADKQYKGIIDCVVRIPKEQGVLSFWRGNLANVIRYFPTQALNFAFKDKYKQIFLGGVDKRTQFVALLCRESLAVASGSTFLVLRRPLLRLAPSPAELFVVGLSLSHLSGISRPRLLRF

SEQ ID NO: 877671 - protein, 75 aa, Homo sapiens
LGTQVPTCPRSSWVVWTREPSLWRYFAGNLASGGAAGATSLCFVYPLDFARTRLAADVGKAGAEREFRGLGDWPG

SEQ ID NO: 877672 - protein, 134 aa, Homo sapiens; identical to SEQ ID NO: 877668

SEQ ID NO: 877673 - protein, 134 aa, Homo sapiens; identical to SEQ ID NO: 877668

SEQ ID NO: 877674 - protein, 160 aa, Homo sapiens
DGRVGRPTRPGSRPSPVLQQSASSFNMTDAAVSFAKDFLAGGVAAAISKTAVAPIERVKLLLQVQHASKQITADKQYKGIIDCVVRIPKEQGVLSFWRGNLANVIRYFPTQALNFAFKDKYKQIFLGGVDKRTQFVALLCRESGIGWCRRGHIPVFCVPS

SEQ ID NO: 877675 - protein, 134 aa, Homo sapiens; identical to SEQ ID NO: 877668

SEQ ID NO: 877676 - protein, 141 aa, Homo sapiens
STDAWVDPRVAAVSFAKDFLAGGVAAAISKTAVAPIERVKLLLQVQHASKQITADKQYKGIIDCVVRIPKEQGVLSFWRGNLANVIRYFPTQALNFAFKDKYKQIFLGGVDKRTQFVALLCRESGIGWCRRGHIPVFCVPS

SEQ ID NO: 877677 - protein, 120 aa, Homo sapiens
MTDAAAISKTAVAPIERVKLLLQVQHASKQITADKQYKGIIDCVVRIPKEQGVLSFWRGNLANVIRYFPTQALNFAFKDKYKQIFLGGVDKRTQFVALLCRESGIGWCRRGHIPVFCVPS

SEQ ID NO: 877678 - protein, 110 aa, Homo sapiens
SNGSRQSRSTLSMTGCPPIEGGASDVPDVPGQSEVGYSACGRPERSRFWRTGNVIRYFPTQALNFAFKDKYKQIFLGGVDKRTQFVALLCRESGIGWCRRGHIPVFCVPS

SEQ ID NO: 877679 - protein, 171 aa, Homo sapiens
MTDAAVSFAKDFLAGGVAAAISKTAVAPIERVKLLLQVQHASKQITADKQYKGIIDCVVRIPKEQGVLSFWRGNLANVIRYFPTQALNFAFKDKYKQAGWGNPKEMEKKPPQRVFLGRLYFLGRGLASGGAAGATSLCFVYPLDFARTRLAADVGKAGAEREFRGLGDWPG

SEQ ID NO: 877680 - protein, 134 aa, Homo sapiens; identical to SEQ ID NO: 877668

SEQ ID NO: 877681 - protein, 76 aa, Homo sapiens
RLLEDPHRFAGAAAAMMMQSGRKGTDIMYTGTLDCWRKIARDEGGKAFFKGAWSNVLRGMGGAFVLVLYDEIKKYT

SEQ ID NO: 877682 - protein, 134 aa, Homo sapiens; identical to SEQ ID NO: 877668

SEQ ID NO: 877683 - protein, 134 aa, Homo sapiens; identical to SEQ ID NO: 877668

SEQ ID NO: 877684 - protein, 134 aa, Homo sapiens; identical to SEQ ID NO: 877668

SEQ ID NO: 877685 - protein, 134 aa, Homo sapiens; identical to SEQ ID NO: 877668

SEQ ID NO: 877686 - protein, 134 aa, Homo sapiens; identical to SEQ ID NO: 877668

SEQ ID NO: 877687 - protein, 161 aa, Homo sapiens
  misc_feature (1)..(1): Xaa can be any naturally occurring amino acid
XFGTRPVSRSSGSRPSPVLQQSASSFNMTDAAVSFAKDFLAGGVAAAISKTAVAPIERVKLLLQVQHASKQITADKQYKGIIDCVVRIPKEQGVLSFWRGNLANVIRYFPTQALNFAFKDKYKQIFLGGVDKRTQFVALLCRESGIGWCRRGHIPVFCVPS

SEQ ID NO: 877688 - protein, 134 aa, Homo sapiens; identical to SEQ ID NO: 877668

SEQ ID NO: 877689 - protein, 133 aa, Homo sapiens
AERDGSSSGDLRRSCGPQGDRALCGTRPNASEPGFEVQHASKQITADKQYKGIIDCVVRIPKEQGVLSFWRGNLANVIRYFPTQALNFAFKDKYKQIFLGGVDKRTQFVALLCRESGIGWCRRGHIPVFCVPS

SEQ ID NO: 877690 - protein, 75 aa, Homo sapiens
RRTRGSTHASSSWVVWTREPSLWRYFAGNLASGGAAGATSLCFVYPLDFARTRLAADVGKAGAEREFRGLGDWPG

SEQ ID NO: 877691 - protein, 211 aa, Homo sapiens
MRLTLVLVLLQGFLSRHIVTSPFLPSPRPLSGSSVQVPGVLWTRPFLSPGQVPRASTGGAESSPGPPSTTPPPASWATQRLCRPARRGPDPAPAAASDACRSSSGSPYINRHLLRSARSAGVKAGSRPSPVLQQSASSFNMTDAAVSFAKDFLAGGVAAAISKTAVAPIERVKLLLQMWVKLELKGNSEASVTGLVKIYKSDGIKGPVPRL

SEQ ID NO: 877692 - protein, 700 aa, Homo sapiens
MDFVRLARLFARARPMGLFILQHLDPCRARWAGGREGLMRPMWAPFSSSSSQLPLGQERQENTGSLGSDPSHSNSTATQEEDEEEEESFGTLSDKYSSRRLFRKSAAQFHNLRFGERRDEQMEPEPKLWRGRRNTPYWYFLQCKHLIKEGKLVEALDLFERQMLKEERLQPMESNYTVLIGGCGRVGYLKKAFNLYNQMKKRDLEPSDATYTALFNVCAESPWKDSALQSALKLRQQLQAKNFELNLKTYHALLKMAAKCADLRMCLDVFKEIIHKGHVVTEETFSFLLMGCIQDKKTGFRYALQVWRLMLSLGLQPSRDSYNLLLVAARDCGLGDPQVASELLLKPREEATVLQPPVSRQRPRRTAQAKAGNLMSAMLHVEALERQLFLEPSQALGPPEPPEARVPGKAQPEVDTKAEPSHTAALTAVALKPPPVELEVNLLTPGAVPPTVVSFGTVTTPADRLALIGGLEGFLSKMAEHRQQPDIRTLTLLAEVVESGSPAESLLLALLDEHQVEADLTFFNTLVRKKSKLGDLEGAKALLPVLAKRGLVPNLQTFCNLAIGCHRPKDGLQLLTDMKKSQVTPNTHIYSALINAAIRKLNYTYLISILKDMKQNRVPVNEVVIRQLEFAAQYPPTFDRYQGKNTYLEKIDGFRAYYKQWLTVMPAEETPHPWQKFRTKPQGDQDTGKEADDGCALGGR

SEQ ID NO: 877693 - protein, 728 aa, Homo sapiens
PRRGSPGITEERVPGFESLLPSRPGPALTVHAGEGQRLRPQLLLHRDLQVKLDVVHAGDDFLHGGGGGPTGPAPPRSPAAFSPLPAAGPAAHTPPSLRLAAAAAAARGMPGAPGARAGPCACPGTANRDSAVPLVPASRQPNTGLARNLKPAACVGDADCACALGERGTRGRDWFAAGTGQGSPSECTAPDTSSPGGTGKPEMDFVRLARLFARARPMGLFILQHLDPCRARWAGGREGLMRPMWAPFSSSSSQLPLGQERQENTGSLGSDPSHSNSTATQEEDEEEEESFGTLSDKYSSRRLFRKSAAQFHNLRFGERRDEQMEPEPKLWRGRRNTPYWYFLQCKHLIKEGKLVEALDLFERQMLKEERLQPMESNYTVLIGGCGRVGYLKKAFNLYNQMKKRDLEPSDATYTALFNVCAESPWKDSALQSALKLRQQLQAKNFELNLKTYHALLKMAAKCADLRMCLDVFKEIIHKGHVVTEETFSFLLMGCIQDKKTGFLSKMAEHRQQPDIRTLTLLAEVVESGSPAESLLLALLDEHQVEADLTFFNTLVRKKSKLGDLEGAKALLPVLAKRGLVPNLQTFCNLAIGCHRPKDGLQLLTDMKKSQVTPNTHIYSALINAAIRKLNYTYLISILKDMKQNRVPVNEVVIRQLEFAAQYPPTFDRYQGKNTYLEKIDGFRAYYKQWLTVMPAEETPHPWQKFRTKPQGDQDTGKEADDGCALGGR

SEQ ID NO: 877694 - protein, 700 aa, Homo sapiens; identical to SEQ ID NO: 877692

SEQ ID NO: 877695 - protein, 700 aa, Homo sapiens; identical to SEQ ID NO: 877692

SEQ ID NO: 877696 - protein, 87 aa, Homo sapiens
MKKRDLEPSDATYTALFNVCAESPWKDSALQSALKLRQQLQAKNFELNLKTYHALLKMAAKCADLRMCLDVFKVGLPLPSCSPSWGW

SEQ ID NO: 877697 - protein, 700 aa, Homo sapiens
MDKFWWHAAWGLCLVPLSLAQIDLNITCRFAGVFHVEKNGRYSISRTEAADLCKAFNSTLPTMAQMEKALSIGFETCRYGFIEGHVVIPRIHPNSICAANNTGVYILTSNTSQYDTYCFNASAPPEEDCTSVTDLPNAFDGPITITIVNRDGTRYVQKGEYRTNPEDIYPSNPTDDDVSSGSSSERSSTSGGYIFYTFSTVHPIPDEDSPWITDSTDRIPATSTSSNTISAGWEPNEENEDERDRHLSFSGSGIDDDEDFISSTISTTPRAFDHTKQNQDWTQWNPSHSNPEVLLQTTTRMTADVDRNGTTAYEGNWNPEAHPPLIHHEHHEEEETPHSTSTIQATPSSTTEETATQKEQWFGNRWHEGYRQTPREDSHSTTGTAAASAHTSHPMQGRTTPSPEDSSWTDFFNPISHPMGRGHQAGRRMDMDSSHSTTLQPTANPNTGLVEDLDRTGPLSMTTQQSNSQSFSTSHEGLEEDKDHPTTSTLTSSNRNDVTGGRRDPNHSEGSTTLLEGYTSHYPHTKESRTFIPVTSAKTGSFGVTAVTVGDSNSNVNRSLSGDQDTFHPSGGSHTTHGSESDGHSHGSQEGGANTTSGPIRTPQIPEWLIILASLLALALILAVCIAVNSRRRCGQKKKLVINSGNGAVEDRKPSGLNGEASKSQEMVHLVNKESSETPDQFMTADETRNLQNVDMKIGV

SEQ ID NO: 877698 - protein, 769 aa, Homo sapiens
VFCVLFVCRTDVQSSARRALLLSLFNILFCGFLALFARYAEEPGVGTANTETSEGFEILLFLSDDSSFLLLETFRTGMTGPVSWVASFSSSAELSPFLGAEGFLGKRMSLERYSFSRCTLACRDSVDLFRLLGSTEMPMVRATFLGMYGFIEGHVVIPRIHPNSICAANNTGVYILTSNTSQYDTYCFNASAPPEEDCTSVTDLPNAFDGPITITIVNRDGTRYVQKGEYRTNPEDIYPSNPTDDDVSSGSSSERSSTSGGYIFYTFSTVHPIPDEDSPWITDSTDRIPATSTSSNTISAGWEPNEENEDERDRHLSFSGSGIDDDEDFISSTISTTPRAFDHTKQNQDWTQWNPSHSNPEVLLQTTTRMTADVDRNGTTAYEGNWNPEAHPPLIHHEHHEEEETPHSTSTIQATPSSTTEETATQKEQWFGNRWHEGYRQTPREDSHSTTGTAAASAHTSHPMQGRTTPSPEDSSWTDFFNPISHPMGRGHQAGRRMDMDSSHSTTLQPTANPNTGLVEDLDRTGPLSMTTQQSNSQSFSTSHEGLEEDKDHPTTSTLTSSNRNDVTGGRRDPNHSEGSTTLLEGYTSHYPHTKESRTFIPVTSAKTGSFGVTAVTVGDSNSNVNRSLSGDQDTFHPSGGSHTTHGSESDGHSHGSQEGGANTTSGPIRTPQIPEWLIILASLLALALILAVCIAVNSRRRCGQKKKLVINSGNGAVEDRKPSGLNGEASKSQEMVHLVNKESSETPDQFMTADETRNLQNVDMKIGV

SEQ ID NO: 877699 - protein, 812 aa, Homo sapiens
VFCVLFVCRTDVQSSARRALLLSLFNILFCGFLALFARYAEEPGVGTANTETSEGFEILLFLSDDSSFLLLETFRTGMTGPVSWVASFSSSAELSPFLGAEGFLGKRMSLERYSFSRCTLACRDSVDLFRLLGSTEMPMVRATFLGMYGFIEGHVVIPRIHPNSICAANNTGVYILTSNTSQYDTYCFNASAPPEEDCTSVTDLPNAFDGPITITIVNRDGTRYVQKGEYRTNPEDIYPSNPTDDDVSSGSSSERSSTSGGYIFYTFSTVHPIPDEDSPWITDSTDRIPATTLMSTSATATETATKRQETWDWFSWLFLPSESKNHLHTTTQMAGTSSNTISAGWEPNEENEDERDRHLSFSGSGIDDDEDFISSTISTTPRAFDHTKQNQDWTQWNPSHSNPEVLLQTTTRMTADVDRNGTTAYEGNWNPEAHPPLIHHEHHEEEETPHSTSTIQATPSSTTEETATQKEQWFGNRWHEGYRQTPREDSHSTTGTAAASAHTSHPMQGRTTPSPEDSSWTDFFNPISHPMGRGHQAGRRMDMDSSHSTTLQPTANPNTGLVEDLDRTGPLSMTTQQSNSQSFSTSHEGLEEDKDHPTTSTLTSSNRNDVTGGRRDPNHSEGSTTLLEGYTSHYPHTKESRTFIPVTSAKTGSFGVTAVTVGDSNSNVNRSLSGDQDTFHPSGGSHTTHGSESDGHSHGSQEGGANTTSGPIRTPQIPEWLIILASLLALALILAVCIAVNSRRRCGQKKKLVINSGNGAVEDRKPSGLNGEASKSQEMVHLVNKESSETPDQFMTADETRNLQNVDMKIGV

SEQ ID NO: 877700 - protein, 509 aa, Homo sapiens
MPRKYVVWDWFSWLFLPSESKNHLHTTTQMAGTSSNTISAGWEPNEENEDERDRHLSFSGSGIDDDEDFISSTISTTPRAFDHTKQNQDWTQWNPSHSNPEVLLQTTTRMTADVDRNGTTAYEGNWNPEAHPPLIHHEHHEEEETPHSTSTIQATPSSTTEETATQKEQWFGNRWHEGYRQTPREDSHSTTGTAAASAHTSHPMQGRTTPSPEDSSWTDFFNPISHPMGRGHQAGRRMDMDSSHSTTLQPTANPNTGLVEDLDRTGPLSMTTQQSNSQSFSTSHEGLEEDKDHPTTSTLTSSNRNDVTGGRRDPNHSEGSTTLLEGYTSHYPHTKESRTFIPVTSAKTGSFGVTAVTVGDSNSNVNRSLSGDQDTFHPSGGSHTTHGSESDGHSHGSQEGGANTTSGPIRTPQIPEWLIILASLLALALILAVCIAVNSRRRCGQKKKLVINSGNGAVEDRKPSGLNGEASKSQEMVHLVNKESSETPDQFMTADETRNLQNVDMKIGV

SEQ ID NO: 877701 - protein, 649 aa, Homo sapiens
VFCVLFVCRTDVQSSARRALLLSLFNILFCGFLALFARYAEEPGVGTANTETSEGFEILLFLSDDSSFLLLETFRTGMTGPVSWVASFSSSAELSPFLGAEGFLGKRMSLERYSFSRCTLACRDSVDLFRLLGSTEMPMVRATFLGMYGFIEGHVVIPRIHPNSICAANNTGVYILTSNTSQYDTYCFNASAPPEEDCTSVTDLPNAFDGPITITIVNRDGTRYVQKGEYRTNPEDIYPSNPTDDDVSSGSSSERSSTSGGYIFYTFSTVHPIPDEDSPWITDSTDRIPATIQATPSSTTEETATQKEQWFGNRWHEGYRQTPREDSHSTTGTAAASAHTSHPMQGRTTPSPEDSSWTDFFNPISHPMGRGHQAGRRMDMDSSHSTTLQPTANPNTGLVEDLDRTGPLSMTTQQSNSQSFSTSHEGLEEDKDHPTTSTLTSSNRNDVTGGRRDPNHSEGSTTLLEGYTSHYPHTKESRTFIPVTSAKTGSFGVTAVTVGDSNSNVNRSLSGDQDTFHPSGGSHTTHGSESDGHSHGSQEGGANTTSGPIRTPQIPEWLIILASLLALALILAVCIAVNSRRRCGQKKKLVINSGNGAVEDRKPSGLNGEASKSQEMVHLVNKESSETPDQFMTADETRNLQNVDMKIGV

SEQ ID NO: 877702 - protein, 562 aa, Homo sapiens
VFCVLFVCRTDVQSSARRALLLSLFNILFCGFLALFARYAEEPGVGTANTETSEGFEILLFLSDDSSFLLLETFRTGMTGPVSWVASFSSSAELSPFLGAEGFLGKRMSLERYSFSRCTLACRDSVDLFRLLGSTEMPMVRATFLGMYGFIEGHVVIPRIHPNSICAANNTGVYILTSNTSQYDTYCFNASAPPEEDCTSVTDLPNAFDGPITITIVNRDGTRYVQKGEYRTNPEDIYPSNPTDDDVSSGSSSERSSTSGGYIFYTFSTVHPIPDEDSPWITDSTDRIPATNMDSSHSTTLQPTANPNTGLVEDLDRTGPLSMTTQQSNSQSFSTSHEGLEEDKDHPTTSTLTSSNRNDVTGGRRDPNHSEGSTTLLEGYTSHYPHTKESRTFIPVTSAKTGSFGVTAVTVGDSNSNVNRSLSGDQDTFHPSGGSHTTHGSESDGHSHGSQEGGANTTSGPIRTPQIPEWLIILASLLALALILAVCIAVNSRRRCGQKKKLVINSGNGAVEDRKPSGLNGEASKSQEMVHLVNKESSETPDQFMTADETRNLQNVDMKIGV

SEQ ID NO: 877703 - protein, 282 aa, Homo sapiens [sequence omitted]

SEQ ID NO: 877704 - protein, 604 aa, Homo sapiens
VFCVLFVCRTDVQSSARRALLLSLFNILFCGFLALFARYAEEPGVGTANTETSEGFEILLFLSDDSSFLLLETFRTGMTGPVSWVASFSSSAELSPFLGAEGFLGKRMSLERYSFSRCTLACRDSVDLFRLLGSTEMPMVRATFLGMYGFIEGHVVIPRIHPNSICAANNTGVYILTSNTSQYDTYCFNASAPPEEDCTSVTDLPNAFDGPITITIVNRDGTRYVQKGEYRTNPEDIYPSNPTDDDVSSGSSSERSSTSGGYIFYTFSTVHPIPDEDSPWITDSTDRIPATSTSSNTISAGWEPNEENEDERDRHLSFSGSGIDDDEDFISSTNMDSSHSTTLQPTANPNTGLVEDLDRTGPLSMTTQQSNSQSFSTSHEGLEEDKDHPTTSTLTSSNRNDVTGGRRDPNHSEGSTTLLEGYTSHYPHTKESRTFIPVTSAKTGSFGVTAVTVGDSNSNVNRSLSGDQDTFHPSGGSHTTHGSESDGHSHGSQEGGANTTSGPIRTPQIPEWLIILASLLALALILAVCIAVNSRRRCGQKKKLVINSGNGAVEDRKPSGLNGEASKSQEMVHLVNKESSETPDQFMTADETRNLQNVDMKIGV

SEQ ID NO: 877705 - protein, 361 aa, Homo sapiens
APFTGGAAAHVSTSGGYIFYTFSTVHPIPDEDSPWITDSTDRIPATTASAHTSHPMQGRTTPSPEDSSWTDFFNPISHPMGRGHQAGRRMDMDSSHSTTLQPTANPNTGLVEDLDRTGPLSMTTQQSNSQSFSTSHEGLEEDKDHPTTSTLTSSNRNDVTGGRRDPNHSEGSTTLLEGYTSHYPHTKESRTFIPVTSAKTGSFGVTAVTVGDSNSNVNRSLSGDQDTFHPSGGSHTTHGSESDGHSHGSQEGGANTTSGPIRTPQIPEWLIILASLLALALILAVCIAVNSRRRCGQKKKLVINSGNGAVEDRKPSGLNGEASKSQEMVHLVNKESSETPDQFMTADETRNLQNVDMKIGV

SEQ ID NO: 877706 - protein, 763 aa, Homo sapiens
VFCVLFVCRTDVQSSARRALLLSLFNILFCGFLALFARYAEEPGVGTANTETSEGFEILLFLSDDSSFLLLETFRTGMTGPVSWVASFSSSAELSPFLGAEGFLGKRMSLERYSFSRCTLACRDSVDLFRLLGSTEMPMVRATFLGMYGFIEGHVVIPRIHPNSICAANNTGVYILTSNTSQYDTYCFNASAPPEEDCTSVTDLPNAFDGPITITIVNRDGTRYVQKGEYRTNPEDIYPSNPTDDDVSSGSSSERSSTSGGYIFYTFSTVHPIPDEDSPWITDSTDRIPATSTSSNTISAGWEPNEENEDERDRHLSFSGSGIDDDEDFISSTISTTPRAFDHTKQNQDWTQWNPSHSNPEVLLQTTTRMTADVDRNGTTAYEGNWNPEAHPPLIHHEHHEEEETPHSTSTIQATPSSTTEETATQKEQWFGNRWHEGYRQTPREDSHSTTGTAAASAHTSHPMQGRTTPSPEDSSWTDFFNPISHPMGRGHQAGRRMDMDSSHSTTLQPTANPNTGLVEDLDRTGPLSMTTQQSNSQSFSTSHEGLEEDKDHPTTSTLTSSSGRRDPNHSEGSTTLLEGYTSHYPHTKESRTFIPVTSAKTGSFGVTAVTVGDSNSNVNRSLSGDQDTFHPSGGSHTTHGSESDGHSHGSQEGGANTTSGPIRTPQIPEWLIILASLLALALILAVCIAVNSRRRCGQKKKLVINSGNGAVEDRKPSGLNGEASKSQEMVHLVNKESSETPDQFMTADETRNLQNVDMKIGV

SEQ ID NO: 877707 - protein, 498 aa, Homo sapiens
VFCVLFVCRTDVQSSARRALLLSLFNILFCGFLALFARYAEEPGVGTANTETSEGFEILLFLSDDSSFLLLETFRTGMTGPVSWVASFSSSAELSPFLGAEGFLGKRMSLERYSFSRCTLACRDSVDLFRLLGSTEMPMVRATFLGMYGFIEGHVVIPRIHPNSICAANNTGVYILTSNTSQYDTYCFNASAPPEEDCTSVTDLPNAFDGPITITIVNRDGTRYVQKGEYRTNPEDIYPSNPTDDDVSSGSSSERSSTSGGYIFYTFSTVHPIPDEDSPWITDSTDRIPATNRNDVTGGRRDPNHSEGSTTLLEGYTSHYPHTKESRTFIPVTSAKTGSFGVTAVTVGDSNSNVNRSLSGDQDTFHPSGGSHTTHGSESDGHSHGSQEGGANTTSGPIRTPQIPEWLIILASLLALALILAVCIAVNSRRRCGQKKKLVINSGNGAVEDRKPSGLNGEASKSQEMVHLVNKESSETPDQFMTADETRNLQNVDMKIGV

SEQ ID NO: 877708 - protein, 769 aa, Homo sapiens; identical to SEQ ID NO: 877698

SEQ ID NO: 877709 - protein, 769 aa, Homo sapiens; identical to SEQ ID NO: 877698

SEQ ID NO: 877710 - protein, 769 aa, Homo sapiens; identical to SEQ ID NO: 877698

SEQ ID NO: 877711 - protein, 769 aa, Homo sapiens; identical to SEQ ID NO: 877698

SEQ ID NO: 877712 - protein, 769 aa, Homo sapiens; identical to SEQ ID NO: 877698

SEQ ID NO: 877713 - protein, 769 aa, Homo sapiens; identical to SEQ ID NO: 877698

SEQ ID NO: 877714 - protein, 769 aa, Homo sapiens; identical to SEQ ID NO: 877698

SEQ ID NO: 877715 - protein, 762 aa, Homo sapiens
VFCVLFVCRTDVQSSARRALLLSLFNILFCGFLALFARYAEEPGVGTANTETSEGFEILLFLSDDSSFLLLETFRTGMTGPVSWVASFSSSAELSPFLGAEGFLGKRMSLERYSFSRCTLACRDSVDLFRLLGSTEMPMVRATFLGMYGFIEGHVVIPRIHPNSICAANNTGVYILTSNTSQYDTYCFNASAPPEEDCTSVTDLPNAFDGPITITIVNRDGTRYVQKGEYRTNPEDIYPSNPTDDDVSSGSSSERSSTSGGYIFYTFSTVHPIPDEDSPWITDSTDRIPATSTSSNTISAGWEPNEENEDERDRHLSFSGSGIDDDEDFISSTISTTPRAFDHTKQNQDWTQWNPSHSNPEVLLQTTTRMTADVDRNGTTAYEGNWNPEAHPPLIHHEHHEEEETPHSTSTIQATPSSTTEETATQKEQWFGNRWHEGYRQTPREDSHSTTGTAAASAHTSHPMQGRTTPSPEDSSWTDFFNPISHPMGRGHQAGRRMDMDSSHSTTLQPTANPNTGLVEDLDRTGPLSMTTQQSNSQSFSTSHEGLEEDKDHPTTSTLTSSNRNDVTGGRRDPNHSEGSTTLLEGYTSHYPHTKESRTFIPVTSAKTGSFGVTAVTVGDSNSNVNRSLSGDQDTFHPSGGSHTTHGSESDGHSHGSQEGGANTTSGPIRTPQIPEWLIILASLLALALILAVCIAVNSRRRCGQKKKLVINSGNGAVEDRKPSGLNGEASRTHYWPLYLLYVFFLNFPIMQNSKKSQHIHT

SEQ ID NO: 877716 - protein, 702 aa, Homo sapiens
VFCVLFVCRTDVQSSARRALLLSLFNILFCGFLALFARYAEEPGVGTANTETSEGFEILLFLSDDSSFLLLETFRTGMTGPVSWVASFSSSAELSPFLGAEGFLGKRMSLERYSFSRCTLACRDSVDLFRLLGSTEMPMVRATFLGMYGFIEGHVVIPRIHPNSICAANNTGVYILTSNTSQYDTYCFNASAPPEEDCTSVTDLPNAFDGPITITIVNRDGTRYVQKGEYRTNPEDIYPSNPTDDDVSSGSSSERSSTSGGYIFYTFSTVHPIPDEDSPWITDSTDRIPATSTSSNTISAGWEPNEENEDERDRHLSFSGSGIDDDEDFISSTISTTPRAFDHTKQNQDWTQWNPSHSNPEVLLQTTTRMTADVDRNGTTAYEGNWNPEAHPPLIHHEHHEEEETPHSTSTIQATPSSTTEETATQKEQWFGNRWHEGYRQTPREDSHSTTGTAAASAHTSHPMQGRTTPSPEDSSWTDFFNPISHPMGRGHQAGRRMDMDSSHSTTLQPTANPNTGLVEDLDRTGPLSMTTQQSNSQSFSTSHEGLEEDKDHPTTSTLTSSNRNDVTGGRRDPNHSEGSTTLLEGYTSHYPHTKESRTFIPVTSAKTGSFGVTAVTVGDSNSNVNRSLSGDQDTFHPSGGSHTTHGSESDGHSHGSQEGGANTTSGPIRTPQIPEWLIILASLLALALILAVCIAVNSRRS

SEQ ID NO: 877717 - protein, 702 aa, Homo sapiens
VFCVLFVCRTDVQSSARRALLLSLFNILFCGFLALFARYAEEPGVGTANTETSEGFEILLFLSDDSSFLLLETFRTGMTGPVSWVASFSSSAELSPFLGAEGFLGKRMSLERYSFSRCTLACRDSVDLFRLLGSTEMPMVRATFLGMYGFIEGHVVIPRIHPNSICAANNTGVYILTSNTSQYDTYCFNASAPPEEDCTSVTDLPNAFDGPITITIVNRDGTRYVQKGEYRTNPEDIYPSNPTDDDVSSGSSSERSSTSGGYIFYTFSTVHPIPDEDSPWITDSTDRIPATSTSSNTISAGWEPNEENEDERDRHLSFSGSGIDDDEDFISSTISTTPRAFDHTKQNQDWTQWNPSHSNPEVLLQTTTRMTADVDRNGTTAYEGNWNPEAHPPLIHHEHHEEEETPHSTSTIQATPSSTTEETATQKEQWFGNRWHEGYRQTPREDSHSTTGTAAASAHTSHPMQGRTTPSPEDSSWTDFFNPISHPMGRGHQAGRRMDMDSSHSTTLQPTANPNTGLVEDLDRTGPLSMTTQQSNSQSFSTSHEGLEEDKDHPTTSTLTSSNRNDVTGGRRDPNHSEGSTTLLEGYTSHYPHTKESRTFIPVTSAKTGSFGVTAVTVGDSNSNVNRSLSGDQDTFHPSGGSHTTHGSESDGHSHGSQEGGANTTSGPIRTPQIPEWLIILASLLALALILAVCIAVNSRRR

SEQ ID NO: 877718 - protein, 472 aa, Homo sapiens
VFCVLFVCRTDVQSSARRALLLSLFNILFCGFLALFARYAEEPGVGTANTETSEGFEILLFLSDDSSFLLLETFRTGMTGPVSWVASFSSSAELSPFLGAEGFLGKRMSLERYSFSRCTLACRDSVDLFRLLGSTEMPMVRATFLGMYGFIEGHVVIPRIHPNSICAANNTGVYILTSNTSQYDTYCFNASAPPEEDCTSVTDLPNAFDGPITITIVNRDGTRYVQKGEYRTNPEDIYPSNPTDDDVSSGSSSERSSTSGGYIFYTFSTVHPIPDEDSPWITDSTDRIPATSTSSNTISAGWEPNEENEDERDRHLSFSGSGIDDDEDFISSTISTTPRAFDHTKQNQDWTQWNPSHSNPEVLLQTTTRMTADVDRNGTTAYEGNWNPEAHPPLIHHEHHEEEETPHSTSTIQATPSSTTEETATQKEQWFGNRWHEGYRQTPREDSHSTTGTAGDCGSMAWVKKYFSFIFL

SEQ ID NO: 877719 - protein, 472 aa, Homo sapiens; identical to SEQ ID NO: 877718

SEQ ID NO: 877720 - protein, 145 aa, Homo sapiens
VFCVLFVCRTDVQSSARRALLLSLFNILFCGFLALFARYAEEPGVGTANTETSEGFEILLFLSDDSSFLLLETFRTGMTGPVSWVASFSSSAELSPFLGAEGFLGKRMSLERYSFSRCTLACRDSVDLFRLLGSTEMPMVRATFL

SEQ ID NO: 877721 - protein, 341 aa, Homo sapiens
VFCVLFVCRTDVQSSARRALLLSLFNILFCGFLALFARYAEEPGVGTANTETSEGFEILLFLSDDSSFLLLETFRTGMTGPVSWVASFSSSAELSPFLGAEGFLGKRMSLERYSFSRCTLACRDSVDLFRLLGSTEMPMVRATFLGMYGFIEGHVVIPRIHPNSICAANNTGVYILTSNTSQYDTYCFNASAPPEEDCTSVTDLPNAFDGPITITIVNRDGTRYVQKGEYRTNPEDIYPSNPTDDDVSSGSSSERSSTSGGYIFYTFSTVHPIPDEDSPWITDSTDRIPATIQATPSSTTEETATQKEQWFGNRWHEGYRQTPREDSHSTTGTAGNGWFNK

SEQ ID NO: 877722 - protein, 343 aa, Homo sapiens
VFCVLFVCRTDVQSSARRALLLSLFNILFCGFLALFARYAEEPGVGTANTETSEGFEILLFLSDDSSFLLLETFRTGMTGPVSWVASFSSSAELSPFLGAEGFLGKRMSLERYSFSRCTLACRDSVDLFRLLGSTEMPMVRATFLGMYGFIEGHVVIPRIHPNSICAANNTGVYILTSNTSQYDTYCFNASAPPEEDCTSVTDLPNAFDGPITITIVNRDGTRYVQKGEYRTNPEDIYPSNPTDDDVSSGSSSERSSTSGGYIFYTFSTVHPIPDEDSPWITDSTDRIPATIQATPSSTTEETATQKEQWFGNRWHEGYRQTPSVSRFIYMHEYHVIICSRIE

SEQ ID NO: 877723 - protein, 274 aa, Homo sapiens
VFCVLFVCRTDVQSSARRALLLSLFNILFCGFLALFARYAEEPGVGTANTETSEGFEILLFLSDDSSFLLLETFRTGMTGPVSWVASFSSSAELSPFLGAEGFLGKRMSLERYSFSRCTLACRDSVDLFRLLGSTEMPMVRATFLGMYGFIEGHVVIPRIHPNSICAANNTGVYILTSNTSQYDTYCFNASAPPEEDCTSVTDLPNAFDGPITITIVNRDGTRYVQKGEYRTNPEDIYPSNPTDDDVSSGSSSERSSTSGGYIFYTFSTVHPTG

SEQ ID NO: 877724 - protein, 160 aa, Homo sapiens
APFTGGAAAHVSTSGGYIFYTFSTVHPIPDEDSPWITDSTDRIPATTASAHTSHPMQGRTTPSPEDSSWTDFFNPISHPMGRGHQAGRRMDMDSSHSTTLQPTANPNTGLVEDLDRTGPLSMTTQQSNSQSFSTSHEGLEEDKDHPTTSTLTSSSKDYKT

SEQ ID NO: 877725 - protein, 192 aa, Homo sapiens
LWHTCPMMYPWIHLDRSYPMTTQQSNSQSFSTSHEGLEEDKDHPTTSTLTSSNRNDVTGGRRDPNHSEGSTTLLEGYTSHYPHTKESRTFIPVTSAKTGSFGVTAVTVGDSNSNVNRSLSGDQDTFHPSGGSHTTHGSESDGHSHGSQEGGANTTSGPIRTPQIPEWLIILASLLALALILAVCIAVNSRRR

SEQ ID NO: 877726 - protein, 484 aa, Homo sapiens
MQVTTTGTSSNTISAGWEPNEENEDERDRHLSFSGSGIDDDEDFISSTISTTPRAFDHTKQNQDWTQWNPSHSNPEVLLQTTTRMTADVDRNGTTAYEGNWNPEAHPPLIHHEHHEEEETPHSTSTIQATPSSTTEETATQKEQWFGNRWHEGYRQTPREDSHSTTGTAAASAHTSHPMQGRTTPSPEDSSWTDFFNPISHPMGRGHQAGRRMDMDSSHSTTLQPTANPNTGLVEDLDRTGPLSMTTQQSNSQSFSTSHEGLEEDKDHPTTSTLTSSNRNDVTGGRRDPNHSEGSTTLLEGYTSHYPHTKESRTFIPVTSAKTGSFGVTAVTVGDSNSNVNRSLSGDQDTFHPSGGSHTTHGSESDGHSHGSQEGGANTTSGPIRTPQIPEWLIILASLLALALILAVCIAVNSRRRCGQKKKLVINSGNGAVEDRKPSGLNGEASKSQEMVHLVNKESSETPDQFMTADETRNLQNVDMKIGV

SEQ ID NO: 877727 - protein, 761 aa, Homo sapiens
VFCVLFVCRTDVQSSARRALLLSLFNILFCGFLALFARYAEEPGVGTANTETSEGFEILLFLSDDSSFLLLETFRTGMTGPVSWVASFSSSAELSPFLGAEGFLGKRMSLERYSFSRCTLACRDSVDLFRLLGSTEMPMVRATFLGMYGFIEGHVVIPRIHPNSICAANNTGVYILTSNTSQYDTYCFNASAPPEEDCTSVTDLPNAFDGPITITIVNRDGTRYVQKGEYRTNPEDIYPSNPTDDDVSSGSSSERSSTSGGYIFYTFSTVHPIPDEDSPWITDSTDRIPATTGWEPNEENEDERDRHLSFSGSGIDDDEDFISSTISTTPRAFDHTKQNQDWTQWNPSHSNPEVLLQTTTRMTADVDRNGTTAYEGNWNPEAHPPLIHHEHHEEEETPHSTSTIQATPSSTTEETATQKEQWFGNRWHEGYRQTPREDSHSTTGTAAASAHTSHPMQGRTTPSPEDSSWTDFFNPISHPMGRGHQAGRRMDMDSSHSTTLQPTANPNTGLVEDLDRTGPLSMTTQQSNSQSFSTSHEGLEEDKDHPTTSTLTSSNRNDVTGGRRDPNHSEGSTTLLEGYTSHYPHTKESRTFIPVTSAKTGSFGVTAVTVGDSNSNVNRSLSGDQDTFHPSGGSHTTHGSESDGHSHGSQEGGANTTSGPIRTPQIPEWLIILASLLALALILAVCIAVNSRRRCGQKKKLVINSGNGAVEDRKPSGLNGEASKSQEMVHLVNKESSETPDQFMTADETRNLQNVDMKIGV

SEQ ID NO: 877728 - protein, 472 aa, Homo sapiens; identical to SEQ ID NO: 877718

SEQ ID NO: 877729 - protein, 319 aa, Homo sapiens
MQVTTTGTSSNTISAGWEPNEENEDERDRHLSFSGSGIDDDEDFISSTNMDSSHSTTLQPTANPNTGLVEDLDRTGPLSMTTQQSNSQSFSTSHEGLEEDKDHPTTSTLTSSNRNDVTGGRRDPNHSEGSTTLLEGYTSHYPHTKESRTFIPVTSAKTGSFGVTAVTVGDSNSNVNRSLSGDQDTFHPSGGSHTTHGSESDGHSHGSQEGGANTTSGPIRTPQIPEWLIILASLLALALILAVCIAVNSRRRCGQKKKLVINSGNGAVEDRKPSGLNGEASKSQEMVHLVNKESSETPDQFMTADETRNLQNVDMKIGV

SEQ ID NO: 877730 - protein, 647 aa, Homo sapiens
VFCVLFVCRTDVQSSARRALLLSLFNILFCGFLALFARYAEEPGVGTANTETSEGFEILLFLSDDSSFLLLETFRTGMTGPVSWVASFSSSAELSPFLGAEGFLGKRMSLERYSFSRCTLACRDSVDLFRLLGSTEMPMVRATFLGMYGFIEGHVVIPRIHPNSICAANNTGVYILTSNTSQYDTYCFNASAPPEEDCTSVTDLPNAFDGPITITIVNRDGTRYVQKGEYRTNPEDIYPSNPTDDDVSSGSSSERSSTSGGYIFYTFSTVHPIPDEDSPWITDSTDRIPATTLMSTSATATETATKRQETWDWFSWLFLPSESKNHLHTTTQMAGTSSNTISAGWEPNEENEDERDRHLSFSGSGIDDDEDFISSTNMDSSHSTTLQPTANPNTGLVEDLDRTGPLSMTTQQSNSQSFSTSHEGLEEDKDHPTTSTLTSSNRNDVTGGRRDPNHSEGSTTLLEGYTSHYPHTKESRTFIPVTSAKTGSFGVTAVTVGDSNSNVNRSLSGDQDTFHPSGGSHTTHGSESDGHSHGSQEGGANTTSGPIRTPQIPEWLIILASLLALALILAVCIAVNSRRRCGQKKKLVINSGNGAVEDRKPSGLNGEASKSQEMVHLVNKESSETPDQFMTADETRNLQNVDMKIGV

SEQ ID NO: 877731 - protein, 430 aa, Homo sapiens
VFCVLFVCRTDVQSSARRALLLSLFNILFCGFLALFARYAEEPGVGTANTETSEGFEILLFLSDDSSFLLLETFRTGMTGPVSWVASFSSSAELSPFLGAEGFLGKRMSLERYSFSRCTLACRDSVDLFRLLGSTEMPMVRATFLCMYGFIEGHVVIPRIHPNSICAANNTGVYILTSNTSQYDTYCFNASAPPEEDCTSVTDLPNAFDGPITITIVNRDGTRYVQKGEYRTNPEDIYPSNPTDDDVSSGSSSERSSTSGGYIFYTFSTVHPIPDEDSPWITDSTDRIPATRDQDTFHPSGGSHTTHGSESDGHSHGSQEGGANTTSGPIRTPQIPEWLIILASLLALALILAVCIAVNSRRRCGQKKKLVINSGNGAVEDRKPSGLNGEASKSQEMVHLVNKESSETPDQFMTADETRNLQNVDMKIGV

SEQ ID NO: 877732 - protein, 472 aa, Homo sapiens; identical to SEQ ID NO: 877718

SEQ ID NO: 877733 - protein, 769 aa, Homo sapiens; identical to SEQ ID NO: 877698

SEQ ID NO: 877734 - protein, 769 aa, Homo sapiens; identical to SEQ ID NO: 877698

SEQ ID NO: 877735 - protein, 769 aa, Homo sapiens; identical to SEQ ID NO: 877698

SEQ ID NO: 877736 - protein, 769 aa, Homo sapiens; identical to SEQ ID NO: 877698

SEQ ID NO: 877737 - protein, 430 aa, Homo sapiens; identical to SEQ ID NO: 877731

SEQ ID NO: 877738 - protein, 430 aa, Homo sapiens; identical to SEQ ID NO: 877731

SEQ ID NO: 877739 - protein, 738 aa, Homo sapiens
VFCVLFVCRTDVQSSARRALLLSLFNILFCGFLALFARYAEEPGVGTANTETSEGFEILLFLSDDSSFLLLETFRTGMTGPVSWVASFSSSAELSPFLGAEGFLGKRMSLERYSFSRCTLACRDSVDLFRLLGSTEMPMVRATFLGMYGFIEGHVVIPRIHPNSICAANNTGVYILTSNTSQYDTYCFNASAPPEEDCTSVTDLPNAFDGPITITIVNRDGTRYVQKGEYRTNPEDIYPSNPTDDDVSSGSSSERSSTSGGYIFYTFSTVHPIPDEDSPWITDSTDRIPATSTSSNTISAGWEPNEENEDERDRHLSFSGSGIDDDEDFISSTISTTPRAFDHTKQNQDWTQWNPSHSNPEVLLQTTTRMTADVDRNGTTAYEGNWNPEAHPPLIHHEHHEEEETPHSTSTIQATPSSTTEETATQKEQWFGNRWHEGYRQTPREDSHSTTGTAAASAHTSHPMQGRTTPSPEDSSWTDFFNPISHPMGRGHQAGRRMDMDSSHSTTLQPTANPNTGLVEDLDRTGPLSMTTQQSNSQSFSTSHEGLEEDKDHPTTSTLTSSNRNDVTGGRRDPNHSEGSTTLLEGYTSHYPHTKESRTFIPVTSAKTGSFGVTAVTVGDSNSNVNRSLSGDQDTFHPSGGSHTTHGSESDGHSHGSQEGGANTTSGPIRTPQIPEWLIILASLLALALILAVCIAVNSRRRMLSPNTKGDGVQGGPLQKLQVREVLVRVGDNIRYRA

SEQ ID NO: 877740 - protein, 637 aa, Homo sapiens
VFCVLFVCRTDVQSSARRALLLSLFNILFCGFLALFARYAEEPGVGTANTETSEGFEILLFLSDDSSFLLLETFRTGMTGPVSWVASFSSSAELSPFLGAEGFLGKRMSLERYSFSRCTLACRDSVDLFRLLGSTEMPMVRATFLGMYGFIEGHVVIPRIHPNSICAANNTGVYILTSNTSQYDTYCFNASAPPEEDCTSVTDLPNAFDGPITITIVNRDGTRYVQKGEYRTNPEDIYPSNPTDDDVSSGSSSERSSTSGGYIFYTFSTVHPIPDEDSPWITDSTDRIPATSTSSNTISAGWEPNEENEDERDRHLSFSGSGIDDDEDFISSTISTTPRAFDHTKQNQDWTQWNPSHSNPEVLLQTTTRMTADVDRNGTTAYEGNWNPEAHPPLIHHEHHEEEETPHSTSTIQATPSSTTEETATQKEQWFGNRWHEGYRQTPREDSHSTTGTAAASAHTSHPMQGRTTPSPEDSSWTDFFNPISHPMGRGHQAGRRMDMDSSHSTTLQPTANPNTGLVEDLDRTGPLSMTTQQSNSQSFSTSHEGLEEDKDHPTTSTLTSSNRNDVTGGRRDPNHSEGSTTLLEGYTSHYPHTKESRTFIPVTSAKTGSFGVTAVTVGDSNSNVNRSLSGNLAFII

SEQ ID NO: 877741 - protein, 345 aa, Homo sapiens
VFCVLFVCRTDVQSSARRALLLSLFNILFCGFLALFARYAEEPGVGTANTETSEGFEILLFLSDDSSFLLLETFRTGMTGPVSWVASFSSSAELSPFLGAEGFLGKRMSLERYSFSRCTLACRDSVDLFRLLGSTEMPMVRATFLGMYGFIEGHVVIPRIHPNSICAANNTGVYILTSNTSQYDTYCFNASAPPEEDCTSVTDLPNAFDGPITITIVNRDGTRYVQKGEYRTNPEDIYPSNPTDDDVSSGSSSERSSTSGGYIFYTFSTVHPIPDEDSPWITDSTDRIPATNMDSSHSTTLQPTANPNTGLVEDLDRTGPLSMTTQQSNSQSFSTSERAAGTELD

SEQ ID NO: 877742 - protein, 395 aa, Homo sapiens
VFCVLFVCRTDVQSSARRALLLSLFNILFCGFLALFARYAEEPGVGTANTETSEGFEILLFLSDDSSFLLLETFRTGMTGPVSWVASFSSSAELSPFLGAEGFLGKRMSLERYSFSRCTLACRDSVDLFRLLGSTEMPMVRATFLGMYGFIEGHVVIPRIHPNSICAANNTGVYILTSNTSQYDTYCFNASAPPEEDCTSVTDLPNAFDGPITITIVNRDGTRYVQKGEYRTNPEDIYPSNPTDDDVSSGSSSERSSTSGGYIFYTFSTVHPIPDEDSPWITDSTDRIPATSTSSNTISAGWEPNEENEDERDRHLSFSGSGIDDDEDFISSTISTTPRAFDHTKQNQDWTQWNPSHSNPEVLLQTTTRMTDVDRNGTTAYEGGCTHEGDDTKSC

SEQ ID NO: 877743 - protein, 320 aa, Homo sapiens
VFCVLFVCRTDVQSSARRALLLSLFNILFCGFLALFARYAEEPGVGTANTETSEGFEILLFLSDDSSFLLLETFRTGMTGPVSWVASFSSSAELSPFLGAEGFLGKRMSLERYSFSRCTLACRDSVDLFRLLGSTEMPMVRATFLGMYGFIEGHVVIPRIHPNSICAANNTGVYILTSNTSQYDTYCFNASAPPEEDCTSVTDLPNAFDGPITITIVNRDGTRYVQKGEYRTNPEDIYPSNPTDDDVSSGSSSERSSTSGGYIFYTFSTVHPIPDEDSPWITDSTDRIPATSKENKSLCFPIAIPWQNVSDLPEHCTLTC

SEQ ID NO: 877744 - protein, 59 aa, Homo sapiens
MQVTTTGTSSNTISAGWEPNEENEDERDRHLSFSGSGIDDDEDFISSTSKNNQLQYSHL

SEQ ID NO: 877745 - protein, 399 aa, Homo sapiens
MAFWGWRAAAALRLWGRVVERVEAGGGVGPFQACGCRLVLGGRDDVSAGLRGSHGARGEPLDPARPLQRPPRPEVPRAFRRQPRAAAPSFFFSSIKGGRRSISFSVGASSVVGSGGSSDKGKLSLQDVAELIRARACQRVVVMVGAGISTPSGIPDFRSPGSGLYSNLQQYDLPYPEAIFELPFFFHNPKPFFTLAKELYPGNYKPNVTHYFLRLLHDKGLLLRLYTQNIDGLERVSGIPASKLVEAHGTFASATCTVCQRPFPGEDIRADVMADRVPRCPVCTGVVKPDIVFFGEPLPQRFLLHVVDFPMADLLLILGTSLEVEPFASLTEAVRSSVPRLLINRDLVGPLAWHPRSRDVAQLGDVVHGVESLVELLGWTEEMRDLVQRETGKLDGPDK

SEQ ID NO: 877746 - protein, 136 aa, Homo sapiens
MVGAGISTPSGIPDFRSPGSGLYSNLQQYDLPYPEAIFELPFFFHNPKPFFTLAKELYPGNYKPNVTHYFLRLLHDKGLLLRLYTQNIDGLERVSGIPASKLVEAHGTFASATCTVCQRPFPGEDIRVSYPAVGCP

SEQ ID NO: 877747 - protein, 257 aa, Homo sapiens
MVGAGISTPSGIPDFRSPGSGLYSNLQQYDLPYPEAIFELPFFFHNPKPFFTLAKELYPGNYKPNVTHYFLRLLHDKGLLLRLYTQNIDGLERVSGIPASKLVEAHGTFASATCTVCQRPFPGEDIRADVMADRVPRCPVCTGVVKPDIVFFGEPLPQRFLLHVVDFPMADLLLILGTSLEVEPFASLTEAVRSSVPRLLINRDLVGPLAWHPRSRDVAQLGDVVHGVESLVELLGWTEEMRDLVQRETGKLDGPDK

SEQ ID NO: 877748 - protein, 275 aa, Homo sapiens
MVGAGISTPSGIPDFRSPGSGLYSNLQQYDLPYPEAIFELPFFFHNPKPFFTLAKELYPGNYKPNVTHYFLRLLHDKGLLLRLYTQNIDGLERVSGIPASKLVEAHGTFASATCTVCQRPFPGEDIRADVMADRVPRCPVCTGVVKPDIVFFGEPLPQRFLLHVVDFPMADLLLILGTSLEVEPFASLTEAVRSSVPRLLINRDLVGPLAWHPRSRDVAQLGDVVHGVESLVELLGWTEEMRDLVQRETGKVQTAEEDHPRGCPSHCSRLDGPDK

SEQ ID NO: 877749 - protein, 441 aa, Homo sapiens
MAFWGWRAAAALRLWGRVVERVEAGGGVGPFQACGCRLVLGGRDDVSAGLRGSHGARGEPLDPARPLQRPPRPEVPRAFRRQPRAAAPSFFFSSIKGGRRSISFSVGASSVVGSGGSSDKGKLSLQDVAELIRARACQRVVVMVGAGISTPSGIPDFRYCPQSHLPSALPSPDSCPPHCPVYSTSLSSSKGLRAFLLSCRSPGSGLYSNLQQYDLPYPEAIFELPFFFHNPKPFFTLAKELYPGNYKPNVTHYFLRLLHDKGLLLRLYTQNIDGLERVSGIPASKLVEAHGTFASATCTVCQRPFPGEDIRADVMADRVPRCPVCTGVVKPDIVFFGEPLPQRFLLHVVDFPMADLLLILGTSLEVEPFASLTEAVRSSVPRLLINRDLVGPLAWHPRSRDVAQLGDVVHGVESLVELLGWTEEMRDLVQRETGKLDGPDK

SEQ ID NO: 877750 - protein, 287 aa, Homo sapiens
MVGAGISTPSGIPDFRSPGSGLYSNLQQYDLPYPEAIFELPFFFHNPKPFFTLAKELYPGNYKPNVTHYFLRLLHDKGLLLRLYTQNIDGLERGVLPSPEVVLLALRAHLGGGSNTSLWLRISVSGIPASKLVEAHGTFASATCTVCQRPFPGEDIRADVMADRVPRCPVCTGVVKPDIVFFGEPLPQRFLLHVVDFPMADLLLILGTSLEVEPFASLTEAVRSSVPRLLINRDLVGPLAWHPRSRDVAQLGDVVHGVESLVELLGWTEEMRDLVQRETGKLDGPDK

SEQ ID NO: 877751 - protein, 257 aa, Homo sapiens; identical to SEQ ID NO: 877747

SEQ ID NO: 877752 - protein, 350 aa, Homo sapiens
MAFWGWRAAAALRLWGRVVERVEAGGGVGPFQACGCRLVLGGRDDVSAGLRGSHGARGEPLDPARPLQRPPRPEVPRAFRRQPRAAAPSFFFSSIKGGRRSISFSVGASSVVGSGGSSDKGKLSLQDVAELIRARACQRVVVMVGAGISTPSGIPDFRSPGSGLYSNLQQYDLPYPEAIFELPFFFHNPKPFFTLAKELYPGNYKPNVTHYFLRLLHDKGLLLRLYTQNIDGLERGDTGMKTRLEDITTPRGCASFQESCQAQKLCSWPCVLMFGTIPGGGAFCQLDRGRAELSSPTAHQPGLGGALGLASSQQGRGPAGGRGSRRGKPSGASGLDRRDAGPCAAGNWEA

SEQ ID NO: 877753 - protein, 257 aa, Homo sapiens; identical to SEQ ID NO: 877747

SEQ ID NO: 877754 - protein, 35 aa, Homo sapiens
MPDHSKSAQKVLTITAIRVEKGVSAGYRNAGSRFD

SEQ ID NO: 877755 - protein, 257 aa, Homo sapiens; identical to SEQ ID NO: 877747

SEQ ID NO: 877756 - protein, 275 aa, Homo sapiens; identical to SEQ ID NO: 877748

SEQ ID NO: 877757 - protein, 257 aa, Homo sapiens; identical to SEQ ID NO: 877747

SEQ ID NO: 877758 - protein, 257 aa, Homo sapiens; identical to SEQ ID NO: 877747

SEQ ID NO: 877759 - protein, 211 aa, Homo sapiens
MVGAGISTPSGIPDFRSPGSGLYSNLQQYDLPYPEAIFELPFFFHNPKPFFTLAKELYPGNYKPNVTHYFLRLLHDKGLLLRLYTQNIDGLERGDTGMKTRLEDITTPRGCASFQESCQAQKLCSWPCVLMFGTIPGGGAFCQLDRGRAELSSPTAHQPGLGGALGLASSQQGRGPAGGRGSRRGKPSGASGLDRRDAGPCAAGNWEGTDC

SEQ ID NO: 877760 - protein, 452 aa, Homo sapiens
MDGTIKEALSVVSDDQSLFDSAYGAAAHLPKADMTASGSPDYGQPHKINPLPPQQEWINQPVRVNVKREYDHMNGSRESPVDCSVSKCSKLVGGGESNPMNYNSYMDEKNGPPPPNMTTNERRVIVPADPTLWTQEHVRQWLEWAIKEYSLMEIDTSFFQNMDGKELCKMNKEDFLRATTLYNTEVLLSHLSYLRESSLLAYNTTSHTDQSSRLSVKEDPSYDSVRRGAWGNNMNSGLNKSPPLGGAQTISKNTEQRPQPDPYQILGPTSSRLANPGSGQIQLWQFLLELLSDSANASCITWEGTNGEFKMTDPDEVARRWGERKSKPNMNYDKLSRALRYYYDKNIMTKVHGKRYAYKFDFHGIAQALQPHPTESSMYKYPSDISYMPSYHAHQQKVNFVPPHPSSMPVTSSSFFGAASQYWTSPTGGIYPNPNVPRHPNTHVPSHLGSYY

SEQ ID NO: 877761 - protein, 386 aa, Homo sapiens
MEGGLAGERARESPVDCSVSKCSKLVGGGESNPMNYNSYMDEKNGPPPPNMTTNERRVIVPADPTLWTQEHVRQWLEWAIKEYSLMEIDTSFFQNMDGKELCKMNKEDFLRATTLYNTEVLLSHLSYLRESSLLAYNTTSHTDQSSRLSVKEDPSYDSVRRGAWGNNMNSGLNKSPPLGGAQTISKNTEQRPQPDPYQILGPTSSRLANPGSGQIQLWQFLLELLSDSANASCITWEGTNGEFKMTDPDEVARRWGERKSKPNMNYDKLSRALRYYYDKNIMTKVHGKRYAYKFDFHGIAQALQPHPTESSMYKYPSDISYMPSYHAHQQKVNFVPPHPSSMPVTSSSFFGAASQYWTSPTGGIYPNPNVPRHPNTHVPSHLGSYY

SEQ ID NO: 877762 - protein, 425 aa, Homo sapiens
MDGTIKEALSVVSDDQSLFDSAYGAAAHLPKADMTASGSPDYGQPHKINPLPPQQEWINQPVRVNVKREYDHMNGSRESPVDCSVSKCSKLVGGGESNPMNYNSYMDEKNGPPPPNMTTNERRVIVPADPTLWTQEHVRQWLEWAIKEYSLMEIDTSFFQNMDGKELCKMNKEDFLRATTLYNTEVLLSHLSYLRESSLLAYNTTSHTDQSSRLSVKEDPSYDSVRRGAWGNNMNSGLNKSPPLGGAQTISKNTEQRPQPDPYQILGPTSSRLANPGSGQIQLWQFLLELLSDSANASCITWEGTNGEFKMTDPDEVARRWGERKSKPNMNYDKLSRALRYYYDKNIMTKVHGKRYAYKFDFHGIAQALQPHPTESSMYKYPSDISSFFGAASQYWTSPTGGIYPNPNVPRHPNTHVPSHLGSYY

SEQ ID NO: 877763 - protein, 419 aa, Homo sapiens
MTASGSPDYGQPHKINPLPPQQEWINQPVRVNVKREYDHMNGSRESPVDCSVSKCSKLVGGGESNPMNYNSYMDEKNGPPPPNMTTNERRVIVPADPTLWTQEHVRQWLEWAIKEYSLMEIDTSFFQNMDGKELCKMNKEDFLRATTLYNTEVLLSHLSYLRESSLLAYNTTSHTDQSSRLSVKEDPSYDSVRRGAWGNNMNSGLNKSPPLGGAQTISKNTEQRPQPDPYQILGPTSSRLANPGSGQIQLWQFLLELLSDSANASCITWEGTNGEFKMTDPDEVARRWGERKSKPNMNYDKLSRALRYYYDKNIMTKVHGKRYAYKFDFHGIAQALQPHPTESSMYKYPSDISYMPSYHAHQQKVNFVPPHPSSMPVTSSSFFGAASQYWTSPTGGIYPNPNVPRHPNTHVPSHLGSYY

SEQ ID NO: 877764 - protein, 117 aa, Homo sapiens
TALPRLCRGSQIVEAYLCRALGHKFDFHGIAQALQPHPTESSMYKYPSDISYMPSYHAHQQKVNFVPPHPSSMPVTSSSFFGAASQYWTSPTGGIYPNPNVPRHPNTHVPSHLGSYY

SEQ ID NO: 877765 - protein, 179 aa, Homo sapiens
MDGTIKEALSVVSDDQSLFDSAYGAAAHLPKADMTASGSPDYGQPHKINPLPPQQEWINQPVRVNVKREYDHMNGSRESPVDCSVSKCSKLVGGGESNPMNYNSYMDEKNGPPPPNMTTNERRVIVPAGNSRTRLPGRHSLPHSLGGQGASKPLSDTLFPVELQNGESCTPAGSGGSRL

SEQ ID NO: 877766 - protein, 231 aa, Homo sapiens
MDGTIKEALSVVSDDQSLFDSAYGAAAHLPKADMTASGSPDYGQPHKINPLPPQQEWINQPVRVNVKREYDHMNGSRESPVDCSVSKCSKLVGGGESNPMNYNSYMDEKNGPPPPNMTTNERRVIVPADPTLWTQEHVRQWLEWAIKEYSLMEIDTSFFQNMDGKELCKMNKEDFLRATTLYNTEVLLSHLSYLRESSLWAINKTPNEQSSPIECQENPLLNQPERSWGIN

SEQ ID NO: 877767 - protein, 452 aa, Homo sapiens; identical to SEQ ID NO: 877760

SEQ ID NO: 877768 - protein, 220 aa, Homo sapiens
PTSYPPQTGSYSQAPSQYSQQSSSYGQQNPYQILGPTSSRLANPGSGQIQLWQFLLELLSDSANASCITWEGTNGEFKMTDPDEVARRWGERKSKPNMNYDKLSRALRYYYDKNIMTKVHGKRYAYKFDFHGIAQALQPHPTESSMYKYPSDISYMPSYHAHQQKVNFVPPHPSSMPVTSSSFFGAASQYWTSPTGGIYPNPNVPRHPNTHVPSHLGSYY

SEQ ID NO: 877769 - protein, 452 aa, Homo sapiens; identical to SEQ ID NO: 877760

SEQ ID NO: 877770 - protein, 200 aa, Homo sapiens
RKSTCSRRLPGVPGLPLACDPDGRQSAGGRGVPVSARGEDPGAGADGVPLRGVPAGARSRRLVLPTCAGVARAREDAEHGREKHGKEAEPGSQVLGGGGHAKDGIYDINREQDYVKNSEGILGENELRPPSQLHSLLEKIETGSLSEKIFETVSLSSDSLFQRAVSLLHTSYLDSSSEHGFQYSQVTLVKNDIFLNEVRC

SEQ ID NO: 877771 - protein, 142 aa, Homo sapiens
RKSTCSRRLPGVPGLPLACDPDGRQSAGGRGVPVSARGEEKHGKEAEPGSQVLGGGGHAKDGTKLFTNKKKQVVILRKNFKTLTGFFCLILSGRQNWYVSVDSVLAAVLLPLWVIQPKVYTFPNTPTVFIQDHGIMGNLVML

SEQ ID NO: 877772 - protein, 184 aa, Homo sapiens
RKSTCSRRLPGVPGLPLACDPDGRQSAGGRGVPVSARGEDPGAGADGVPLRGVPAGARSRRLVLPTCAGVARAREDAEHGREKHGKEAEPGSQVLGGGGHAKDGTKLFTNKKKQVVILRKNFKTLTGFFCLILSGRQNWYVSVDSVLAAVLLPLWVIQPKVYTFPNTPTVFIQDHGIMGNLVML

SEQ ID NO: 877773 - protein, 285 aa, Homo sapiens
RKSTCSRRLPGVPGLPLACDPDGRQSAGGRGVPVSARGEDPGAGADGVPLRGVPAGARSRRLVLPTCAGVARAREDAEHGREKHGKEAEPGSQVLGGGGHAKDGTKLFTNKKKQVVILRKNFKTLTGFFCLILSGRQNWYVSVDSVLAAVLLPLWVIQPKYYFYELSGNTVIERPRQICPYVIVAFRYRESKTMAPPAHKSILERSENVLMSPWKGKLIVQDRMLCDIALWSTYGAMIPTQLPQELDFKYVMKVSSLKKRLPEAAFRKQNYLEENLFSRFVLQFV

SEQ ID NO: 877774 - protein, 104 aa, Homo sapiens
RKSTCSRRLPGVPGLPLACDPDGRQSAGGRGVPVSARGEDPGAGADGVPLRGVPAGARSRRLVLPTCAGVARAREDAEHGREKHGKEAEPGSQVLGGGGHAKDG

SEQ ID NO: 877775 - protein, 159 aa, Homo sapiens
RKSTCSRRLPGVPGLPLACDPDGRQSAGGRGVPVSARGEDPGAGADGVPLRGVPAGARSRRLVLPTCAGVARAREDAEHGREKHGKEAEPGSQVLGGGGHAKDGIYDINREQDYVKNSEGILGENELRPPSQLHSLLEKIETGSLSEKIQNFLPTKKSK

SEQ ID NO: 877776 - protein, 243 aa, Homo sapiens
RKSTCSRRLPGVPGLPLACDPDGRQSAGGRGVPVSARGEEKHGKEAEPGSQVLGGGGHAKDGTKLFTNKKKQVVILRKNFKTLTGFFCLILSGRQNWYVSVDSVLAAVLLPLWVIQPKYYFYELSGNTVIERPRQICPYVIVAFRYRESKTMAPPAHKSILERSENVLMSPWKGKLIVQDRMLCDIALWSTYGAMIPTQLPQELDFKYVMKVSSLKKRLPEAAFRKQNYLEENLFSRFVLQFV

SEQ ID NO: 877777 - protein, 87 aa, Homo sapiens
RRHYQSTSLKDHVSEGWSTALDMLTRNRGSPVSPTVLDMWGQEGTHECVVMSQEHHGMTFRSGMTRSCLEDGLGLCTFIRQGPTQLD

SEQ ID NO: 877778 - protein, 920 aa, Homo sapiens
GRGAGAEPGPATASPAAGQRPPSPGPMPAELRQEQSPGSQASLATMPEAPDVLEETVTVEEDPGTPTSHVSIVTSEDGTTRRTETKVTKTVKTVTTRTVRQVPVGPDGLPLLDGGPPLGPFADGALDRHFLLRGGGPVATLSRAYLSSGGGFPEGPEPRDSPSYGSLSRGLGMRPPRAGPLGPGPGDGCFTLPGHREAFPVGPEPGPPGGRSLPERFQAEPYGLEDDTRSLAADDEGGPELEPDYGTATRRRPECGRGLHTRAYEDTADDGGELADERPAFPMVTAPLAQPERGSMGSLDRLVRRSPSVDSARKEPRWRDPELPEVLAMLRHPVDPVKANAAAYLQHLCFENEGVKRRVRQLRGLPLLVALLDHPRAEVRRRACGALRNLSYGRDTDNKAAIRDCGGVPALVRLLRAARDNEVRELVTGTLWNLSSYEPLKMVIIDHGLQTLTHEVIVPHSGWEREPNEDSKPRDAEWTTVFKNTSGCLRNVSSDGAEARRRLRECEGLVDALLHALQSAVGRKDTDNKSVENCVCIMRNLSYHVHKEVPGADRYQEAEPGPLGSAVGSQRRRRDDASCFGGKKAKEGKKDGEMDRNFDTLDLPKRTEAAKGFELLYQPEVVRLYLSLLTESRNFNTLEAAAGALQNLSAGNWMWATYIRATVRKERGLPVLVELLQSETDKVVRAVAIALRNLSLDRRNKDLIGSYAMAELVRNVRNAQAPPRPGACLEEDTVVAVLNTIHEIVSDSLDNARSLLQARGVPALVALVASSQSVREAKAASHVLQTVWSYKELRGTLQKDGWTKARFQSAAATAKGPKGALSPGGFDDSTLPLVDKSLEGEKTGSRDVIPMDALGPDGYSTVDQRERRPRGASSAGEASEKEPLKLDPSRKAPPPGPSRPAVRLVDAVGDAKPQPVDSWV

SEQ ID NO: 877779 - protein, 1008 aa, Homo sapiens
MEVGIVLNATMSMTPSTSQGALTRVGITRGPWYPHPTELTLLCLQLAGALVMEDCNVHSAASILASVKEQEARFERLTRALEQERRHVALQLERAQQPGMVSGGMGSGQPLPMAWQQLVLQEQSPGSQASLATMPEAPDVLEETVTVEEDPGTPTSHVSIVTSEDGTTRRTETKVTKTVKTVTTRTVRQVPVGPDGLPLLDGGPPLGPFADGALDRHFLLRGGGPVATLSRAYLSSGGGFPEGPEPRDSPSYGSLSRGLGMRPPRAGPLGPGPGDGCFTLPGHREAFPVGPEPGPPGGRSLPERFQAEPYGLEDDTRSLAADDEGGPELEPDYGTATRRRPECGRGLHTRAYEDTADDGGELADERPAFPMVTAPLAQPERGSMGSLDRLVRRSPSVDSARKEPRWRDPELPEVLAMLRHPVDPVKANAAAYLQHLCFENEGVKRRVRQLRGLPLLVALLDHPRAEVRRRACGALRNLSYGRDTDNKAAIRDCGGVPALVRLLRAARDNEVRELVTGTLWNLSSYEPLKMVIIDHGLQTLTHEVIVPHSGWEREPNEDSKPRDAEWTTVFKNTSGCLRNVSSDGAEARRRLRECEGLVDALLHALQSAVGRKDTDNKSVENCVCIMRNLSYHVHKEVPGADRYQEAEPGPLGSAVGSQRRRRDDASCFGGKKAKEGKKDGEMDRNFDTLDLPKRTEAAKGFELLYQPEVVRLYLSLLTESRNFNTLEAAAGALQNLSAGNWMWATYIRATVRKERGLPVLVELLQSETDKVVRAVAIALRNLSLDRRNKDLIGSYAMAELVRNVRNAQAPPRPGACLEEDTVVAVLNTIHEIVSDSLDNARSLLQARGVPALVALVASSQSVREAKAASHVLQTVWSYKELRGTLQKDGWTKARFQSAAATAKGPKGALSPGGFDDSTLPLVDKSLEGEKTGSRDVIPMDALGPDGYSTVDQRERRPRGASSAGEASEKEPLKLDPSRKAPPPGPSRPAVRLVDAVGDAKPQPVDSWV

SEQ ID NO: 877780 - protein, 287 aa, Homo sapiens
LLTTLTPEAARALRTSVRHWMWATYIRATVRKERGLPVLVELLQSETDKVVRAVAIALRNLSLDRRNKDLIGSYAMAELVRNVRNAQAPPRPGACLEEDTVVAVLNTIHEIVSDSLDNARSLLQARGVPALVALVASSQSVREAKAASHVLQTVWSYKELRGTLQKDGWTKARFQSAAATAKGPKGALSPGGFDDSTLPLVDKSLEGEKTGSRDVIPMDALGPDGYSTVDQRERRPRGASSAGEASEKEPLKLDPSRKAPPPGPSRPAVRLVDAVGDAKPQPVDSWV

SEQ ID NO: 877781 - protein, 920 aa, Homo sapiens; identical to SEQ ID NO: 877778

SEQ ID NO: 877782 - protein, 920 aa, Homo sapiens; identical to SEQ ID NO: 877778

SEQ ID NO: 877783 - protein, 87 aa, Homo sapiens; identical to SEQ ID NO: 877777

SEQ ID NO: 877784 - protein, 56 aa, Homo sapiens
DSKPRDAEWTTVFKNTSGCLRCGPDLVLKPTCTPGPVLVVPDSVEDGGELRSARAL

SEQ ID NO: 877785 - protein, 1047 aa, Homo sapiens
GLGLRAGPGGRGRPPHRSELRPRGLRPAPRRTAPRPGNAAPRAPTDPGKPFWGPRPRCGAAHAALQEPEPAGWVSGHADLPSRQLAGALVMEDCNVHSAASILASVKEQEARFERLTRALEQERRHVALQLERAQQPGMVSGGMGSGQPLPMAWQQLVLQEQSPGSQASLATMPEAPDVLEETVTVEEDPGTPTSHVSIVTSEDGTTRRTETKVTKTVKTVTTRTVRQVPVGPDGLPLLDGGPPLGPFADGALDRHFLLRGGGPVATLSRAYLSSGGGFPEGPEPRDSPSYGSLSRGLGMRPPRAGPLGPGPGDGCFTLPGHREAFPVGPEPGPPGGRSLPERFQAEPYGLEDDTRSLAADDEGGPELEPDYGTATRRRPECGRGLHTRAYEDTADDGGELADERPAFPMVTAPLAQPERGSMGSLDRLVRRSPSVDSARKEPRWRDPELPEVLAMLRHPVDPVKANAAAYLQHLCFENEGVKRRVRQLRGLPLLVALLDHPRAEVRRRACGALRNLSYGRDTDNKAAIRDCGGVPALVRLLRAARDNEVRELVTGTLWNLSSYEPLKMVIIDHGLQTLTHEVIVPHSGWEREPNEDSKPRDAEWTTVFKNTSGCLRNVSSDGAEARRRLRECEGLVDALLHALQSAVGRKDTDNKSVENCVCIMRNLSYHVHKEVPGADRYQEAEPGPLGSAVGSQRRRRDDASCFGGKKAKEGKKDGEMDRNFDTLDLPKRTEAAKGFELLYQPEVVRLYLSLLTESRNFNTLEAAAGALQNLSAGNWMWATYIRATVRKERGLPVLVELLQSETDKVVRAVAIALRNLSLDRRNKDLIGSYAMAELVRNVRNAQAPPRPGACLEEDTVVAVLNTIHEIVSDSLDNARSLLQARGVPALVALVASSQSVREAKAASHVLQTVWSYKELRGTLQKDGWTKARFQSAAATAKGPKGALSPGGFDDSTLPLVDKSLEGEKTGSRDVIPMDALGPDGYSTVDQRERRPRGASSAGEASEKEPLKLDPSRKAPPPGPSRPAVRLVDAVGDAKPQPVDSWV

SEQ ID NO: 877786 - protein, 893 aa, Homo sapiens
GRGAGAEPGPATASPAAGQRPPSPGPMPAELRQEQSPGSQASLATMPEAPDVLEETVTVEEDPGTPTSHVSIVTSEDGTTRRTETKVTKTVKTVTTRTVRQVPVGPDGLPLLDGGPPLGPFADGALDRHFLLRGGGPVATLSRAYLSSGGGFPEGPEPRDSPSYGSLSRGLGMRPPRAGPLGPGPGDGCFTLPGHREAFPVGPEPGPPGGRSLPERFQAEPYGLEDDTRSLAADDEGGPELEPDYGTATRRRPECGRGLHTRAYEDTADDGGELADERPAFPMVTAPLAQPERGSMGSLDRLVRRSPSVDSARKEPRWRDPELPEVLAMLRHPVDPVKANAAAYLQHLCFENEGVKRRVRQLRGLPLLVALLDHPRAEVRRRACGALRNLSYGRDTDNKAAIRDCGGVPALVRLLRAARDNEVRELVTGTLWNLSSYEPLKMVIIDHGLQTLTHEVIVPHSGWEREPNEDSKPRDAEWTTVFKNTSGCLRNVSSDGAEARRRLRECEGLVDALLHALQSAVGRKDTDNKSVENCVCIMRNLSYHVHKEVPGADRYQEAEPGPLGSAVGSQRRRRDDASCFGGKKAKEGKKDGEMDRNFDTLDLPKRTEAAKGFELLYQPEVVRLYLSLLTESRNFNTLEAAAGALQNLSAGNWMWATYIRATVRKERGLPVLVELLQSETDKVVRAVAIALRNLSLDRRNKDLIGSYAMAELVRNVRNAQAPPRPGACLEEDTVVAVLNTIHEIVSDSLDNARSLLQARGVPALVALVASSQSVREAKAASHVLQTVWSYKELRGTLQKDGWTKARFQSAAATAKGPKGALSPGGFDDSTLPLVDKSLEGEKTGSRDVIPMDALGPDGYSTVDQRERRPRGASSAGEASEKEPLKGPGPASCS

SEQ ID NO: 877787 - protein, 920 aa, Homo sapiens; identical to SEQ ID NO: 877778

SEQ ID NO: 877788 - protein, 920 aa, Homo sapiens; identical to SEQ ID NO: 877778

SEQ ID NO: 877789 - protein, 152 aa, Homo sapiens
MGHLWRLPGAHSFTKLVKRGKKAAPVLPVARHCKPPTSYSDHLENWLNMHQRLSRTENLMPWRSDSVRGAGDTMLRWFSSGPPSLDSPPFKSWSLTEVAGSQDRATALQPGQQSERLSRETTTKSWSLRPSTHLYSQHFGRLRQEDRLRPGV

SEQ ID NO: 877790 - protein, 94 aa, Homo sapiens
MAVALHLGFELLYQPEVVRLYLSLLTESRNFNTLEAAAGALQNLSAGNWMVRDQVGQGGQVLREGIPGTSLVQLLPRLAGKGGATPPPQDPRGV

SEQ ID NO: 877791 - protein, 105 aa, Homo sapiens
MAPPPLGPGQEGPCPCPHYRPGLRGWRNPSPLPRATGPWVPALPPRFGSSRGPHCGDKKGMEWGKRRSRRPSSFCCPGVGASPLWRAGGRRWKPQGLAFLKLVLF

SEQ ID NO: 877792 - protein, 105 aa, Homo sapiens; identical to SEQ ID NO: 877791

SEQ ID NO: 877793 - protein, 340 aa, Homo sapiens; identical to SEQ ID NO: 853209

SEQ ID NO: 877794 - protein, 340 aa, Homo sapiens; identical to SEQ ID NO: 853209

SEQ ID NO: 877795 - protein, 314 aa, Homo sapiens
LFFKTRQLSRSHLEIPRDPETRRTLRGHLAKIYAMHWGTDSRLLVSASQDGKLIIWDSYTTNKVHAIPLRSSWVMTCAYAPSGNFVACGGLDNICSIYSLKTREGNVRVSRELPGHTGYLSCCRFLDDNQIITSSGDTTCALWDIETGQQTVGFAGHSGDVMSLSLAPDGRTFVSGACDASIKLWDVRDSMCRQTFIGHESDINAVAFFPNGYAFTTGSDDATCRLFDLRADQELLMYSHDNIICGITSVAFSRSGRLLLAGYDDFNCNIWDAMKGDRAGVLAGHDNRVSCLGVTDDGMAVATGSWDSFLKIWN

SEQ ID NO: 877796 - protein, 279 aa, Homo sapiens
PTPFPTRLLVSASQDGKLIIWDSYTTNKVHAIPLRSSWVMTCAYAPSGNFVACGGLDNICSIYSLKTREGNVRVSRELPGHTGYLSCCRFLDDNQIITSSGDTTCALWDIETGQQTVGFAGHSGDVMSLSLAPDGRTFVSGACDASIKLWDVRDSMCRQTFIGHESDINAVAFFPNGYAFTTGSDDATCRLFDLRADQELLMYSHDNIICGITSVAFSRSGRLLLAGYDDFNCNIWDAMKGDRAGVLAGHDNRVSCLGVTDDGMAVATGSWDSFLKIWN

SEQ ID NO: 877797 - protein, 232 aa, Homo sapiens
MGSSSSGTATPPTSIYSLKTREGNVRVSRELPGHTGYLSCCRFLDDNQIITSSGDTTCALWDIETGQQTVGFAGHSGDVMSLSLAPDGRTFVSGACDASIKLWDVRDSMCRQTFIGHESDINAVAFFPNGYAFTTGSDDATCRLFDLRADQELLMYSHDNIICGITSVAFSRSGRLLLAGYDDFNCNIWDAMKGDRAGVLAGHDNRVSCLGVTDDGMAVATGSWDSFLKIWN

SEQ ID NO: 877798 - protein, 340 aa, Homo sapiens; identical to SEQ ID NO: 853209

SEQ ID NO: 877799 - protein, 195 aa, Homo sapiens
LRILTDARNQLITYDSGDTTCALWDIETGQQTVGFAGHSGDVMSLSLAPDGRTFVSGACDASIKLWDVRDSMCRQTFIGHESDINAVAFFPNGYAFTTGSDDATCRLFDLRADQELLMYSHDNIICGITSVAFSRSGRLLLAGYDDFNCNIWDAMKGDRAGVLAGHDNRVSCLGVTDDGMAVATGSWDSFLKIWN

SEQ ID NO: 877800 - protein, 132 aa, Homo sapiens
GSPSEMTVGCRQTFIGHESDINAVAFFPNGYAFTTGSDDATCRLFDLRADQELLMYSHDNIICGITSVAFSRSGRLLLAGYDDFNCNIWDAMKGDRAGVLAGHDNRVSCLGVTDDGMAVATGSWDSFLKIWN

SEQ ID NO: 877801 - protein, 301 aa, Homo sapiens
MSELEQLRQEAEQLRNQIRDARKACGDSTLTQITAGLDPVGRIQMRTRRTLRGHLAKIYAMHWGTDSRLLVSASQDGKLIIWDSYTTNKVHAIPLRSSWVMTCAYAPSGNFVACGGLDNICSIYSLKTREGNVRVSRELPGHTGYLSCCRFLDDNQIITSSGDTTCALWDIETGQQTVGFAGHSGDVMSLSLAPDGRTFVSGACDASIKLWDVRDSMCRQTFIGHESDINAVAFFPNGYAFTTGSDDATCRLFDLRALPMPTLQARAAGLAQSQPPSPGHGALGPCPPTQVWFLPGPPLWR

SEQ ID NO: 877802 - protein, 175 aa, Homo sapiens
MSELEQLRQEAEQLRNQIRDARKACGDSTLTQITAGLDPVGRIQMRTRRTLRGHLAKIYAMHWGTDSRLLVSASQDGKLIIWDSYTTNKVHAIPLRSSWVMTCAYAPSGNFVACGGLDNICSIYSLKTREGNVRVSRELPGHTGYLSCCRFLDDNQIITSSGDTTCAGILKNAAA

SEQ ID NO: 877803 - protein, 119 aa, Homo sapiens
GAGCGVGQGHRALAGSDPGASPAPQVHAIPLRSSWVMTCAYAPSGNFVACGGLDNICSIYSLKTREGNVRVSRELPGHTGEGPGPVRALFGVGGCTALRVETWLTSSFPRVPVVLPLPG

SEQ ID NO: 877804 - protein, 103 aa, Homo sapiens
RPPTTTTARIQASNDVPAHAHTTGQGCGAGAIPAPFPGPRGLGSLPSHPGLVPPGAPTVEIRRGWNGGRGGAGGPHPSAALGLGPHPSGGPEAGGGNPRGWLF

SEQ ID NO: 877805 - protein, 97 aa, Homo sapiens
VTLEDYYCNSSRCRQTFIGHESDINAVAFFPNGYAFTTGSDDATCRLFDLRADQELLMYSHDNIICGITSVAFSRSGRLLLAGYDDCLDYKGGYPRS

SEQ ID NO: 877806 - protein, 397 aa, Homo sapiens
PSGPRCNPAFLPTSPAASGLTSALHPPGLGPAARSCLPQPPSRGPQPPPTLPHGPGAMSELEQLRQEAEQLRNQIRDARKACGDSTLTQITAGLDPVGRIQMRTRRTLRGHLAKIYAMHWGTDSRLLVSASQDGKLIIWDSYTTNKVHAIPLRSSWVMTCAYAPSGNFVACGGLDNICSIYSLKTREGNVRVSRELPGHTGYLSCCRFLDDNQIITSSGDTTCALWDIETGQQTVGFAGHSGDVMSLSLAPDGRTFVSGACDASIKLWDVRDSMCRQTFIGHESDINAVAFFPNGYAFTTGSDDATCRLFDLRADQELLMYSHDNIICGITSVAFSRSGRLLLAGYDDFNCNIWDAMKGDRAGVLAGHDNRVSCLGVTDDGMAVATGSWDSFLKIWN

SEQ ID NO: 877807 - protein, 319 aa, Homo sapiens
LQRIHGTHLTQITAGLDPVGRIQMRTRRTLRGHLAKIYAMHWGTDSRLLVSASQDGKLIIWDSYTTNKVHAIPLRSSWVMTCAYAPSGNFVACGGLDNICSIYSLKTREGNVRVSRELPGHTGYLSCCRFLDDNQIITSSGDTTCALWDIETGQQTVGFAGHSGDVMSLSLAPDGRTFVSGACDASIKLWDVRDSMCRQTFIGHESDINAVAFFPNGYAFTTGSDDATCRLFDLRADQELLMYSHDNIICGITSVAFSRSGRLLLAGYDDFNCNIWDAMKGDRAGVLAGHDNRVSCLGVTDDGMAVATGSWDSFLKIWN

SEQ ID NO: 877808 - protein, 340 aa, Homo sapiens; identical to SEQ ID NO: 853209

SEQ ID NO: 877809 - protein, 370 aa, Homo sapiens
MSELEQLRQEAEQLRNQIRDARKACGDSTLTQITAGLDPVGRIQMRTRRTLRGHLAKIYAMHWGTDSRLLVSASQDGKLIIWDSYTTNKVHAIPLRSSWVMTCAYAPSGNFVACGGLDNICSIYSLKTREGNVRVSRELPGHTGEGPGPVRALFGVGGCTALRVETWLTSSFPRYLSCCRFLDDNQIITSSGDTTCALWDIETGQQTVGFAGHSGDVMSLSLAPDGRTFVSGACDASIKLWDVRDSMCRQTFIGHESDINAVAFFPNGYAFTTGSDDATCRLFDLRADQELLMYSHDNIICGITSVAFSRSGRLLLAGYDDFNCNIWDAMKGDRAGVLAGHDNRVSCLGVTDDGMAVATGSWDSFLKIWN

SEQ ID NO: 877810 - protein, 340 aa, Homo sapiens; identical to SEQ ID NO: 853209

SEQ ID NO: 877811 - protein, 311 aa, Homo sapiens
MSELEQLRQEAEQLRNQIRDARKACGDSTLTQITAGLDPVGRIQMRTRRTLRGHLAKIYAMHWGTDSRLLVSASQDGKLIIWDSYTTNKVHAIPLRSSWVMTCAYAPSGNFVACGGLDNICSIYSLKTREGNVRVSRELPGHTGYLSCCRFLDDNQIITSSGDTTCALWDIETGQQTVGFAGHSGDVMSLSLAPDGRTFVSGACDASIKLWDVRDSMCRQTFIGHESDINAVASPTMAWLWPRAPGTPSSRSGTNGPTPTGPRPGGALPMPTLQARAAGLAQSQPPSPGHGALGPCPPTQVWFLPGPPLWR

SEQ ID NO: 877812 - protein, 205 aa, Homo sapiens
MSELEQLRQEAEQLRNQIRDARKACGDSTLTQITAGLDPVGRIQMRTRRTLRGHLAKIYAMHWGTDSRLLVSASQDGKLIIWDSYTTNKVHAIPLRSSWVMTCAYAPSGNFVACGGLDNICSIYSLKTREGNVRVSRELPGHTGYLSCCRFLDDNQIITSSGDTTCALWDIETGQQTVGFAGHSGDVIQAPDTNVRPIGGPGTST

SEQ ID NO: 877813 - protein, 173 aa, Homo sapiens
MSELEQLRQEAEQLRNQIRDARKACGDSTLTQITAGLDPVGRIQMRTRRTLRGHLAKIYAMHWGTDSRLLVSASQDGKLIIWDSYTTNKVHAIPLRSSWVMTCAYAPSGNFVACGGLDNICSIYSLKTREGNVRVSRELPGHTGYLSCCRFLDDNQIITSSGDTTCATQRAGT

SEQ ID NO: 877814 - protein, 73 aa, Homo sapiens
YLQLSLMNNSQLPVDHILAGSFETAMRLLHDQVGVIQFGPYKQLFLQTYARGRTTYQALPCLPSMYGYPNRNW

SEQ ID NO: 877815 - protein, 1224 aa, Homo sapiens
MLTKFETKSARVKGLSFHPKRPWILTSLHNGVIQLWDYRMCTLIDKFDEHDGPVRGIDFHKQQPLFVSGGDDYKIKVWNYKLRRCLFTLLGHLDYIRTTFFHHEYPWILSASDDQTIRVWNWQSRTCVCVLTGHNHYVMCAQFHPTEDLVVSASLDQTVRVWDISGLRKKNLSPGAVESDVRGITGVDLFGTTDAVVKHVLEGHDRGVNWAAFHPTMPLIVSGADDRQVKIWRMNESKAWEVDTCRGHYNNVSCAVFHPRQELILSNSEDKSIRVWDMSKRTGVQTFRRDHDRFWVLAAHPNLNLFAAGHDGGMIVFKLERERPAYAVHGNMLHYVKDRFLRQLDFNSSKDVAVMQLRSGSKFPVFNMSYNPAENAVLLCTRASNLENSTYDLYTIPKDADSQNPDAPEGKRSSGLTAVWVARNRFAVLDRMHSLLIKNLKNEITKKVQVPNCDEIFYAGTGNLLLRDADSITLFDVQQKRTLASVKISKVKYVIWSADMSHVALLAKHAIVICNRKLDALCNIHENIRVKSGAWDESGVFIYTTSNHIKYAVTTGDHGIIRTLDLPIYVTRVKGNNVYCLDRECRPRVLTIDPTEFKFKLALINRKYDEVLHMVRNAKLVGQSIIAYLQKKGYPEVALHFVKDEKTRFSLALECGNIEIALEAAKALDDKNCWEKLGEVALLQGNHQIVEMCYQRTKNFDKLSFLYLITGNLEKLRKMMKIAEIRKDMSGHYQNALYLGDVSERVRILKNCGQKSLAYLTAATHGLDEEAESLKETFDPEKETIPDIDPNAKLLQPPAPIMPLDTNWPLLTVSKGFFEGTIASKGKGGALAADIDIDTVGTEGWGEDAELQLDEDGFVEATEGLGDDALGKGQEEGGGWDVEEDLELPPELDISPGAAGGAEDGFFVPPTKGTSPTQIWCNNSQLPVDHILAGSFETAMRLLHDQVGVIQFGPYKQLFLQTYARGRTTYQALPCLPSMYGYPNRNWKDAGLKNGVPAVGLKLNDLIQRLQLCYQLTTVGKFEEAVEKFRSILLSVPLLVVDNKQEIAEAQQLITICREYIVGLSVETERKKLPKETLEQQKRICEMAAYFTHSNLQPVHMILVLRTALNLFFKLKNFKTAATFARRLLELGPKPEVAQQTRKILSACEKNPTDAYQLNYDMHNPFDICAASYRPIYRGKPVEKCPLSGACYSPEFKGQICRVTTVTEIGKDVIGLRISPLQFR

SEQ ID NO: 877816 - protein, 1224 aa, Homo sapiens; identical to SEQ ID NO: 877815

SEQ ID NO: 877817 - protein, 1224 aa, Homo sapiens; identical to SEQ ID NO: 877815

SEQ ID NO: 877818 - protein, 1224 aa, Homo sapiens; identical to SEQ ID NO: 877815

SEQ ID NO: 877819 - protein, 1132 aa, Homo sapiens
MFKAFVWNIFQEYPWILSASDDQTIRVWNWQSRTCVCVLTGHNHYVMCAQFHPTEDLVVSASLDQTVRVWDISGLRKKNLSPGAVESDVRGITGVDLFGTTDAVVKHVLEGHDRGVNWAAFHPTMPLIVSGADDRQVKIWRMNESKAWEVDTCRGHYNNVSCAVFHPRQELILSNSEDKSIRVWDMSKRTGVQTFRRDHDRFWVLAAHPNLNLFAAGHDGGMIVFKLERERPAYAVHGNMLHYVKDRFLRQLDFNSSKDVAVMQLRSGSKFPVFNMSYNPAENAVLLCTRASNLENSTYDLYTIPKDADSQNPDAPEGKRSSGLTAVWVARNRFAVLDRMHSLLIKNLKNEITKKVQVPNCDEIFYAGTGNLLLRDADSITLFDVQQKRTLASVKISKVKYVIWSADMSHVALLAKHAIVICNRKLDALCNIHENIRVKSGAWDESGVFIYTTSNHIKYAVTTGDHGIIRTLDLPIYVTRVKGNNVYCLDRECRPRVLTIDPTEFKFKLALINRKYDEVLHMVRNAKLVGQSIIAYLQKKGYPEVALHFVKDEKTRFSLALECGNIEIALEAAKALDDKNCWEKLGEVALLQGNHQIVEMCYQRTKNFDKLSFLYLITGNLEKLRKMMKIAEIRKDMSGHYQNALYLGDVSERVRILKNCGQKSLAYLTAATHGLDEEAESLKETFDPEKETIPDIDPNAKLLQPPAPIMPLDTNWPLLTVSKGFFEGTIASKGKGGALAADIDIDTVGTEGWGEDAELQLDEDGFVEATEGLGDDALGKGQEEGGGWDVEEDLELPPELDISPGAAGGAEDGFFVPPTKGTSPTQIWCNNSQLPVDHILAGSFETAMRLLHDQVGVIQFGPYKQLFLQTYARGRTTYQALPCLPSMYGYPNRNWKDAGLKNGVPAVGLKLNDLIQRLQLCYQLTTVGKFEEAVEKFRSILLSVPLLVVDNKQEIAEAQQLITICREYIVGLSVETERKKLPKETLEQQKRICEMAAYFTHSNLQPVHMILVLRTALNLFFKLKNFKTAATFARRLLELGPKPEVAQQTRKILSACEKNPTDAYQLNYDMHNPFDICAASYRPIYRGKPVEKCPLSGACYSPEFKGQICRVTTVTEIGKDVIGLRISPLQFR

SEQ ID NO: 877820 - protein, 1042 aa, Homo sapiens
RIRDTSDLLTTDAVVKHVLEGHDRGVNWAAFHPTMPLIVSGADDRQVKIWRMNESKAWEVDTCRGHYNNVSCAVFHPRQELILSNSEDKSIRVWDMSKRTGVQTFRRDHDRFWVLAAHPNLNLFAAGHDGGMIVFKLERERPAYAVHGNMLHYVKDRFLRQLDFNSSKDVAVMQLRSGSKFPVFNMSYNPAENAVLLCTRASNLENSTYDLYTIPKDADSQNPDAPEGKRSSGLTAVWVARNRFAVLDRMHSLLIKNLKNEITKKVQVPNCDEIFYAGTGNLLLRDADSITLFDVQQKRTLASVKISKVKYVIWSADMSHVALLAKHAIVICNRKLDALCNIHENIRVKSGAWDESGVFIYTTSNHIKYAVTTGDHGIIRTLDLPIYVTRVKGNNVYCLDRECRPRVLTIDPTEFKFKLALINRKYDEVLHMVRNAKLVGQSIIAYLQKKGYPEVALHFVKDEKTRFSLALECGNIEIALEAAKALDDKNCWEKLGEVALLQGNHQIVEMCYQRTKNFDKLSFLYLITGNLEKLRKMMKIAEIRKDMSGHYQNALYLGDVSERVRILKNCGQKSLAYLTAATHGLDEEAESLKETFDPEKETIPDIDPNAKLLQPPAPIMPLDTNWPLLTVSKGFFEGTIASKGKGGALAADIDIDTVGTEGWGEDAELQLDEDGFVEATEGLGDDALGKGQEEGGGWDVEEDLELPPELDISPGAAGGAEDGFFVPPTKGTSPTQIWCNNSQLPVDHILAGSFETAMRLLHDQVGVIQFGPYKQLFLQTYARGRTTYQALPCLPSMYGYPNRNWKDAGLKNGVPAVGLKLNDLIQRLQLCYQLTTVGKFEEAVEKFRSILLSVPLLVVDNKQEIAEAQQLITICREYIVGLSVETERKKLPKETLEQQKRICEMAAYFTHSNLQPVHMILVLRTALNLFFKLKNFKTAATFARRLLELGPKPEVAQQTRKILSACEKNPTDAYQLNYDMHNPFDICAASYRPIYRGKPVEKCPLSGACYSPEFKGQICRVTTVTEIGKDVIGLRISPLQFR

SEQ ID NO: 877821 - protein, 1233 aa, Homo sapiens
MLTKFETKSARVKGLSFHPKRPWILTSLHNGVIQLWDYRMCTLIDKFDEHDGPVRGIDFHKQQPLFVSGGDDYKIKVWNYKLRRCLFTLLGHLDYIRTTFFHHEYPWILSASDDQTIRVWNWQSRTCVCVLTGHNHYVMCAQFHPTEDLVVSASLDQTVRVWDISGLRKKNLSPGAVESDVRGITGVDLFGTTDAVVKHVLEGHDRGVNWAAFHPTMPLIVSGADDRQVKIWRMNESKAWEVDTCRGHYNNVSCAVFHPRQELILSNSEDKSIRVWDMSKRTGVQTFRRDHDRFWVLAAHPNLNLFAAGHDGGMIVFKLERERPAYAVHGNMLHYVKDRFLRQLDFNSSKDVAVMQLRSGSKFPVFNMSYNPAENAVLLCTRASNLENSTYDLYTIPKDADSQNPDAPEGKRSSGLTAVWVARNRFAVLDRMHSLLIKNLKNEITKKVQVPNCDEIFYAGTGNLLLRDADSITLFDVQQKRTLASVKISKVKYVIWSADMSHVALLAKHEHSCPLPLTAIVICNRKLDALCNIHENIRVKSGAWDESGVFIYTTSNHIKYAVTTGDHGIIRTLDLPIYVTRVKGNNVYCLDRECRPRVLTIDPTEFKFKLALINRKYDEVLHMVRNAKLVGQSIIAYLQKKGYPEVALHFVKDEKTRFSLALECGNIEIALEAAKALDDKNCWEKLGEVALLQGNHQIVEMCYQRTKNFDKLSFLYLITGNLEKLRKMMKIAEIRKDMSGHYQNALYLGDVSERVRILKNCGQKSLAYLTAATHGLDEEAESLKETFDPEKETIPDIDPNAKLLQPPAPIMPLDTNWPLLTVSKGFFEGTIASKGKGGALAADIDIDTVGTEGWGEDAELQLDEDGFVEATEGLGDDALGKGQEEGGGWDVEEDLELPPELDISPGAAGGAEDGFFVPPTKGTSPTQIWCNNSQLPVDHILAGSFETAMRLLHDQVGVIQFGPYKQLFLQTYARGRTTYQALPCLPSMYGYPNRNWKDAGLKNGVPAVGLKLNDLIQRLQLCYQLTTVGKFEEAVEKFRSILLSVPLLVVDNKQEIAEAQQLITICREYIVGLSVETERKKLPKETLEQQKRICEMAAYFTHSNLQPVHMILVLRTALNLFFKLKNFKTAATFARRLLELGPKPEVAQQTRKILSACEKNPTDAYQLNYDMHNPFDICAASYRPIYRGKPVEKCPLSGACYSPEFKGQICRVTTVTEIGKDVIGLRISPLQFR

SEQ ID NO: 877822 - protein, 912 aa, Homo sapiens
EDSCDDSVDGNGSYAVHGNMLHYVKDRFLRQLDFNSSKDVAVMQLRSGSKFPVFNMSYNPAENAVLLCTRASNLENSTYDLYTIPKDADSQNPDAPEGKRSSGLTAVWVARNRFAVLDRMHSLLIKNLKNEITKKVQVPNCDEIFYAGTGNLLLRDADSITLFDVQQKRTLASVKISKVKYVIWSADMSHVALLAKHAIVICNRKLDALCNIHENIRVKSGAWDESGVFIYTTSNHIKYAVTTGDHGIIRTLDLPIYVTRVKGNNVYCLDRECRPRVLTIDPTEFKFKLALINRKYDEVLHMVRNAKLVGQSIIAYLQKKGYPEVALHFVKDEKTRFSLALECGNIEIALEAAKALDDKNCWEKLGEVALLQGNHQIVEMCYQRTKNFDKLSFLYLITGNLEKLRKMMKIAEIRKDMSGHYQNALYLGDVSERVRILKNCGQKSLAYLTAATHGLDEEAESLKETFDPEKETIPDIDPNAKLLQPPAPIMPLDTNWPLLTVSKGFFEGTIASKGKGGALAADIDIDTVGTEGWGEDAELQLDEDGFVEATEGLGDDALGKGQEEGGGWDVEEDLELPPELDISPGAAGGAEDGFFVPPTKGTSPTQIWCNNSQLPVDHILAGSFETAMRLLHDQVGVIQFGPYKQLFLQTYARGRTTYQALPCLPSMYGYPNRNWKDAGLKNGVPAVGLKLNDLIQRLQLCYQLTTVGKFEEAVEKFRSILLSVPLLVVDNKQEIAEAQQLITICREYIVGLSVETERKKLPKETLEQQKRICEMAAYFTHSNLQPVHMILVLRTALNLFFKLKNFKTAATFARRLLELGPKPEVAQQTRKILSACEKNPTDAYQLNYDMHNPFDICAASYRPIYRGKPVEKCPLSGACYSPEFKGQICRVTTVTEIGKDVIGLRISPLQFR

SEQ ID NO: 877823 - protein, 1175 aa, Homo sapiens
MLTKFETKSARVKGLSFHPKRPWILTSLHNGVIQLWDYRMCTLIDKFDEHDGPVRGIDFHKQQPLFVSGGDDYKIKVWNYKLRRCLFTLLGHLDYIRTTFFHHEYPWILSASDDQTIRVWNWQSRTCVCVLTGHNHYVMCAQFHPTEDLVVSASLDQTVRVWDISGLRKKNLSPGAVESDVRGITGVDLFGTTDAVVKHVLEGHDRGVNWAAFHPTMPLIVSGADDRQVKIWRMNESKAWEVDTCRGHYNNVSCAVFHPRQELILSNSEDKSIRVWDMSKRTGVQTFRRDHDRFWVLAAHPNLNLFAAGHDGGMIVFKLERERPAYAVHGNMLHYVKDRFLRQLDFNSSKDVAVMQLRSGSKFPVFNMSYNPAENAVLLCTRASNLENSTYDLYTIPKDADSQNPDAPEGKRSSGLTAVWVARNRFAVLDRMHSLLIKNLKNEITKKVQVPNCDEIFYAGTGNLLLRDADSITLFDVQQKRTLASVKISKVKYVIWSADMSHVALLAKHAIVICNRKLDALCNIHENIRVKSGAWDESGVFIYTTSNHIKYAVTTGDHGIIRTLDLPIYVTRVKGNNVYCLDRECRPRVLTIDPTEFKFKLALINRKYDEIALEAAKALDDKNCWEKLGEVALLQGNHQIVEMCYQRTKNFDKLSFLYLITGNLEKLRKMMKIAEIRKDMSGHYQNALYLGDVSERVRILKNCGQKSLAYLTAATHGLDEEAESLKETFDPEKETIPDIDPNAKLLQPPAPIMPLDTNWPLLTVSKGFFEGTIASKGKGGALAADIDIDTVGTEGWGEDAELQLDEDGFVEATEGLGDDALGKGQEEGGGWDVEEDLELPPELDISPGAAGGAEDGFFVPPTKGTSPTQIWCNNSQLPVDHILAGSFETAMRLLHDQVGVIQFGPYKQLFLQTYARGRTTYQALPCLPSMYGYPNRNWKDAGLKNGVPAVGLKLNDLIQRLQLCYQLTTVGKFEEAVEKFRSILLSVPLLVVDNKQEIAEAQQLITICREYIVGLSVETERKKLPKETLEQQKRICEMAAYFTHSNLQPVHMILVLRTALNLFFKLKNFKTAATFARRLLELGPKPEVAQQTRKILSACEKNPTDAYQLNYDMHNPFDICAASYRPIYRGKPVEKCPLSGACYSPEFKGQICRVTTVTEIGKDVIGLRISPLQFR

SEQ ID NO: 877824 - protein, 852 aa, Homo sapiens
MTSEDESGTRASNLENSTYDLYTIPKDADSQNPDAPEGKRSSGLTAVWVARNRFAVLDRMHSLLIKNLKNEITKKVQVPNCDEIFYAGTGNLLLRDADSITLFDVQQKRTLASVKISKVKYVIWSADMSHVALLAKHAIVICNRKLDALCNIHENIRVKSGAWDESGVFIYTTSNHIKYAVTTGDHGIIRTLDLPIYVTRVKGNNVYCLDRECRPRVLTIDPTEFKFKLALINRKYDEVLHMVRNAKLVGQSIIAYLQKKGYPEVALHFVKDEKTRFSLALECGNIEIALEAAKALDDKNCWEKLGEVALLQGNHQIVEMCYQRTKNFDKLSFLYLITGNLEKLRKMMKIAEIRKDMSGHYQNALYLGDVSERVRILKNCGQKSLAYLTAATHGLDEEAESLKETFDPEKETIPDIDPNAKLLQPPAPIMPLDTNWPLLTVSKGFFEGTIASKGKGGALAADIDIDTVGTEGWGEDAELQLDEDGFVEATEGLGDDALGKGQEEGGGWDVEEDLELPPELDISPGAAGGAEDGFFVPPTKGTSPTQIWCNNSQLPVDHILAGSFETAMRLLHDQVGVIQFGPYKQLFLQTYARGRTTYQALPCLPSMYGYPNRNWKDAGLKNGVPAVGLKLNDLIQRLQLCYQLTTVGKFEEAVEKFRSILLSVPLLVVDNKQEIAEAQQLITICREYIVGLSVETERKKLPKETLEQQKRICEMAAYFTHSNLQPVHMILVLRTALNLFFKLKNFKTAATFARRLLELGPKPEVAQQTRKILSACEKNPTDAYQLNYDMHNPFDICAASYRPIYRGKPVEKCPLSGACYSPEFKGQICRVTTVTEIGKDVIGLRISPLQFR

SEQ ID NO: 877825 - protein, 633 aa, Homo sapiens
YNKKKPMLIRDEDHTKYYEVLHMVRNAKLVGQSIIAYLQKKGYPEVALHFVKDEKTRFSLALECGNIEIALEAAKALDDKNCWEKLGEVALLQGNHQIVEMCYQRTKNFDKLSFLYLITGNLEKLRKMMKIAEIRKDMSGHYQNALYLGDVSERVRILKNCGQKSLAYLTAATHGLDEEAESLKETFDPEKETIPDIDPNAKLLQPPAPIMPLDTNWPLLTVSKGFFEGTIASKGKGGALAADIDIDTVGTEGWGEDAELQLDEDGFVEATEGLGDDALGKGQEEGGGWDVEEDLELPPELDISPGAAGGAEDGFFVPPTKGTSPTQIWCNNSQLPVDHILAGSFETAMRLLHDQVGVIQFGPYKQLFLQTYARGRTTYQALPCLPSMYGYPNRNWKDAGLKNGVPAVGLKLNDLIQRLQLCYQLTTVGKFEEAVEKFRSILLSVPLLVVDNKQEIAEAQQLITICREYIVGLSVETERKKLPKETLEQQKRICEMAAYFTHSNLQPVHMILVLRTALNLFFKLKNFKTAATFARRLLELGPKPEVAQQTRKILSACEKNPTDAYQLNYDMHNPFDICAASYRPIYRGKPVEKCPLSGACYSPEFKGQICRVTTVTEIGKDVIGLRISPLQFR

SEQ ID NO: 877826 - protein, 533 aa, Homo sapiens [sequence omitted]

SEQ ID NO: 877827 - protein, 503 aa, Homo sapiens
MIRSDWTRGRVQQNALYLGDVSERVRILKNCGQKSLAYLTAATHGLDEEAESLKETFDPEKETIPDIDPNAKLLQPPAPIMPLDTNWPLLTVSKGFFEGTIASKGKGGALAADIDIDTVGTEGWGEDAELQLDEDGFVEATEGLGDDALGKGQEEGGGWDVEEDLELPPELDISPGAAGGAEDGFFVPPTKGTSPTQIWCNNSQLPVDHILAGSFETAMRLLHDQVGVIQFGPYKQLFLQTYARGRTTYQALPCLPSMYGYPNRNWKDAGLKNGVPAVGLKLNDLIQRLQLCYQLTTVGKFEEAVEKFRSILLSVPLLVVDNKQEIAEAQQLITICREYIVGLSVETERKKLPKETLEQQKRICEMAAYFTHSNLQPVHMILVLRTALNLFFKLKNFKTAATFARRLLELGPKPEVAQQTRKILSACEKNPTDAYQLNYDMHNPFDICAASYRPIYRGKPVEKCPLSGACYSPEFKGQICRVTTVTEIGKDVIGLRISPLQFR

SEQ ID NO: 877828 - protein, 285 aa, Homo sapiens [sequence omitted]

SEQ ID NO: 877829 - protein, 1172 aa, Homo sapiens
MLTKFETKSARVKGLSFHPKRPWILTSLHNGVIQLWDYRMCTLIDKFDEHDGPVRGIDFHKQQPLFVSGGDDYKIKVWNYKLRRCLFTLLGHLDYIRTTFFHHEYPWILSASDDQTIRVWNWQSRTCVCVLTGHNHYVMCAQFHPTEDLVVSASLDQTVRVWDISGLRKKNLSPGAVESDVRGITGVDLFGTTDAVVKHVLEGHDRGVNWAAFHPTMPLIVSGADDRQVKIWRMNESKAWEVDTCRGHYNNVSCAVFHPRQELILSNSEDKSIRVWDMSKRTGVQTFRRDHDRFWVLAAHPNLNLFAAGHDGGMIVFKLERERPAYAVHGNMLHYVKDRFLRQLDFNSSKDVAVMQLRSGSKFPVFNMSYNPAENAVLLCTRASNLENSTYDLYTIPKDADSQNPDAPEGKRSSGLTAVWVARNRFAVLDRMHSLLIKNLKNEITKKVQVPNCDEIFYAGTGNLLLRDADSITLFDVQQKRTLASVKISKVKYVIWSADMSHVALLAKHAIVICNRKLDALCNIHENIRVKSGAWDESGVFIYTTSNHIKYAVTTGDHGIIRTLDLPIYVTRVKGNNVYCLDRECRPRVLTIDPTEFKFKLALINRKYDEVLHMVRNAKLVGQSIIAYLQKKGYPEVALHFVKDEKTRFSLALECGNIEIALEAAKALDDKNCWEKLGEVALLQGNHQIVEMCYQRTKNFDKLSFLYLITGNLEKLRKMMKIAEIRKDMSGHYQNALYLGDVSERVRILKNCGQKSLAYLTAATHGLDEEAESLKETFDPEKETIPDIDPNAKLLQPPAPIMPLDTNWPLLTVSKGFFEGTIASKGKGGALAADIDIDTVGTEGWGEDAELQLDEDGFVEATEGLGDDALGKGQEEGGGWDVEEDLELPPELDISPGAAGGAEDGFFVPPTKGTSPTQIWCNNSQLPVDHILAGSFETAMRLLHDQVGVIQFGPYKQLFLQTYARGRTTYQALPCLPSMYGYPNRNWKDAGLKNGVPAVGLKLNDLIQRLQLCYQLTTVGKFEEAVEKFRSILLSVPLLVVDNKQEIAEAQQLITICREYIVGLSVETERKKLPKETLEQQKRICEMAAYFTHSNLQPVHMILVLRTALNLFFKLKNFKTAATFARRLLELGPKPEVAQQVDGTPSVTIGKPDQLLHGGSRPRSLPLKQSNK

SEQ ID NO: 877830 - protein, 987 aa, Homo sapiens [sequence omitted]

SEQ ID NO: 877831 - protein, 733 aa, Homo sapiens
MLTKFETKSARVKGLSFHPKRPWILTSLHNGVIQLWDYRMCTLIDKFDEHDGPVRGIDFHKQQPLFVSGGDDYKIKVWNYKLRRCLFTLLGHLDYIRTTFFHHEYPWILSASDDQTIRVWNWQSRTCVCVLTGHNHYVMCAQFHPTEDLVVSASLDQTVRVWDISGLRKKNLSPGAVESDVRGITGVDLFGTTDAVVKHVLEGHDRGVNWAAFHPTMPLIVSGADDRQVKIWRMNESKAWEVDTCRGHYNNVSCAVFHPRQELILSNSEDKSIRVWDMSKRTGVQTFRRDHDRFWVLAAHPNLNLFAAGHDGGMIVFKLERERPAYAVHGNMLHYVKDRFLRQLDFNSSKDVAVMQLRSGSKFPVFNMSYNPAENAVLLCTRASNLENSTYDLYTIPKDADSQNPDAPEGKRSSGLTAVWVARNRFAVLDRMHSLLIKNLKNEITKKVQVPNCDEIFYAGTGNLLLRDADSITLFDVQQKRTLASVKISKVKYVIWSADMSHVALLAKHAIVICNRKLDALCNIHENIRVKSGAWDESGVFIYTTSNHIKYAVTTGDHGIIRTLDLPIYVTRVKGNNVYCLDRECRPRVLTIDPTEFKFKLALINRKYDEVLHMVRNAKLVGQSIIAYLQKKGYPEVALHFVKDEKTRFSLALECGNIEVRGIWSSAPYCLRGERVRVPLGGHYSGLASLARIMKFGIFFSCYIEPSSCCYLPISTFTCLCFCHRISIFVNLN

SEQ ID NO: 877832 - protein, 527 aa, Homo sapiens
MLTKFETKSARVKGLSFHPKRPWILTSLHNGVIQLWDYRMCTLIDKFDEHDGPVRGIDFHKQQPLFVSGGDDYKIKVWNYKLRRCLFTLLGHLDYIRTTFFHHEYPWILSASDDQTIRVWNWQSRTCVCVLTGHNHYVMCAQFHPTEDLVVSASLDQTVRVWDISGLRKKNLSPGAVESDVRGITGVDLFGTTDAVVKHVLEGHDRGVNWAAFHPTMPLIVSGADDRQVKIWRMNESKAWEVDTCRGHYNNVSCAVFHPRQELILSNSEDKSIRVWDMSKRTGVQTFRRDHDRFWVLAAHPNLNLFAAGHDGGMIVFKLERERPAYAVHGNMLHYVKDRFLRQLDFNSSKDVAVMQLRSGSKFPVFNMSYNPAENAVLLCTRASNLENSTYDLYTIPKDADSQNPDAPEGKRSSGLTAVWVARNRFAVLDRMHSLLIKNLKNEITKKVQVPNCDEIFYAGTGNLLLRDADSITLFDVQQKRTLASVKISKVKYVIWSADMSHVALLAKHAIVICNRKLDALKITWLK

SEQ ID NO: 877833 - protein, 359 aa, Homo sapiens [sequence omitted]

SEQ ID NO: 877834 - protein, 214 aa, Homo sapiens
MLTKFETKSARVKGLSFHPKRPWILTSLHNGVIQLWDYRMCTLIDKFDEHDGPVRGIDFHKQQPLFVSGGDDYKIKVWNYKLRRCLFTLLGHLDYIRTTFFHHEYPWILSASDDQTIRVWNWQSRTCVCVLTGHNHYVMCAQFHPTEDLVVSASLDQTVRVWDISGLRKKNLSPGAVESDVRGITGVDLFGTTDAVVKHVLEGHEQWSEILLES

SEQ ID NO: 877835 - protein, 194 aa, Homo sapiens
MLTKFETKSARVKGLSFHPKRPWILTSLHNGVIQLWDYRMCTLIDKFDEHDGPVRGIDFHKQQPLFVSGGDDYKIKVWNYKLRRCLFTLLGHLDYIRTTFFHHEYPWILSASDDQTIRVWNWQSRTCVCVLTGHNHYVMCAQFHPTEDLVVSASLDQTVRVWDISGLRKKNLSPGAVESDVRGITGVDLFGHIT

SEQ ID NO: 877836 - protein, 113 aa, Homo sapiens
MLTKFETKSARVKGLSFHPKRPWILTSLHNGVIQLWDYRMCTLIDKFDEHDGPVRGIDFHKQQPLFVSGGDDYKIKVQRAVITENKGQRMWEGLGIMKGTERQEISFIQSSGL

SEQ ID NO: 877837 - protein, 1224 aa, Homo sapiens; identical to SEQ ID NO: 877815

SEQ ID NO: 877838 - protein, 1224 aa, Homo sapiens; identical to SEQ ID NO: 877815

SEQ ID NO: 877839 - protein, 1224 aa, Homo sapiens; identical to SEQ ID NO: 877815

SEQ ID NO: 877840 - protein, 1224 aa, Homo sapiens; identical to SEQ ID NO: 877815

SEQ ID NO: 877841 - protein, 1086 aa, Homo sapiens [sequence omitted]

SEQ ID NO: 877842 - protein, 1041 aa, Homo sapiens
TDVRGYGKTTDAVVKHVLEGHDRGVNWAAFHPTMPLIVSGADDRQVKIWRMNESKAWEVDTCRGHYNNVSCAVFHPRQELILSNSEDKSIRVWDMSKRTGVQTFRRDHDRFWVLAAHPNLNLFAAGHDGGMIVFKLERERPAYAVHGNMLHYVKDRFLRQLDFNSSKDVAVMQLRSGSKFPVFNMSYNPAENAVLLCTRASNLENSTYDLYTIPKDADSQNPDAPEGKRSSGLTAVWVARNRFAVLDRMHSLLIKNLKNEITKKVQVPNCDEIFYAGTGNLLLRDADSITLFDVQQKRTLASVKISKVKYVIWSADMSHVALLAKHAIVICNRKLDALCNIHENIRVKSGAWDESGVFIYTTSNHIKYAVTTGDHGIIRTLDLPIYVTRVKGNNVYCLDRECRPRVLTIDPTEFKFKLALINRKYDEVLHMVRNAKLVGQSIIAYLQKKGYPEVALHFVKDEKTRFSLALECGNIEIALEAAKALDDKNCWEKLGEVALLQGNHQIVEMCYQRTKNFDKLSFLYLITGNLEKLRKMMKIAEIRKDMSGHYQNALYLGDVSERVRILKNCGQKSLAYLTAATHGLDEEAESLKETFDPEKETIPDIDPNAKLLQPPAPIMPLDTNWPLLTVSKGFFEGTIASKGKGGALAADIDIDTVGTEGWGEDAELQLDEDGFVEATEGLGDDALGKGQEEGGGWDVEEDLELPPELDISPGAAGGAEDGFFVPPTKGTSPTQIWCNNSQLPVDHILAGSFETAMRLLHDQVGVIQFGPYKQLFLQTYARGRTTYQALPCLPSMYGYPNRNWKDAGLKNGVPAVGLKLNDLIQRLQLCYQLTTVGKFEEAVEKFRSILLSVPLLVVDNKQEIAEAQQLITICREYIVGLSVETERKKLPKETLEQQKRICEMAAYFTHSNLQPVHMILVLRTALNLFFKLKNFKTAATFARRLLELGPKPEVAQQTRKILSACEKNPTDAYQLNYDMHNPFDICAASYRPIYRGKPVEKCPLSGACYSPEFKGQICRVTTVTEIGKDVIGLRISPLQFR

SEQ ID NO: 877843 - protein, 893 aa, Homo sapiens
MLHYVKDRFLRQLDFNSSKDVAVMQLRSGSKFPVFNMSYNPAENAVLLCTRASNLENSTYDLYTIPKDADSQNPDAPEGKRSSGLTAVWVARNRFAVLDRMHSLLIKNLKNEITKKVQVPNCDEIFYAGTGNLLLRDADSITLFDVQQKRTLASVKISKVKYVIWSADMSHVALLAKHAIVICNRKLDALCNIHENIRVKSGAWDESGVFIYTTSNHIKYAVTTGDHGIIRTLDLPIYVTRVKGNNVYCLDRECRPRVLTIDPTEFKFKLALINRKYDEVLHMVRNAKLVGQSIIAYLQKKGYPEVALHFVKDEKTRFSLALECGNIEIALEAAKALDDKNCWEKLGEVALLQGNHQIVEMCYQRTKNFDKLSFLYLITGNLEKLRKMMKIAEIRKDMSGHYQNALYLGDVSERVRILKNCGQKSLAYLTAATHGLDEEAESLKETFDPEKETIPDIDPNAKLLQPPAPIMPLDTNWPLLTVSKGFFEGTIASKGKGGALAADIDIDTVGTEGWGEDAELQLDEDGFVEATEGLGDDALGKGQEEGGGWDVEEDLELPPELDISPGAAGGAEDGFFVPPTKGTSPTQIWCNNSQLPVDHILAGSFETAMRLLHDQVGVIQFGPYKQLFLQTYARGRTTYQALPCLPSMYGYPNRNWKDAGLKNGVPAVGLKLNDLIQRLQLCYQLTTVGKFEEAVEKFRSILLSVPLLVVDNKQEIAEAQQLITICREYIVGLSVETERKKLPKETLEQQKRICEMAAYFTHSNLQPVHMILVLRTALNLFFKLKNFKTAATFARRLLELGPKPEVAQQTRKILSACEKNPTDAYQLNYDMHNPFDICAASYRPIYRGKPVEKCPLSGACYSPEFKGQICRVTTVTEIGKDVIGLRISPLQFR

SEQ ID NO: 877844 - protein, 933 aa, Homo sapiens
MLTKFETKSARVKGLSFHPKRPWILTSLHNGVIQLWDYRMCTLIDKFDEHDGPVRGIDFHKQQPLFVSGGDDYKIKVWNYKLRRCLFTLLGHLDYIRTTFFHHEYPWILSASDDQTIRVWNWQSRTCVCVLTGHNHYVMCAQFHPTEDLVVSASLDQTVRVWDISGLRKKNLSPGAVESDVRGITGVDLFGTTDAVVKHVLEGHDRGVNWAAFHPTMPLIVSGADDRQVKIWRMNESKAWEVDTCRGHYNNVSCAVFHPRQELILSNSEDKSIRVWDMSKRTGVQTFRRDHDRFWVLAAHPNLNLFAAGHDGGMIVFKLERERPAYAVHGNMLHYVKDRFLRQLDFNSSKDVAVMQLRSGSKFPVFNMSYNPAENAVLLCTRASNLENSTYDLYTIPKDADSQNPDAPEGKRSSGLTAVWVARNRFAVLDRMHSLLIKNLKNEITKKVQVPNCDEIFYAGTGNLLLRDADSITLFDVQQKRTLASVKISKVKYVIWSADMSHVALLAKHAIVICNRKLDALCNIHENIRVKSGAWDESGVFIYTTSNHIKYAVTTGDHGIIRTLDLPIYVTRVKGNNVYCLDRECRPRVLTIDPTEFKFKLALINRKYDEVLHMVRNAKLVGQSIIAYLQKKGYPEVALHFVKDEKTRFSLALECGNIEIALEAAKALDDKNCWEKLGEVALLQGNHQIVEMCYQRTKNFDKLSFLYLITGNLEKLRKMMKIAEIRKDMSGHYQNALYLGDVSERVRILKNCGQKSLAYLTAATHGLDEEAESLKETFDPEKETIPDIDPNAKLLQPPAPIMPLDTNWPLLTVSKGFFEGTIASKGKGGALAADIDIDTVGTEGWGEDAELQLDEDGFVEATEGLGDDALGKGQEEGGGWDVEEDLVGLKMVSLCPQPREQVQLRSGVITLSFQLITSWQALSKQPCGSFMTK

SEQ ID NO: 877845 - protein, 827 aa, Homo sapiens
SDQFRATRDAPEGKRSSGLTAVWVARNRFAVLDRMHSLLIKNLKNEITKKVQVPNCDEIFYAGTGNLLLRDADSITLFDVQQKRTLASVKISKVKYVIWSADMSHVALLAKHAIVICNRKLDALCNIHENIRVKSGAWDESGVFIYTTSNHIKYAVTTGDHGIIRTLDLPIYVTRVKGNNVYCLDRECRPRVLTIDPTEFKFKLALINRKYDEVLHMVRNAKLVGQSIIAYLQKKGYPEVALHFVKDEKTRFSLALECGNIEIALEAAKALDDKNCWEKLGEVALLQGNHQIVEMCYQRTKNFDKLSFLYLITGNLEKLRKMMKIAEIRKDMSGHYQNALYLGDVSERVRILKNCGQKSLAYLTAATHGLDEEAESLKETFDPEKETIPDIDPNAKLLQPPAPIMPLDTNWPLLTVSKGFFEGTIASKGKGGALAADIDIDTVGTEGWGEDAELQLDEDGFVEATEGLGDDALGKGQEEGGGWDVEEDLELPPELDISPGAAGGAEDGFFVPPTKGTSPTQIWCNNSQLPVDHILAGSFETAMRLLHDQVGVIQFGPYKQLFLQTYARGRTTYQALPCLPSMYGYPNRNWKDAGLKNGVPAVGLKLNDLIQRLQLCYQLTTVGKFEEAVEKFRSILLSVPLLVVDNKQEIAEAQQLITICREYIVGLSVETERKKLPKETLEQQKRICEMAAYFTHSNLQPVHMILVLRTALNLFFKLKNFKTAATFARRLLELGPKPEVAQQTRKILSACEKNPTDAYQLNYDMHNPFDICAASYRPIYRGKPVEKCPLSGACYSPEFKGQICRVTTVTEIGKDVIGLRISPLQFR

SEQ ID NO: 877846 - protein, 633 aa, Homo sapiens
QYPRVLRSRGWVARKYDWRVLHMVRNAKLVGQSIIAYLQKKGYPEVALHFVKDEKTRFSLALECGNIEIALEAAKALDDKNCWEKLGEVALLQGNHQIVEMCYQRTKNFDKLSFLYLITGNLEKLRKMMKIAEIRKDMSGHYQNALYLGDVSERVRILKNCGQKSLAYLTAATHGLDEEAESLKETFDPEKETIPDIDPNAKLLQPPAPIMPLDTNWPLLTVSKGFFEGTIASKGKGGALAADIDIDTVGTEGWGEDAELQLDEDGFVEATEGLGDDALGKGQEEGGGWDVEEDLELPPELDISPGAAGGAEDGFFVPPTKGTSPTQIWCNNSQLPVDHILAGSFETAMRLLHDQVGVIQFGPYKQLFLQTYARGRTTYQALPCLPSMYGYPNRNWKDAGLKNGVPAVGLKLNDLIQRLQLCYQLTTVGKFEEAVEKFRSILLSVPLLVVDNKQEIAEAQQLITICREYIVGLSVETERKKLPKETLEQQKRICEMAAYFTHSNLQPVHMILVLRTALNLFFKLKNFKTAATFARRLLELGPKPEVAQQTRKILSACEKNPTDAYQLNYDMHNPFDICAASYRPIYRGKPVEKCPLSGACYSPEFKGQICRVTTVTEIGKDVIGLRISPLQFR

SEQ ID NO: 877847 - protein, 529 aa, Homo sapiens
  misc_feature (6)..(6): Xaa can be any naturally occurring amino acid
CQLRLXVLEKGSCSVALARMLGLSVGTSVPGPHLSYLEIVSNKRVQRANFTSRGCTCLCKSLAYLTAATHGLDEEAESLKETFDPEKETIPDIDPNAKLLQPPAPIMPLDTNWPLLTVSKGFFEGTIASKGKGGALAADIDIDTVGTEGWGEDAELQLDEDGFVEATEGLGDDALGKGQEEGGGWDVEEDLELPPELDISPGAAGGAEDGFFVPPTKGTSPTQIWCNNSQLPVDHILAGSFETAMRLLHDQVGVIQFGPYKQLFLQTYARGRTTYQALPCLPSMYGYPNRNWKDAGLKNGVPAVGLKLNDLIQRLQLCYQLTTVGKFEEAVEKFRSILLSVPLLVVDNKQEIAEAQQLITICREYIVGLSVETERKKLPKETLEQQKRICEMAAYFTHSNLQPVHMILVLRTALNLFFKLKNFKTAATFARRLLELGPKPEVAQQTRKILSACEKNPTDAYQLNYDMHNPFDICAASYRPIYRGKPVEKCPLSGACYSPEFKGQICRVTTVTEIGKDVIGLRISPLQFR

SEQ ID NO: 877848 - protein, 1150 aa, Homo sapiens
MLTKFETKSARVKGLSFHPKRPWILTSLHNGVIQLWDYRMCTLIDKFDEHDGPVRGIDFHKQQPLFVSGGDDYKIKVWNYKLRRCLFTLLGHLDYIRTTFFHHEYPWILSASDDQTIRVWNWQSRTCVCVLTGHNHYVMCAQFHPTEDLVVSASLDQTVRVWDISGLRKKNLSPGAVESDVRGITGVDLFGTTDAVVKHVLEGHDRGVNWAAFHPTMPLIVSGADDRQVKIWRMNESKAWEVDTCRGHYNNVSCAVFHPRQELILSNSEDKSIRVWDMSKRTGVQTFRRDHDRFWVLAAHPNLNLFAAGHDGGMIVFKLERERPAYAVHGNMLHYVKDRFLRQLDFNSSKDVAVMQLRSGSKFPVFNMSYNPAENAVLLCTRASNLENSTYDLYTIPKDADSQNPDAPEGKRSSGLTAVWVARNRFAVLDRMHSLLIKNLKNEITKKVQVPNCDEIFYAGTGNLLLRDADSITLFDVQQKRTLASVKISKVKYVIWSADMSHVALLAKHAIVICNRKLDALCNIHENIRVKSGAWDESGVFIYTTSNHIKYAVTTGDHGIIRTLDLPIYVTRVKGNNVYCLDRECRPRVLTIDPTEFKFKLALINRKYDEVLHMVRNAKLVGQSIIAYLQKKGYPEVALHFVKDEKTRFSLALECGNIEIALEAAKALDDKNCWEKLGEVALLQGNHQIVEMCYQRTKNFDKLSFLYLITGNLEKLRKMMKIAEIRKDMSGHYQNALYLGDVSERVRILKNCGQKSLAYLTAATHGLDEEAESLKETFDPEKETIPDIDPNAKLLQPPAPIMPLDTNWPLLTVSKGFFEGTIASKGKGGALAADIDIDTVGTEGWGEDAELQLDEDGFVEATEGLGDDALGKGQEEGGGWDVEEDLELPPELDISPGAAGGAEDGFFVPPTKGTSPTQIWCNNSQLPVDHILAGSFETAMRLLHDQVGVIQFGPYKQLFLQTYARGRTTYQALPCLPSMYGYPNRNWKDAGLKNGVPAVGLKLNDLIQRLQLCYQLTTVGKFEEAVEKFRSILLSVPLLVVDNKQEIAEAQQLITICREYIVGLSVETERKKLPKETLEQQKRICEMAAYFTHSNLQPVHMILVLRTALNLFFKLKNFKTAATFARRLLELGPKPEVAQQNPLNPLVNKK

SEQ ID NO: 877849 - protein, 246 aa, Homo sapiens [sequence omitted]

SEQ ID NO: 877850 - protein, 556 aa, Homo sapiens
MLTKFETKSARVKGLSFHPKRPWILTSLHNGVIQLWDYRMCTLIDKFDEHDGPVRGIDFHKQQPLFVSGGDDYKIKVWNYKLRRCLFTLLGHLDYIRTTFFHHEYPWILSASDDQTIRVWNWQSRTCVCVLTGHNHYVMCAQFHPTEDLVVSASLDQTVRVWDISGLRKKNLSPGAVESDVRGITGVDLFGTTDAVVKHVLEGHDRGVNWAAFHPTMPLIVSGADDRQVKIWRMNESKAWEVDTCRGHYNNVSCAVFHPRQELILSNSEDKSIRVWDMSKRTGVQTFRRDHDRFWVLAAHPNLNLFAAGHDGGMIVFKLERERPAYAVHGNMLHYVKDRFLRQLDFNSSKDVAVMQLRSGSKFPVFNMSYNPAENAVLLCTRASNLENSTYDLYTIPKDADSQNPDAPEGKRSSGLTAVWVARNRFAVLDRMHSLLIKNLKNEITKKVQVPNCDEIFYAGTGNLLLRDADSITLFDVQQKRTLASVKISKVKYVIWSADMSHVALLAKHAIVICNRKLDALCNIHENIRVKSGAWDESGVFIYTTSNHIKYAVTTG

SEQ ID NO: 877851 - protein, 463 aa, Homo sapiens
MLTKFETKSARVKGLSFHPKRPWILTSLHNGVIQLWDYRMCTLIDKFDEHDGPVRGIDFHKQQPLFVSGGDDYKIKVWNYKLRRCLFTLLGHLDYIRTTFFHHEYPWILSASDDQTIRVWNWQSRTCVCVLTGHNHYVMCAQFHPTEDLVVSASLDQTVRVWDISGLRKKNLSPGAVESDVRGITGVDLFGTTDAVVKHVLEGHDRGVNWAAFHPTMPLIVSGADDRQVKIWRMNESKAWEVDTCRGHYNNVSCAVFHPRQELILSNSEDKSIRVWDMSKRTGVQTFRRDHDRFWVLAAHPNLNLFAAGHDGGMIVFKLERERPAYAVHGNMLHYVKDRFLRQLDFNSSKDVAVMQLRSGSKFPVFNMSYNPAENAVLLCTRASNLENSTYDLYTIPKDADSQNPDGKCSFCLPHSASSSPHPHHNSSSSFSHSIPKPWPHHSCLLAGAADNCIRGDHGVKYS

SEQ ID NO: 877852 - protein, 210 aa, Homo sapiens [sequence omitted]

SEQ ID NO: 877853 - protein, 129 aa, Homo sapiens
MLTKFETKSARVKGLSFHPKRPWILTSLHNGVIQLWDYRMCTLIDKFDEHDGPVRGIDFHKQQPLFVSGGDDYKIKVWNYKLRRCLFTLLGHLDYIRTTFFHHEYPWILSASDDQTIRVWNWQSRTCVW

SEQ ID NO: 877854 - protein, 73 aa, Homo sapiens
GTGEGAPQTRTTLGVAENRESWLRQLDKHSQATAQQLVQLLSKQNQLLLERQSLSEEVDRLRTQLPSMPQSDC

SEQ ID NO: 877855 - protein, 231 aa, Homo sapiens
SSVRDSRLPCDSRGRKQAGAPRPQACCSRKGESRTFPHVTPSSGPRVRAWRSPRRTLPWRRFWGSINGVSGEELSGMKNKIQVVVLENEGLQQQLKSQRQEETLREQTLLDASGNMHNSWITTGEDSGVGETSKRPFSHDNADFGKAASAGEQLELEKLKLTYEEKCEIEESQLKFLRERDDLMSALVSVRSSLADTQQREASAYEQVKQVLQISEEANFEKTKASLIRCK

SEQ ID NO: 877856 - protein, 713 aa, Homo sapiens
MAKSPENSTLEEILGQYQRSLREHASRSIHQLTCALKEGDVTIGEDAPNLSFSTSVGNEDARTAWPELQQSHAVNQLKDLLRQQADKESEVSPSRRRKMSPLRSLEHEETNMPTMHDLVHTINDQSQYIHHLEAEVKFCKEELSGMKNKIQVVVLENEGLQQQLKSQRQEETLREQTLLDASGNMHNSWITTGEDSGVGETSKRPFSHDNADFGKAASAGEQLELEKLKLTYEEKCEIEESQLKFLRNDLAEYQRTCEDLKEQLKHKEFLLAANTCNRVGGLCLKCAQHEAVLSQTHTNVHMQTIERLVKERDDLMSALVSVRSSLADTQQREASAYEQVKQVLQISEEANFEKTKALIQCDQLRKELERQAERLEKELASQQEKRAIEKDMMKKEITKEREYMGSKMLILSQNIAQLEAQVEKVTKEKISAINQLEEIQSQLASREMDVTKVCGEMRYQLNKTNMEKDEAEKEHREFRAKTNRDLEIKDQEIEKLRIELDESKQHLEQEQQKAALAREECLRLTELLGESEHQLHLTRQEKDSIQQSFSKEAKAQALQAQQREQELTQKIQQMEAQHDKTENEQYLLLTSQNTFLTKLKEECCTLAKKLEQISQKTRSEIAQLSQEKRYTYDKLGKLQRRNEELEEQCVQHGRVHETMKQRLRQLDKHSQATAQQLVQLLSKQNQLLLERQSLSEEVDRLRTQLPSMPQSDC

SEQ ID NO: 877857 - protein, 666 aa, Homo sapiens
MAKSPENSTLEEILGQYQRSLREHASRSIHQLTCALKEGDVTIGEDAPNLSFSTSVGNEDARTAWPELQQSHAVNQLKDLLRQQADKESEVSPSRRRKMSPLRSLEHEETNMPTMHDLVHTINDQSQYIHHLEAEVKFCKEELSGMKNKIQVVVLENEGLQQQLKSQRQEETLREQTLLDASGNMHNSWITTGEDSGVGETSKRPFSHDNADFGKAASAGEQLELNFLIISNKKSGRIKQYLHSPPCQPLMTSLQLSEKLKLTYEEKCEIEESQLKFLRNDLAEYQRTCEDLKEQLKHKEFLLAANTCNRVGGLCLKCAQHEAVLSQTHTNVHMQTIERLVKERDDLMSALVSVRSSLADTQQREASAYEQVKQVLQISEEANFEKTKALIQCDQLRKELERQAERLEKELASQQEKRAIEKDMMKKEITKEREYMGSKMLILSQNIAQLEAQVEKVTKEKISAINQLEEIQSQLASREMDVTKVCGEMRYQLNKTNMEKDEAEKEHREFRAKTNRDLEIKDQEIEKLRIELDESKQHLEQEQQKAALAREECLRLTELLGESEHQLHLTRSEIAQLSQEKRYTYDKLGKLQRRNEELEEQCVQHGRVHETMKQRLRQLDKHSQATAQQLVQLLSKQNQLLLERQSLSEEVDRLRTQLPSMPQSDC

SEQ ID NO: 877858 - protein, 677 aa, Homo sapiens
MAKSPENSTLEEILGQYQRSLREHASRSIHQLTCALKEGDVTIGEDAPNLSFSTSVGNEDARTAWPELQQSHAVNQLKDLLRQQADKESEVSPSRRRKMSPLRSLEHEETNMPTMHDLVHTINDQSQYIHHLEAEVKFCKEELSGMKNKIQVVVLENEGLQQQLKSQRQEETLREQTLLDASGNMHNSWITTGEDSGVGETSKRPFSHDNADFGKAASAGEQLELEKLKLTYEEKCEIEESQLKFLRNDLAEYQRTCEDLKEQLKHKEFLLAANTCNRVGGLCLKCAQHEAVLSQTHTNVHMQTIERLVKERDDLMSALVSVRSSLADTQQREASAYEQVKQVLQISEEANFEKTKALIQCDQLRKELERQAERLEKELASQQEKRAIEKDMMKKEITKEREYMGSKMLILSQNIAQLEAQVEKVTKEKISAINQLEEIQSQLASREMDVTKVCGEMRYQLNKTNMEKDEAEKEHREFRAKTNRDLEIKDQEIEKLRIELDESKQHLEQEQQKAALAREECLRLTELLGESEHQLHLTRQEKDSIQQSFSKEAKAQALQAQQREQELTQKIQQMEAQHDKTENEQYLLLTSQNTFLTKLKEECCTLAKKLEQISQKTRSEIAQLSQEKRYTYDKLGKLQRRNEELEEQCVQHGRVHETMKQSYPACHNLIADLDGTE

SEQ ID NO: 877859 - protein, 431 aa, Homo sapiens
LPSVWASLRRREMVRSGARPGQEKLKLTYEEKCEIEESQLKFLRNDLAEYQRTCEDLKEQLKHKEFLLAANTCNRVGGLCLKCAQHEAVLSQTHTNVHMQTIERLVKERDDLMSALVSVRSSLADTQQREASAYEQVKQVLQISEEANFEKTKALIQCDQLRKELERQAERLEKELASQQEKRAIEKDMMKKEITKEREYMGSKMLILSQNIAQLEAQVEKVTKEKISAINQLEEIQSQLASREMDVTKVCGEMRYQLNKTNMEKDEAEKEHREFRAKTNRDLEIKDQEIEKLRIELDESKQHLEQEQQKAALAREECLRLTELLGESEHQLHLTRSEIAQLSQEKRYTYDKLGKLQRRNEELEEQCVQHGRVHETMKQRLRQLDKHSQATAQQLVQLLSKQNQLLLERQSLSEEVDRLRTQLPSMPQSDC

SEQ ID NO: 877860 - protein, 398 aa, Homo sapiens
MSALVSVRSSLADTQQREASAYEQVKQVLQISEEANFEKTKALIQCDQLRKELERQAERLEKELASQQEKRAIEKDMMKKEITKEREYMGSKMLILSQNIAQLEAQVEKVTKEKISAINQLEEIQSQLASREMDVTKVCGEMRYQLNKTNMEKDEAEKEHREFRAKTNRDLEIKDQEIEKLRIELDESKQHLEQEQQKAALAREECLRLTELLGESEHQLHLTRQEKDSIQQSFSKEAKAQALQAQQREQELTQKIQQMEAQHDKTENEQYLLLTSQNTFLTKLKEECCTLAKKLEQISQKTRSEIAQLSQEKRYTYDKLGKLQRRNEELEEQCVQHGRVHETMKQRLRQLDKHSQATAQQLVQLLSKQNQLLLERQSLSEEVDRLRTQLPSMPQSDC

SEQ ID NO: 877861 - protein, 239 aa, Homo sapiens
  misc_feature (7)..(8): Xaa can be any naturally occurring amino acid
PPPLSLXXLSGSGFTDQEIEKLRIELDESKQHLEQEQQKAALAREECLRLTELLGESEHQLHLTRQEKDSIQQSFSKEAKAQALQAQQREQELTQKIQQMEAQHDKTENEQYLLLTSQNTFLTKLKEECCTLAKKLEQISQKTRSEIAQLSQEKRYTYDKLGKLQRRNEELEEQCVQHGRVHETMKQRLRQLDKHSQATAQQLVQLLSKQNQLLLERQSLSEEVDRLRTQLPSMPQSDC

SEQ ID NO: 877862 - protein, 360 aa, Homo sapiens
IRNESQEMQKGTDTSQQRKLKGFGYKWRGSQHISGRKKVDEDMIMKEREYMGSKMLILSQNIAQLEAQVEKVTKEKISAINQLEEIQSQLASREMDVTKVCGEMRYQLNKTNMEKDEAEKEHREFRAKTNRDLEIKDQEIEKLRIELDESKQHLEQEQQKAALAREECLRLTELLGESEHQLHLTRQEKDSIQQSFSKEAKAQALQAQQREQELTQKIQQMEAQHDKTENEQYLLLTSQNTFLTKLKEECCTLAKKLEQISQKTRSEIAQLSQEKRYTYDKLGKLQRRNEELEEQCVQHGRVHETMKQRLRQLDKHSQATAQQLVQLLSKQNQLLLERQSLSEEVDRLRTQLPSMPQSDC

SEQ ID NO: 877863 - protein, 246 aa, Homo sapiens
PRPQPTNQNLEIKKKFRGNKNRDFEIEKLRIELDESKQHLEQEQQKAALAREECLRLTELLGESEHQLHLTRQEKDSIQQSFSKEAKAQALQAQQREQELTQKIQQMEAQHDKTENEQYLLLTSQNTFLTKLKEECCTLAKKLEQISQKTRSEIAQLSQEKRYTYDKLGKLQRRNEELEEQCVQHGRVHETMKQRLRQLDKHSQATAQQLVQLLSKQNQLLLERQSLSEEVDRLRTQLPSMPQSDC

SEQ ID NO: 877864 - protein, 363 aa, Homo sapiens
MAKSPENSTLEEILGQYQRSLREHASRSIHQLTCALKEGDVTIGEDAPNLSFSTSVGNEDARTAWPELQQSHAVNQLKDLLRQQADKESEVSPSRRRKMSPLRSLEHEETNMPTMHDLVHTINDQSQYIHHLEAEVKFCKEELSGMKNKIQVVVLENEGLQQQLKSQRQEETLREQTLLDASGNMHNSWITTGEDSGVGETSKRPFSHDNADFGKAASAGEQLELEKLKLTYEEKCEIEESQLKFLRNDLAEYQRTCEDLKEQLKHKEFLLAANTCNRVGGLCLKCAQHEAVLSQTHTNVHMQTIERLVKERDDLMSALVSVRSSLADTQQREASAYEQVKQVLQISEEANFEKTKASLIRCK

SEQ ID NO: 877865 - protein, 221 aa, Homo sapiens
SSVRDSRLPCDSRGRKQAGAPRPQACCSRKGESRTFPHVTPSSGPRVRAWRSPRRTLPWRRFWGSINGVSGEELSGMKNKIQVVVLENEGLQQQLKSQRQEETLREQTLLDASGNMHNSWITTGEDSGVGETSKRPFSHDNADFGKAASAGEQLELEKLKLTYEEKCEIEESQLKFLRNKNHGRARWLTPVIPALWEAEAGESRGQEIETILANMVKPRFY

SEQ ID NO: 877866 - protein, 634 aa, Homo sapiens
MAKSPENSTLEEILGQYQRSLREHASRSIHQLTCALKEGDVTIGEDAPNLSFSTSVGNEDARTAWPELQQSHAVNQLKDLLRQQADKESEVSPSRRRKMSPLRSLEHEETNMPTMHDLVHTINDQSQYIHHLEAEVKFCKEELSGMKNKIQVVVLENEGLQQQLKSQRQEETLREQTLLDASGNMHNSWITTGEDSGVGETSKRPFSHDNADFGKAASAGEQLELEKLKLTYEEKCEIEESQLKFLRNDLAEYQRTCEDLKEQLKHKEFLLAANTCNRVGGLCLKCAQHEAVLSQTHTNVHMQTIERLVKERDDLMSALVSVRSSLADTQQREASAYEQVKQVLQISEEANFEKTKALIQCDQLRKELERQAERLEKELASQQEKRAIEKDMMKKEITKEREYMGSKMLILSQNIAQLEAQVEKVTKEKISAINQLEEIQSQLASREMDVTKVCGEMRYQLNKTNMEKDEAEKEHREFRAKTNRDLEIKDQEIEKLRIELDESKQHLEQEQQKAALAREECLRLTELLGESEHQLHLTRSEIAQLSQEKRYTYDKLGKLQRRNEELEEQCVQHGRVHETMKQRLRQLDKHSQATAQQLVQLLSKQNQLLLERQSLSEEVDRLRTQLPSMPQSDC

SEQ ID NO: 877867 - protein, 641 aa, Homo sapiens
MAKSPENSTLEEILGQYQRSLREHASRSIHQLTCALKEGDVTIGEDAPNLSFSTSVGNEDARTAWPELQQSHAVNQLKDLLRQQADKESEVSPSRRRKMSPLRSLEHEETNMPTMHDLVHTINDQSQYIHHLEAEVKFCKEELSGMKNKIQVVVLENEGLQQQLKSQRQEETLREQTLLDASGNMHNSWITTGEDSGVGETSKRPFSHDNADFGKAASAGEQLELEKLKLTYEEKCEIEESQLKFLRNDLAEYQRTCEDLKEQLKHKEFLLAANTCNRVGGLCLKCAQHEAVLSQTHTNVHMQTIERLVKERDDLMSALVSVRSSLADTQQREASAYEQVKQVLQISEEANFEKTKALIQCDQLRKELERQAERLEKELASQQEKRAIEKDMMKKEITKEREYMGSKMLILSQNIAQLEAQVEKVTKEKISAINQLEEIQSQLASREMDVTKVCGEMRYQLNKTNMEKDEAEKEHREFRAKTNRDLEIKDQEIEKLRIELDESKQHLEQEQQKAALAREECLRLTELLGESEHQLHLTRQEKDSIQQSFSKEAKAQALQAQQREQELTQKIQQMEAQHDKTENEQYLLLTSQNTFLTKLKEECCTLAKKLEQISQKTRSEIAQLSQEKRNSVSSMGEYMRR

SEQ ID NO: 877868 - protein, 591 aa, Homo sapiens
MAKSPENSTLEEILGQYQRSLREHASRSIHQLTCALKEGDVTIGEDAPNLSFSTSVGNEDARTAWPELQQSHAVNQLKDLLRQQADKESEVSPSRRRKMSPLRSLEHEETNMPTMHDLVHTINDQSQYIHHLEAEVKFCKEELSGMKNKIQVVVLENEGLQQQLKSQRQEETLREQTLLDASEKLKLTYEEKCEIEESQLKFLRNDLAEYQRTCEDLKEQLKHKEFLLAANTCNRVGGLCLKCAQHEAVLSQTHTNVHMQTIERLVKERDDLMSALVSVRSSLADTQQREASAYEQVKQVLQISEEANFEKTKALIQCDQLRKELERQAERLEKELASQQEKRAIEKDMMKKEITKEREYMGSKMLILSQNIAQLEAQVEKVTKEKISAINQLEEIQSQLASREMDVTKVCGEMRYQLNKTNMEKDEAEKEHREFRAKTNRDLEIKDQEIEKLRIELDESKQHLEQEQQKAALAREECLRLTELLGESEHQLHLTRSEIAQLSQEKRYTYDKLGKLQRRNEELEEQCVQHGRVHETMKQRLRQLDKHSQATAQQLVQLLSKQNQLLLERQSLSEEVDRLRTQLPSMPQSDC

SEQ ID NO: 877869 - protein, 412 aa, Homo sapiens
MQTIERLVKERDDLMSALVSVRSSLADTQQREASAYEQVKQVLQISEEANFEKTKALIQCDQLRKELERQAERLEKELASQQEKRAIEKDMMKKEITKEREYMGSKMLILSQNIAQLEAQVEKVTKEKISAINQLEEIQSQLASREMDVTKVCGEMRYQLNKTNMEKDEAEKEHREFRAKTNRDLEIKDQEIEKLRIELDESKQHLEQEQQKAALAREECLRLTELLGESEHQLHLTRQEKDSIQQSFSKEAKAQALQAQQREQELTQKIQQMEAQHDKTENEQYLLLTSQNTFLTKLKEECCTLAKKLEQISQKTRSEIAQLSQEKRYTYDKLGKLQRRNEELEEQCVQHGRVHETMKQRLRQLDKHSQATAQQLVQLLSKQNQLLLERQSLSEEVDRLRTQLPSMPQSDC

SEQ ID NO: 877870 - protein, 322 aa, Homo sapiens [sequence omitted]

SEQ ID NO: 877871 - protein, 225 aa, Homo sapiens
MNHEIEKLRIELDESKQHLEQEQQKAALAREECLRLTELLGESEHQLHLTRQEKDSIQQSFSKEAKAQALQAQQREQELTQKIQQMEAQHDKTENEQYLLLTSQNTFLTKLKEECCTLAKKLEQISQKTRSEIAQLSQEKRYTYDKLGKLQRRNEELEEQCVQHGRVHETMKQRLRQLDKHSQATAQQLVQLLSKQNQLLLERQSLSEEVDRLRTQLPSMPQSDC

SEQ ID NO: 877872 - protein, 360 aa, Homo sapiens
MAKSPENSTLEEILGQYQRSLREHASRSIHQLTCALKEGDVTIGEDAPNLSFSTSVGNEDARTAWPELQQSHAVNQLKDLLRQQADKESEVSPSRRRKMSPLRSLEHEETNMPTMHDLVHTINDQSQYIHHLEAEVKFCKEELSGMKNKIQVVVLENEGLQQQLKSQRQEETLREQTLLDASGNMHNSWITTGEDSGVGETSKRPFSHDNADFGKAASAGEQLELEKLKLTYEEKCEIEESQLKFLRNDLAEYQRTCEDLKEQLKHKEFLLAANTCNRVGGLCLKCAQHEAVLSQTHTNVHMQTIERLVKERDDLMSALVSVRSSLADTQQREASAYEQVKQVLQISEEANFEKTKHPSQ

SEQ ID NO: 877873 - protein, 290 aa, Homo sapiens
MAKSPENSTLEEILGQYQRSLREHASRSIHQLTCALKEGDVTIGEDAPNLSFSTSVGNEDARTAWPELQQSHAVNQLKDLLRQQADKESEVSPSRRRKMSPLRSLEHEETNMPTMHDLVHTINDQSQYIHHLEAEVKFCKEELSGMKNKIQVVVLENEGLQQQLKSQRQEETLREQTLLDASGNMHNSWITTGEDSGVGETSKRPFSHDNADFGKAASAGEQLELEKLKLTYEEKCEIEESQLKFLRNKNHGRARWLTPVIPALWEAEAGESRGQEIETILANMVKPRFY

SEQ ID NO: 877874 - protein, 110 aa, Homo sapiens
GSAGLGVLGRDGERGGWAGARGAVSFPHAAPRARASTSSLTERCGAGDPWRARGGTVARPAWAQRVASAVSGCAGWKIRLPGHAVPAERPQLRGSALVLPARSRVAARAR

SEQ ID NO: 877875 - protein, 1980 aa, Homo sapiens
MNPTNPFSGQQPSAFSASSSNVGTLPSKPPFRFGQPSLFGQNSTLSGKSSGFSQVSSFPASSGVSHSSSVQTLGFTQTSSVGPFSGLEHTSTFVATSGPSSSSVLGNTGFSFKSPTSVGAFPSTSAFGQEAGEIVNSGFGKTEFSFKPLENAVFKPILGAESEPEKTQSQIASGFFTFSHPISSAPGGLAPFSFPQVTSSSATTSNFTFSKPVSSNNSLSAFTPALSNQNVEEEKRGPKSIFGSSNNSFSSFPVSSAVLGEPFQASKAGVRQGCEEAVSQVEPLPSLMKGLKRKEDQDRSPRRHGHEPAEDSDPLSRGDHPPDKRPVRLNRPRGGTLFGRTIQDVFKSNKEVGRLGNKEAKKETGFVESAESDHMAIPGGNQSVLAPSRIPGVNKEEETESREKKEDSLRGTPARQSNRSESTDSLGGLSPSEVTAIQCKNIPDYLNDRTILENHFGKIAKVQRIFTRRSKKLAVVHFFDHASAALARKKGKSLHKDMAIFWHRKKISPNKKPFSLKEKKPGDGEVSPSTEDAPFQHSPLGKAAGRTGASSLLNKSSPVKKPSLLKAHQFEGDSFDSASEGSEGLGPCVLSLSTLIGTVAETSKEKYRLLDQRDRIMRQARVKRTDLDKARTFVGTCLDMCPEKERYMRETRSQLSVFEVVPGTDQVDHAAAVKEYSRSSADQEEPLPHELRPLPVLSRTMDYLVTQIMDQKEGSLRDWYDFVWNRTRGIRKDITQQHLCDPLTVSLIEKCTRFHIHCAHFMCEEPMSSFDAKINNENMTKCLQSLKEMYQDLRNKGVFCASEAEFQGYNVLLSLNKGDILREVQQFHPAVRNSSEVKFAVQAFAALNSNNFVRFFKLVQSASYLNACLLHCYFSQIRKDALRALNFAYTVSTQRSTIFPLDGVVRMLLFRDCEEATDFLTCHGLTVSDGCVELNRSAFLEPEGLSKTRKSVFITRKLTVSVGEIVNGGPLPPVPRHTPVCSFNSQNKYIGESLAAELPVSTQRPGSDTVGGGRGEECGVEPDAPLSSLPQSLPAPAPSPVPLPPVLALTPSVAPSLFQLSVQPEPPPPEPVPMYSDEDLAQVVDELIQEALQRDCEEVGSAGAAYAAAALGVSNAAMEDLLTAATTGILRHIAAEEVSKERERREQERQRAEEERLKQERELVLSELSQGLAVELMERVMMEFVRETCSQELKNAVETDQRVRVARCCEDVCAHLVDLFLVEEIFQTAKETLQELQCFCKYLQRWREAVTARKKLRRQMRAFPAAPCCVDVSDRLRALAPSAECPIAEENLARGLLDLGHAGRLGISCTRLRRLRNKTAHQMKVQHFYQQLLSDVAWASLDLPSLVAEHLPGRQEHVFWKLVLVLPDVEEQSPESCGRILANWLKVKFMGDEGSVDDTSSDAGGIQTLSLFNSLSSKGDQMISVNVCIKVAHGALSDGAIDAVETQKDLLGASGLMLLLPPKMKSEDMAEEDVYWLSALLQLKQLLQAKPFQPALPLVVLVPSPGGDAVEKEVEDGLMLQDLVSAKLISDYTVTEIPDTINDLQGSTKVLQAVQWLVSHCPHSLDLCCQTLIQYVEDGIGHEFSGRFFHDRRERRLGGLASQEPGAIIELFNSVLQFLASVVSSEQLCDLSWPVTEFAEAGGSRLLPHLHWNAPEHLAWLKQAVLGFQLPQMDLPPLGAPWLPVCSMVVQYASQIPSSRQTQPVLQSQVENLLHRTYCRWKSKSPSPVHGAGPSVMEIPWDDLIALCINHKLRDWTPPRLPVTSEALSEDGQICVYFFKNDLKKYDVPLSWEQARLQTQKELQLREGRLAIKPFHPSANNFPIPLLHMHRNWKRSTECAQEGRIPSTEDLMRGASAEELLAQCLSSSLLLEKEENKRFEDQLQQWLSEDSGAFTDLTSLPLYLPQTLVSLSHTIEPVMKTSVTTSPQSDMMREQLQLSEATGTCLGERLKHLERLIRSSREEEVASELHLSALLDMVDI

SEQ ID NO: 877876 - protein, 721 aa, Homo sapiens
MRAFPAAPCCVDVSDRLRALAPSAECPIAEENLARGLLDLGHAGRLGISCTRLRRLRNKTAHQMKVQHFYQQLLSDVAWASLDLPSLVAEHLPGRQEHVFWKLVLVLPDVEEQSPESCGRILANWLKVKFMGDEGSVDDTSSDAGGIQTLSLFNSLSSKGDQMISVNVCIKVAHGALSDGAIDAVETQKDLLGASGLMLLLPPKMKSEDMAEEDVYWLSALLQLKQLLQAKPFQPALPLVVLVPSPGGDAVEKEVEDGLMLQDLVSAKLISDYTVTEIPDTINDLQGSTKVLQAVQWLVSHCPHSLDLCCQTLIQYVEDGIGHEFSGRFFHDRRERRLGGLASQEPGAIIELFNSVLQFLASVVSSEQLCDLSWPVTEFAEAGGSRLLPHLHWNAPEHLAWLKQAVLGFQLPQMDLPPLGAPWLPVCSMVVQYASQIPSSRQTQPVLQSQVENLLHRTYCRWKSKSPSPVHGAGPSVMEIPWDDLIALCINHKLRDWTPPRLPVTSEALSEDGQICVYFFKNDLKKYDVPLSWEQARLQTQKELQLREGRLAIKPFHPSANNFPIPLLHMHRNWKRSTECAQEGRIPSTEDLMRGASAEELLAQCLSSSLLLEKEENKRFEDQLQQWLSEDSGAFTDLTSLPLYLPQTLVSLSHTIEPVMKTSVTTSPQSDMMREQLQLSEATGTCLGERLKHLERLIRSSREEEVASELHLSALLDMVDI

SEQ ID NO: 877877 - protein, 2252 aa, Homo sapiens
MNPTNPFSGQQPSAFSASSSNVGTLPSKPPFRFGQPSLFGQNSTLSGKSSGFSQVSSFPASSGVSHSSSVQTLGFTQTSSVGPFSGLEHTSTFVATSGPSSSSVLGNTGFSFKSPTSVGAFPSTSAFGQEAGEIVNSGFGKTEFSFKPLENAVFKPILGAESEPEKTQSQIASGFFTFSHPISSAPGGLAPFSFPQVTSSSATTSNFTFSKPVSSNNSLSAFTPALSNQNVEEEKRGPKSIFGSSNNSFSSFPVSSAVLGEPFQASKAGVRQGCEEAVSQVEPLPSLMKGLKRKEDQDRSPRRHGHEPAEDSDPLSRGDHPPDKRPVRLNRPRGGTLFGRTIQDVFKSNKEVGRLGNKEAKKETGFVESAESDHMAIPGGNQSVLAPSRIPGVNKEEETESREKKEDSLRGTPARQSNRSESTDSLGGLSPSEVTAIQCKNIPDYLNDRTILENHFGKIAKVQRIFTRRSKKLAVVHFFDHASAALARKKGKSLHKDMAIFWHRKKISPNKKPFSLKEKKPGDGEVSPSTEDAPFQHSPLGKAAGRTGASSLLNKSSPVKKPSLLKAHQFEGDSFDSASEGSEGLGPCVLSLSTLIGTVAETSKEKYRLLDQRDRIMRQARVKRTDLDKARTFVGTCLDMCPEKERYMRETRSQLSVFEVVPGTDQVDHAAAVKEYSRSSADQEEPLPHELRPLPVLSRTMDYLVTQIMDQKEGSLRDWYDFVWNRTRGIRKDITQQHLCDPLTVSLIEKCTRFHIHCAHFMCEEPMSSFDAKINNENMTKCLQSLKEMYQDLRNKGVFCASEAEFQGYNVLLSLNKGDILREVQQFHPAVRNSSEVKFAVQAFAALNSNNFVRFFKLVQSASYLNACLLHCYFSQIRKDALRALNFAYTVSTQRSTIFPLDGVVRMLLFRDCEEATDFLTCHGLTVSDGYRAENGTVGPLSPFFLLILMKGCEGLAACLTGRRCIPSAMQVNTRDSEWLGVFPRSHPGCQHIEGSDQVLCDSKISPFHDLLTNLKIKVRAFFILSLDCLCQPMTDNLLTAGMEAPAGQPESSPVLTSQSGETHRRSLRNWQLTLNTRCLVPHPVSSNSSPASCLSPLPVLSPSSSVSSFQFCPQKIRRFWVSQQGGRSESACVCYTLGLVVLGTYRGSRVGGSGTWRLCFLSFTHGCGDTQGACSTRQGTEGEAVFSPGDTPRGSFVVLGSCVELNRSAFLEPEGLSKTRKSVFITRKLTVSVGEIVNGGPLPPVPRHTPVCSFNSQNKYIGESLAAELPVSTQRPGSDTVGGGRGEECGVEPDAPLSSLPQSLPAPAPSPVPLPPVLALTPSVAPSLFQLSVQPEPPPPEPVPMYSDEDLAQVVDELIQEALQRDCEEVGSAGAAYAAAALGVSNAAMEDLLTAATTGILRHIAAEEVSKERERREQERQRAEEERLKQERELVLSELSQGLAVELMERVMMEFVRETCSQELKNAVETDQRVRVARCCEDVCAHLVDLFLVEEIFQTAKETLQELQCFCKYLQRWREAVTARKKLRRQMRAFPAAPCCVDVSDRLRALAPSAECPIAEENLARGLLDLGHAGRLGISCTRLRRLRNKTAHQMKVQHFYQQLLSDVAWASLDLPSLVAEHLPGRQEHVFWKLVLVLPDVEEQSPESCGRILANWLKVKFMGDEGSVDDTSSDAGGIQTLSLFNSLSSKGDQMISVNVCIKVAHGALSDGAIDAVETQKDLLGASGLMLLLPPKMKSEDMAEEDVYWLSALLQLKQLLQAKPFQPALPLVVLVPSPGGDAVEKEVEDGLMLQDLVSAKLISDYTVTEIPDTINDLQGSTKVLQAVQWLVSHCPHSLDLCCQTLIQYVEDGIGHEFSGRFFHDRRERRLGGLASQEPGAIIELFNSVLQFLASVVSSEQLCDLSWPVTEFAEAGGSRLLPHLHWNAPEHLAWLKQAVLGFQLPQMDLPPLGAPWLPVCSMVVQYASQIPSSRQTQPVLQSQVENLLHRTYCRWKSKSPSPVHGAGPSVMEIPWDDLIALCINHKLRDWTPPRLPVTSEALSEDGQICVYFFKNDLKKYDVPLSWEQARLQTQKELQLREGRLAIKPFHPSANNFPIPLLHMHRNWKRSTECAQEGRIPSTEDLMRGASAEELLAQCLSSSLLLEKEENKRFEDQLQQWLSEDSGAFTDLTSLPLYLPQTLVSLSHTIEPVMKTSVTTSPQSDMMREQLQLSEATGTCLGERLKHLERLIRSSREEEVASELHLSALLDMVDI

SEQ ID NO: 877878 - protein, 1074 aa, Homo sapiens [sequence omitted]

SEQ ID NO: 877879 - protein, 1058 aa, Homo sapiens
MIGPVPGLISYGAGLGIQIGVTPKDSQKSVFITRKLTVSVGEIVNGGPLPPVPRHTPVCSFNSQNKYIGESLAAELPVSTQRPGSDTVGGGRGEECGVEPDAPLSSLPQSLPAPAPSPVPLPPVLALTPSVAPSLFQLSVQPEPPPPEPVPMYSDEDLAQVVDELIQEALQRDCEEVGSAGAAYAAAALGVSNAAMEDLLTAATTGILRHIAAEEVSKERERREQERQRAEEERLKQERELVLSELSQGLAVELMERVMMEFVRETCSQELKNAVETDQRVRVARCCEDVCAHLVDLFLVEEIFQTAKETLQELQCFCKYLQRWREAVTARKKLRRQMRAFPAAPCCVDVSDRLRALAPSAECPIAEENLARGLLDLGHAGRLGISCTRLRRLRNKTAHQMKVQHFYQQLLSDVAWASLDLPSLVAEHLPGRQEHVFWKLVLVLPDVEEQSPESCGRILANWLKVKFMGDEGSVDDTSSDAGGIQTLSLFNSLSSKGDQMISVNVCIKVAHGALSDGAIDAVETQKDLLGASGLMLLLPPKMKSEDMAEEDVYWLSALLQLKQLLQAKPFQPALPLVVLVPSPGGDAVEKEVEDGLMLQDLVSAKLISDYTVTEIPDTINDLQGSTKVLQAVQWLVSHCPHSLDLCCQTLIQYVEDGIGHEFSGRFFHDRRERRLGGLASQEPGAIIELFNSVLQFLASVVSSEQLCDLSWPVTEFAEAGGSRLLPHLHWNAPEHLAWLKQAVLGFQLPQMDLPPLGAPWLPVCSMVVQYASQIPSSRQTQPVLQSQVENLLHRTYCRWKSKSPSPVHGAGPSVMEIPWDDLIALCINHKLRDWTPPRLPVTSEALSEDGQICVYFFKNDLKKYDVPLSWEQARLQTQKELQLREGRLAIKPFHPSANNFPIPLLHMHRNWKRSTECAQEGRIPSTEDLMRGASAEELLAQCLSSSLLLEKEENKRFEDQLQQWLSEDSGAFTDLTSLPLYLPQTLVSLSHTIEPVMKTSVTTSPQSDMMREQLQLSEATGTCLGERLKHLERLIRSSREEEVASELHLSALLDMVDI

SEQ ID NO: 877880 - protein, 1028 aa, Homo sapiens
MYTRKLTVSVGEIVNGGPLPPVPRHTPVCSFNSQNKYIGESLAAELPVSTQRPGSDTVGGGRGEECGVEPDAPLSSLPQSLPAPAPSPVPLPPVLALTPSVAPSLFQLSVQPEPPPPEPVPMYSDEDLAQVVDELIQEALQRDCEEVGSAGAAYAAAALGVSNAAMEDLLTAATTGILRHIAAEEVSKERERREQERQRAEEERLKQERELVLSELSQGLAVELMERVMMEFVRETCSQELKNAVETDQRVRVARCCEDVCAHLVDLFLVEEIFQTAKETLQELQCFCKYLQRWREAVTARKKLRRQMRAFPAAPCCVDVSDRLRALAPSAECPIAEENLARGLLDLGHAGRLGISCTRLRRLRNKTAHQMKVQHFYQQLLSDVAWASLDLPSLVAEHLPGRQEHVFWKLVLVLPDVEEQSPESCGRILANWLKVKFMGDEGSVDDTSSDAGGIQTLSLFNSLSSKGDQMISVNVCIKVAHGALSDGAIDAVETQKDLLGASGLMLLLPPKMKSEDMAEEDVYWLSALLQLKQLLQAKPFQPALPLVVLVPSPGGDAVEKEVEDGLMLQDLVSAKLISDYTVTEIPDTINDLQGSTKVLQAVQWLVSHCPHSLDLCCQTLIQYVEDGIGHEFSGRFFHDRRERRLGGLASQEPGAIIELFNSVLQFLASVVSSEQLCDLSWPVTEFAEAGGSRLLPHLHWNAPEHLAWLKQAVLGFQLPQMDLPPLGAPWLPVCSMVVQYASQIPSSRQTQPVLQSQVENLLHRTYCRWKSKSPSPVHGAGPSVMEIPWDDLIALCINHKLRDWTPPRLPVTSEALSEDGQICVYFFKNDLKKYDVPLSWEQARLQTQKELQLREGRLAIKPFHPSANNFPIPLLHMHRNWKRSTECAQEGRIPSTEDLMRGASAEELLAQCLSSSLLLEKEENKRFEDQLQQWLSEDSGAFTDLTSLPLYLPQTLVSLSHTIEPVMKTSVTTSPQSDMMREQLQLSEATGTCLGERLKHLERLIRSSREEEVASELHLSALLDMVDI

SEQ ID NO: 877881 - protein, 1555 aa, Homo sapiens
MNPTNPFSGQQPSAFSASSSNVGTLPSKPPFRFGQPSLFGQNSTLSGKSSGFSQVSSFPASSGVSHSSSVQTLGFTQTSSVGPFSGLEHTSTFVATSGPSSSSVLGNTGFSFKSPTSVGAFPSTSAFGQEAGEIVNSGFGKTEFSFKPLENAVFKPILGAESEPEKTQSQIASGFFTFSHPISSAPGGLAPFSFPQVTSSSATTSNFTFSKPVSSNNSLSAFTPALSNQNVEEEKRGPKSIFGSSNNSFSSFPVSSAVLGEPFQASKAGVRQGCEEAVSQVEPLPSLMKGLKRKEDQDRSPRRHGHEPAEDSDPLSRGDHPPDKRPVRLNRPRGGTLFGRTIQDVFKSNKEVGRLGNKEAKKETGFVESAESDHMAIPGGNQSVLAPSRIPGVNKEEETESREKKEDSLRGTPARQSNRSESTDSLGGLSPSEVTAIQCKNIPDYLNDRTILENHFGKIAKVQRIFTRRSKKLAVVHFFDHASAALARKKGKSLHKDMAIFWHRKKISPNKKPFSLKEKKPGDGEVSPSTEDAPFQHSPLGKAAGRTGASSLLNKSSPVKKPSLLKAHQFEGDSFDSASEGSEGLGPCVLSLSTLIGTVAETSKEKYRLLDQRDRIMRQARVKRTDLDKARTFVGTCLDMCPEKERYMRETRSQLSVFEVVPGTDQVDHAAAVKEYSRSSADQEEPLPHELRPLPVLSRTMDYLVTQIMDQKEGSLRDWYDFVWNRTRGIRKDITQQHLCDPLTVSLIEKCTRFHIHCAHFMCEEPMSSFDAKINNENMTKCLQSLKEMYQDLRNKGVFCASEAEFQGYNVLLSLNKGDILREVQQFHPAVRNSSEVKFAVQAFAALNSNNFVRFFKLVQSASYLNACLLHCYFSQIRKDALRALNFAYTVSTQRSTIFPLDGVVRMLLFRDCEEATDFLTCHGLTVSDGCVELNRSAFLEPEGLSKTRKSVFITRKLTVSVGEIVNGGPLPPVPRHTPVCSFNSQNKYIGESLAAELPVSTQRPGSDTVGGGRGEECGVEPDAPLSSLPQSLPAPAPSPVPLPPVLALTPSVAPSLFQLSVQPEPPPPEPVPMYSDEDLAQVVDELIQEALQRDCEEVGSAGAAYAAAALGVSNAAMEDLLTAATTGILRHIAAEEVSKERERREQERQRAEEERLKQERELVLSELSQGLAVELMERVMMEFVRETCSQELKNAVETDQRVRVARCCEDVCAHLVDLFLVEEIFQTAKETLQELQCFCKYLQRWREAVTARKKLRRQMRAFPAAPCCVDVSDRLRALAPSAECPIAEENLARGLLDLGHAGRLGISCTRLRRLRNKTAHQMKVQHFYQQLLSDVAWASLDLPSLVAEHLPGRQEHVFWKLVLVLPDVEEQSPESCGRILANWLKVKFMGDEGSVDDTSSDAGGIQTLSLFNSLSSKGDQMISVNVCIKVAHGALSDGAIDAVETQKDLLGASGLMLLLPPKMKSEDMAEEDVYWLSALLQLKQLLQAKPFQPALPLVVLVPSPGGDAVEKEVEDGLMLQDLVSAKLISDYTVTEIPDTINDLQGSTKVRFHHF

SEQ ID NO: 877882 - protein, 721 aa, Homo sapiens; identical to SEQ ID NO: 877876

SEQ ID NO: 877883 - protein, 504 aa, Homo sapiens
RTDNGTTWQLLQAKPFQPALPLVVLVPSPGGDAVEKEVEDGLMLQDLVSAKLISDYTVTEIPDTINDLQGSTKVLQAVQWLVSHCPHSLDLCCQTLIQYVEDGIGHEFSGRFFHDRRERRLGGLASQEPGAIIELFNSVLQFLASVVSSEQLCDLSWPVTEFAEAGGSRLLPHLHWNAPEHLAWLKQAVLGFQLPQMDLPPLGAPWLPVCSMVVQYASQIPSSRQTQPVLQSQVENLLHRTYCRWKSKSPSPVHGAGPSVMEIPWDDLIALCINHKLRDWTPPRLPVTSEALSEDGQICVYFFKNDLKKYDVPLSWEQARLQTQKELQLREGRLAIKPFHPSANNFPIPLLHMHRNWKRSTECAQEGRIPSTEDLMRGASAEELLAQCLSSSLLLEKEENKRFEDQLQQWLSEDSGAFTDLTSLPLYLPQTLVSLSHTIEPVMKTSVTTSPQSDMMREQLQLSEATGTCLGERLKHLERLIRSSREEEVASELHLSALLDMVDI

SEQ ID NO: 877884 - protein, 1810 aa, Homo sapiens
MNPTNPFSGQQPSAFSASSSNVGTLPSKPPFRFGQPSLFGQNSTLSGKSSGFSQVSSFPASSGVSHSSSVQTLGFTQTSSVGPFSGLEHTSTFVATSGPSSSSVLGNTGFSFKSPTSVGAFPSTSAFGQEAGEIVNSGFGKTEFSFKPLENAVFKPILGAESEPEKTQSQIASGFFTFSHPISSAPGGLAPFSFPQVTSSSATTSNFTFSKPVSSNNSLSAFTPALSNQNVEEEKRGPKSIFGSSNNSFSSFPVSSAVLGEPFQASKAGVRQGCEEAVSQVEPLPSLMKGLKRKEDQDRSPRRHGHEPAEDSDPLSRGDHPPDKRPVRLNRPRGGTLFGRTIQDVFKSNKEVGRLGNKEAKKETGFVESAESDHMAIPGGNQSVLAPSRIPGVNKEEETESREKKEDSLRGTPARQSNRSESTDSLGGLSPSEVTAIQCKNIPDYLNDRTILENHFGKIAKVQRIFTRRSKKLAVVHFFDHASAALARKKGKSLHKDMAIFWHRKKISPNKKPFSLKEKKPGDGEVSPSTEDAPFQHSPLGKAAGRTGASSLLNKSSPVKKPSLLKAHQFEGDSFDSASEGSEGLGPCVLSLSTLIGTVAETSKEKYRLLDQRDRIMRQARVKRTDLDKARTFVGTCLDMCPEKERYMRETRSQLSVFEVVPGTDQVDHAAAVKEYSRSSADQEEPLPHELRPLPVLSRTMDYLVTQIMDQKEGSLRDWYDFVWNRTRGIRKDITQQHLCDPLTVSLIEKCTRFHIHCAHFMCEEPMSSFDAKINNENMTKCLQSLKEMYQDLRNKGVFCASEAEFQGYNVLLSLNKGDILREVQQFHPAVRNSSEVKFAVQAFAALNSNNFVRFFKLVQSASYLNACLLHCYFSQIRKDALRALNFAYTVSTQRSTIFPLDGVVRMLLFRDCEEATDFLTCHGLTVSDGCVELNRSAFLEPEGLSKTRKSVFITRKLTVSVGEIVNGGPLPPVPRHTPVCSFNSQNKYIGESLAAELPVSTQRPGSDTVGGGRGEECGVEPDAPLSSLPQSLPAPAPSPVPLPPVLALTPSVAPSLFQLSVQPEPPPPEPVPMYSDEDLAQVVDELIQEALQRDCEEVGSAGAAYAAAALGVSNAAMEDLLTAATTGILRHIAAEEVSKERERREQERQRAEEERLKQERELVLSELSQGLAVELMERVMMEFVRETCSQELKNAVETDQRVRVARCCEDVCAHLVDLFLVEEIFQTAKETLQELQCFCKYLQRWREAVTARKKLRRQMRAFPAAPCCVDVSDRLRALAPSAECPIAEENLARGLLDLGHAGRLGISCTRLRRLRNKTAHQMKVQHFYQQLLSDVAWASLDLPSLVAEHLPGRQEHVFWKLVLVLPDVEEQSPESCGRILANWLKVKFMGDEGSVDDTSSDAGGIQTLSLFNSLSSKGDQMISVNVCIKVAHGALSDGAIDAVETQKDLLGASGLMLLLPPKMKSEDMAEEDVYWLSALLQLKQLLQAKPFQPALPLVVLVPSPGGDAVEKEVEDGLMLQDLVSAKLISDYTVTEIPDTINDLQGSTKVLQAVQWLVSHCPHSLDLCCQTLIQYVEDGIGHEFSGRFFHDRRERRLGGLASQEPGAIIELFNSVLQFLASVVSSEQLCDLSWPVTEFAEAGGSRLLPHLHWNAPEHLAWLKQAVLGFQLPQMDLPPLGAPWLPVCSMVVQYASQIPSSRQTQPVLQSQVENLLHRTYCRWKSKSPSPVHGAGPSVMEIPWDDLIALCINHKLRDWTPPRLPVTSEALSEDGQICVYFFKNDLKKYDVPLSWEQARLQTQKELQLREGRR

SEQ ID NO: 877885 - protein, 244 aa, Homo sapiens [sequence omitted]

SEQ ID NO: 877886 - protein, 1650 aa, Homo sapiens
MNPTNPFSGQQPSAFSASSSNVGTLPSKPPFRFGQPSLFGQNSTLSGKSSGFSQVSSFPASSGVSHSSSVQTLGFTQTSSVGPFSGLEHTSTFVATSGPSSSSVLGNTGFSFKSPTSVGAFPSTSAFGQEAGEIVNSGFGKTEFSFKPLENAVFKPILGAESEPEKTQSQIASGFFTFSHPISSAPGGLAPFSFPQVTSSSATTSNFTFSKPVSSNNSLSAFTPALSNQNVEEEKRGPKSIFGSSNNSFSSFPVSSAVLGEPFQASKAGVRQGCEEAVSQVEPLPSLMKGLKRKEDQDRSPRRHGHEPAEDSDPLSRGDHPPDKRPVRLNRPRGGTLFGRTIQDVFKSNKEVGRLGNKEAKKETGFVESAESDHMAIPGGNQSVLAPSRIPGVNKEEETESREKKEDSLRGTPARQSNRSESTDSLGGLSPSEVTAIQCKNIPDYLNDRTILENHFGKIAKVQRIFTRRSKKLAVVHFFDHASAALARKKGKSLHKDMAIFWHRKKISPNKKPFSLKEKKPGDGEVSPSTEDAPFQHSPLGKAAGRTGASSLLNKSSPVKKPSLLKAHQFEGDSFDSASEGSEGLGPCVLSLSTLIGTVAETSKEKYRLLDQRDRIMRQARVKRTDLDKARTFVGTCLDMCPEKERYMRETRSQLSVFEVVPGTDQVDHAAAVKEYSRSSADQEEPLPHELRPLPVLSRTMDYLVTQIMDQKEGSLRDWYDFVWNRTRGIRKDITQQHLCDPLTVSLIEKCTRFHIHCAHFMCEEPMSSFDAKINNENMTKCLQSLKEMYQDLRNKGVFCASEAEFQGYNVLLSLNKGDILREVQQFHPAVRNSSEVKFAVQAFAALNSNNFVRFFKLVQSASYLNACLLHCYFSQIRKDALRALNFAYTVSTQRSTIFPLDGVVRMLLFRDCEEATDFLTCHGLTVSDGCVELNRSAFLEPEGLSKTRKSVFITRKLTVSVGEIVNGGPLPPVPRHTPVCSFNSQNKYIGESLAAELPVSTQRPGSDTVGGGRGEECGVEPDAPLSSLPQSLPAPAPSPVPLPPVLALTPSVAPSLFQLSVQPEPPPPEPVPMYSDEDLAQVVDELIQEALQRDCEEVGSAGAAYAAAALGVSNAAMEDLLTAATTGILRHIAAEEVSKERERREQERQRAEEERLKQERELVLSELSQGLAVELMERVMMEFVRETCSQELKNAVETDQRVRVARCCEDVCAHLVDLFLVEEIFQTAKETLQELQCFCKYLQRWREAVTARKKLRRQMRAFPAAPCCVDVSDRLRALAPSAECPIAEENLARGLLDLGHAGRLGISCTRLRRLRNKTAHQMKVQHFYQQLLSDVAWASLDLPSLVAEHLPGRQEHVFWKLVLVLPDVEEQSPESCGRILANWLKVKFMGDEGSVDDTSSDAGGIQTLSLFNSLSSKGDQMISVNVCIKVAHGALSDGAIDAVETQKDLLGASGLMLLLPPKMKSEDMAEEDVYWLSALLQLKQLLQAKPFQPALPLVVLVPSPGGDAVEKEVEDGLMLQDLVSAKLISDYTVTEIPDTINDLQGSTKVLQAVQWLVSHCPHSLDLCCQTLIQYVEDGIGHEFSGRFFHDRRERRLGGLASQEPGAIIELFNSVLQFLASVVSSEQLCDLSCAVSLSLYQPLLPSSVPL

SEQ ID NO: 877887 - protein, 1465 aa, Homo sapiens
MNPTNPFSGQQPSAFSASSSNVGTLPSKPPFRFGQPSLFGQNSTLSGKSSGFSQVSSFPASSGVSHSSSVQTLGFTQTSSVGPFSGLEHTSTFVATSGPSSSSVLGNTGFSFKSPTSVGAFPSTSAFGQEAGEIVNSGFGKTEFSFKPLENAVFKPILGAESEPEKTQSQIASGFFTFSHPISSAPGGLAPFSFPQVTSSSATTSNFTFSKPVSSNNSLSAFTPALSNQNVEEEKRGPKSIFGSSNNSFSSFPVSSAVLGEPFQASKAGVRQGCEEAVSQVEPLPSLMKGLKRKEDQDRSPRRHGHEPAEDSDPLSRGDHPPDKRPVRLNRPRGGTLFGRTIQDVFKSNKEVGRLGNKEAKKETGFVESAESDHMAIPGGNQSVLAPSRIPGVNKEEETESREKKEDSLRGTPARQSNRSESTDSLGGLSPSEVTAIQCKNIPDYLNDRTILENHFGKIAKVQRIFTRRSKKLAVVHFFDHASAALARKKGKSLHKDMAIFWHRKKISPNKKPFSLKEKKPGDGEVSPSTEDAPFQHSPLGKAAGRTGASSLLNKSSPVKKPSLLKAHQFEGDSFDSASEGSEGLGPCVLSLSTLIGTVAETSKEKYRLLDQRDRIMRQARVKRTDLDKARTFVGTCLDMCPEKERYMRETRSQLSVFEVVPGTDQVDHAAAVKEYSRSSADQEEPLPHELRPLPVLSRTMDYLVTQIMDQKEGSLRDWYDFVWNRTRGIRKDITQQHLCDPLTVSLIEKCTRFHIHCAHFMCEEPMSSFDAKINNENMTKCLQSLKEMYQDLRNKGVFCASEAEFQGYNVLLSLNKGDILREVQQFHPAVRNSSEVKFAVQAFAALNSNNFVRFFKLVQSASYLNACLLHCYFSQIRKDALRALNFAYTVSTQRSTIFPLDGVVRMLLFRDCEEATDFLTCHGLTVSDGCVELNRSAFLEPEGLSKTRKSVFITRKLTVSVGEIVNGGPLPPVPRHTPVCSFNSQNKYIGESLAAELPVSTQRPGSDTVGGGRGEECGVEPDAPLSSLPQSLPAPAPSPVPLPPVLALTPSVAPSLFQLSVQPEPPPPEPVPMYSDEDLAQVVDELIQEALQRDCEEVGSAGAAYAAAALGVSNAAMEDLLTAATTGILRHIAAEEVSKERERREQERQRAEEERLKQERELVLSELSQGLAVELMERVMMEFVRETCSQELKNAVETDQRVRVARCCEDVCAHLVDLFLVEEIFQTAKETLQELQCFCKYLQRWREAVTARKKLRRQMRAFPAAPCCVDVSDRLRALAPSAECPIAEENLARGLLDLGHAGRLGISCTRLRRLRNKTAHQMKVQHFYQQLLSDVAWASLDLPSLVAEHLPGRQEHVFWKLVLVLPDVEEQSPESCGRILANWLKVKFMGDEGSVDDTSSDAGGIQTLSLFNSLSSKGDQMISVNVCIKVNYNYFVFTSVFSLLSLTPRYHWNHANTAYSLMWF

SEQ ID NO: 877888 - protein, 1518 aa, Homo sapiens [sequence omitted]

SEQ ID NO: 877889 - protein, 1350 aa, Homo sapiens
MNPTNPFSGQQPSAFSASSSNVGTLPSKPPFRFGQPSLFGQNSTLSGKSSGFSQVSSFPASSGVSHSSSVQTLGFTQTSSVGPFSGLEHTSTFVATSGPSSSSVLGNTGFSFKSPTSVGAFPSTSAFGQEAGEIVNSGFGKTEFSFKPLENAVFKPILGAESEPEKTQSQIASGFFTFSHPISSAPGGLAPFSFPQVTSSSATTSNFTFSKPVSSNNSLSAFTPALSNQNVEEEKRGPKSIFGSSNNSFSSFPVSSAVLGEPFQASKAGVRQGCEEAVSQVEPLPSLMKGLKRKEDQDRSPRRHGHEPAEDSDPLSRGDHPPDKRPVRLNRPRGGTLFGRTIQDVFKSNKEVGRLGNKEAKKETGFVESAESDHMAIPGGNQSVLAPSRIPGVNKEEETESREKKEDSLRGTPARQSNRSESTDSLGGLSPSEVTAIQCKNIPDYLNDRTILENHFGKIAKVQRIFTRRSKKLAVVHFFDHASAALARKKGKSLHKDMAIFWHRKKISPNKKPFSLKEKKPGDGEVSPSTEDAPFQHSPLGKAAGRTGASSLLNKSSPVKKPSLLKAHQFEGDSFDSASEGSEGLGPCVLSLSTLIGTVAETSKEKYRLLDQRDRIMRQARVKRTDLDKARTFVGTCLDMCPEKERYMRETRSQLSVFEVVPGTDQVDHAAAVKEYSRSSADQEEPLPHELRPLPVLSRTMDYLVTQIMDQKEGSLRDWYDFVWNRTRGIRKDITQQHLCDPLTVSLIEKCTRFHIHCAHFMCEEPMSSFDAKINNENMTKCLQSLKEMYQDLRNKGVFCASEAEFQGYNVLLSLNKGDILREVQQFHPAVRNSSEVKFAVQAFAALNSNNFVRFFKLVQSASYLNACLLHCYFSQIRKDALRALNFAYTVSTQRSTIFPLDGVVRMLLFRDCEEATDFLTCHGLTVSDGCVELNRSAFLEPEGLSKTRKSVFITRKLTVSVGEIVNGGPLPPVPRHTPVCSFNSQNKYIGESLAAELPVSTQRPGSDTVGGGRGEECGVEPDAPLSSLPQSLPAPAPSPVPLPPVLALTPSVAPSLFQLSVQPEPPPPEPVPMYSDEDLAQVVDELIQEALQRDCEEVGSAGAAYAAAALGVSNAAMEDLLTAATTGILRHIAAEEVSKERERREQERQRAEEERLKQERELVLSELSQGLAVELMERVMMEFVRETCSQELKNAVETDQRVRVARCCEDVCAHLVDLFLVEEIFQTAKETLQELQCFCKYLQRWREAVTARKKLRRQMRAFPAAPCCVDVSDRLRALAPSAECPIAEENLARGLLDLGHAGRLGISCTRSASAVACLVRAPLPPLGFTRSGINVCVWRVKIGEAWRRR

SEQ ID NO: 877890 - protein, 1194 aa, Homo sapiens
MNPTNPFSGQQPSAFSASSSNVGTLPSKPPFRFGQPSLFGQNSTLSGKSSGFSQVSSFPASSGVSHSSSVQTLGFTQTSSVGPFSGLEHTSTFVATSGPSSSSVLGNTGFSFKSPTSVGAFPSTSAFGQEAGEIVNSGFGKTEFSFKPLENAVFKPILGAESEPEKTQSQIASGFFTFSHPISSAPGGLAPFSFPQVTSSSATTSNFTFSKPVSSNNSLSAFTPALSNQNVEEEKRGPKSIFGSSNNSFSSFPVSSAVLGEPFQASKAGVRQGCEEAVSQVEPLPSLMKGLKRKEDQDRSPRRHGHEPAEDSDPLSRGDHPPDKRPVRLNRPRGGTLFGRTIQDVFKSNKEVGRLGNKEAKKETGFVESAESDHMAIPGGNQSVLAPSRIPGVNKEEETESREKKEDSLRGTPARQSNRSESTDSLGGLSPSEVTAIQCKNIPDYLNDRTILENHFGKIAKVQRIFTRRSKKLAVVHFFDHASAALARKKGKSLHKDMAIFWHRKKISPNKKPFSLKEKKPGDGEVSPSTEDAPFQHSPLGKAAGRTGASSLLNKSSPVKKPSLLKAHQFEGDSFDSASEGSEGLGPCVLSLSTLIGTVAETSKEKYRLLDQRDRIMRQARVKRTDLDKARTFVGTCLDMCPEKERYMRETRSQLSVFEVVPGTDQVDHAAAVKEYSRSSADQEEPLPHELRPLPVLSRTMDYLVTQIMDQKEGSLRDWYDFVWNRTRGIRKDITQQHLCDPLTVSLIEKCTRFHIHCAHFMCEEPMSSFDAKINNENMTKCLQSLKEMYQDLRNKGVFCASEAEFQGYNVLLSLNKGDILREVQQFHPAVRNSSEVKFAVQAFAALNSNNFVRFFKLVQSASYLNACLLHCYFSQIRKDALRALNFAYTVSTQRSTIFPLDGVVRMLLFRDCEEATDFLTCHGLTVSDGCVELNRSAFLEPEGLSKTRKSVFITRKLTVSVGEIVNGGPLPPVPRHTPVCSFNSQNKYIGESLAAELPVSTQRPGSDTVGGGRGEECGVEPDAPLSSLPQSLPAPAPSPVPLPPVLALTPSVAPSLFQLSVQPEPPPPEPVPMYSDEDLAQVVDELIQEALQRDCEEVGSAGAAYAAAALGVSNAAMEDLLTAATTGILRHIAAEEVSKERERREQERQRAEEERLKQERELVLSELSQGLAVELMERVMMEFVRETCSQELK

SEQ ID NO: 877891 - protein, 515 aa, Homo sapiens
MNPTNPFSGQQPSAFSASSSNVGTLPSKPPFRFGQPSLFGQNSTLSGKSSGFSQVSSFPASSGVSHSSSVQTLGFTQTSSVGPFSGLEHTSTFVATSGPSSSSVLGNTGFSFKSPTSVGAFPSTSAFGQEAGEIVNSGFGKTEFSFKPLENAVFKPILGAESEPEKTQSQIASGFFTFSHPISSAPGGLAPFSFPQVTSSSATTSNFTFSKPVSSNNSLSAFTPALSNQNVEEEKRGPKSIFGSSNNSFSSFPVSSAVLGEPFQASKAGVRQGCEEAVSQVEPLPSLMKGLKRKEDQDRSPRRHGHEPAEDSDPLSRGDHPPDKRPVRLNRPRGGTLFGRTIQDVFKSNKEVGRLGNKEAKKETGFVESAESDHMAIPGGNQSVLAPSRIPGVNKEEETESREKKEDSLRGTPARQSNRSESTDSLGGLSPSEVTAIQCKNIPDYLNDRTILENHFGKIAKVQRIFTRRSKKLAVVHFFDHVSTPILPFVTLDLNLVTLKPVFFFWSLSCLLTII

SEQ ID NO: 877892 - protein, 87 aa, Homo sapiens
STITTNFAGGVDQTLVSLSHTIEPVMKTSVTTSPQSDMMREQLQLSEATGTCLGERLKHLERLIRSSREEEVASELHLSALLDMVDI

SEQ ID NO: 877893 - protein, 1980 aa, Homo sapiens; identical to SEQ ID NO: 877875

SEQ ID NO: 877894 - protein, 2165 aa, Homo sapiens
MNPTNPFSGQQPSAFSASSSNVGTLPSKPPFRFGQPSLFGQNSTLSGKSSGFSQVSSFPASSGVSHSSSVQTLGFTQTSSVGPFSGLEHTSTFVATSGPSSSSVLGNTGFSFKSPTSVGAFPSTSAFGQEAGEIVNSGFGKTEFSFKPLENAVFKPILGAESEPEKTQSQIASGFFTFSHPISSAPGGLAPFSFPQVTSSSATTSNFTFSKPVSSNNSLSAFTPALSNQNVEEEKRGPKSIFGSSNNSFSSFPVSSAVLGEPFQASKAGVRQGCEEAVSQVEPLPSLMKGLKRKEDQDRSPRRHGHEPAEDSDPLSRGDHPPDKRPVRLNRPRGGTLFGRTIQDVFKSNKEVGRLGNKEAKKETGFVESAESDHMAIPGGNQSVLAPSRIPGVNKEEETESREKKEDSLRGTPARQSNRSESTDSLGGLSPSEVTAIQCKNIPDYLNDRTILENHFGKIAKVQRIFTRRSKKLAVVHFFDHASAALARKKGKSLHKDMAIFWHRKKISPNKKPFSLKEKKPGDGEVSPSTEDAPFQHSPLGKAAGRTGASSLLNKSSPVKKPSLLKAHQFEGDSFDSASEGSEGLGPCVLSLSTLIGTVAETSKEKYRLLDQRDRIMRQARVKRTDLDKARTFVGTCLDMCPEKERYMRETRSQLSVFEVVPGTDQVDHAAAVKEYSRSSADQEEPLPHELRPLPVLSRTMDYLVTQIMDQKEGSLRDWYDFVWNRTRGIRKVLAASNWMLKNPRKFQSQTDIFITLLYILSVTKMYFVGQVQWLRPVIPALWEAEVGGSPEVRSLRPAWPTWLNPISTENTKISLAWWHTPVVPATRAAEAELLEPEEAEVVVSQDDTTALQPGFCLKKKNKPQDFYLSHYKVLLKCAHGLCFKLKSEKLRSYMILLTVASLHGNVCVILPLACGQDITQQHLCDPLTVSLIEKCTRFHIHCAHFMCEEPMSSFDAKINNENMTKCLQSLKEMYQDLRNKGVFCASEAEFQGYNVLLSLNKGDILREVQQFHPAVRNSSEVKFAVQAFAALNSNNFVRFFKLVQSASYLNACLLHCYFSQIRKDALRALNFAYTVSTQRSTIFPLDGVVRMLLFRDCEEATDFLTCHGLTVSDGCVELNRSAFLEPEGLSKTRKSVFITRKLTVSVGEIVNGGPLPPVPRHTPVCSFNSQNKYIGESLAAELPVSTQRPGSDTVGGGRGEECGVEPDAPLSSLPQSLPAPAPSPVPLPPVLALTPSVAPSLFQLSVQPEPPPPEPVPMYSDEDLAQVVDELIQEALQRDCEEVGSAGAAYAAAALGVSNAAMEDLLTAATTGILRHIAAEEVSKERERREQERQRAEEERLKQERELVLSELSQGLAVELMERVMMEFVRETCSQELKNAVETDQRVRVARCCEDVCAHLVDLFLVEEIFQTAKETLQELQCFCKYLQRWREAVTARKKLRRQMRAFPAAPCCVDVSDRLRALAPSAECPIAEENLARGLLDLGHAGRLGISCTRLRRLRNKTAHQMKVQHFYQQLLSDVAWASLDLPSLVAEHLPGRQEHVFWKLVLVLPDVEEQSPESCGRILANWLKVKFMGDEGSVDDTSSDAGGIQTLSLFNSLSSKGDQMISVNVCIKVAHGALSDGAIDAVETQKDLLGASGLMLLLPPKMKSEDMAEEDVYWLSALLQLKQLLQAKPFQPALPLVVLVPSPGGDAVEKEVEDGLMLQDLVSAKLISDYTVTEIPDTINDLQGSTKVLQAVQWLVSHCPHSLDLCCQTLIQYVEDGIGHEFSGRFFHDRRERRLGGLASQEPGAIIELFNSVLQFLASVVSSEQLCDLSWPVTEFAEAGGSRLLPHLHWNAPEHLAWLKQAVLGFQLPQMDLPPLGAPWLPVCSMVVQYASQIPSSRQTQPVLQSQVENLLHRTYCRWKSKSPSPVHGAGPSVMEIPWDDLIALCINHKLRDWTPPRLPVTSEALSEDGQICVYFFKNDLKKYDVPLSWEQARLQTQKELQLREGRLAIKPFHPSANNFPIPLLHMHRNWKRSTECAQEGRIPSTEDLMRGASAEELLAQCLSSSLLLEKEENKRFEDQLQQWLSEDSGAFTDLTSLPLYLPQTLVSLSHTIEPVMKTSVTTSPQSDMMREQLQLSEATGTCLGERLKHLERLIRSSREEEVASELHLSALLDMVDI

SEQ ID NO: 877895 - protein, 1263 aa, Homo sapiens
MNLTAHFTSKTLLLSMVEIQYHYYLRQGLALSPRLEYSDAITAHCSLNLLGSNDPPTLASPRFGITGVSHCIWPVKSIIYQIYLHENFVLFKITFQPLFSPLINREVQQFHPAVRNSSEVKFAVQAFAALNSNNFVRFFKLVQSASYLNACLLHCYFSQIRKDALRALNFAYTVSTQRSTIFPLDGVVRMLLFRDCEEATDFLTCHGLTVSDGCVELNRSAFLEPEGLSKTRKSVFITRKLTVSVGEIVNGGPLPPVPRHTPVCSFNSQNKYIGESLAAELPVSTQRPGSDTVGGGRGEECGVEPDAPLSSLPQSLPAPAPSPVPLPPVLALTPSVAPSLFQLSVQPEPPPPEPVPMYSDEDLAQVVDELIQEALQRDCEEVGSAGAAYAAAALGVSNAAMEDLLTAATTGILRHIAAEEVSKERERREQERQRAEEERLKQERELVLSELSQGLAVELMERVMMEFVRETCSQELKNAVETDQRVRVARCCEDVCAHLVDLFLVEEIFQTAKETLQELQCFCKYLQRWREAVTARKKLRRQMRAFPAAPCCVDVSDRLRALAPSAECPIAEENLARGLLDLGHAGRLGISCTRLRRLRNKTAHQMKVQHFYQQLLSDVAWASLDLPSLVAEHLPGRQEHVFWKLVLVLPDVEEQSPESCGRILANWLKVKFMGDEGSVDDTSSDAGGIQTLSLFNSLSSKGDQMISVNVCIKVAHGALSDGAIDAVETQKDLLGASGLMLLLPPKMKSEDMAEEDVYWLSALLQLKQLLQAKPFQPALPLVVLVPSPGGDAVEKEVEDGLMLQDLVSAKLISDYTVTEIPDTINDLQGSTKVLQAVQWLVSHCPHSLDLCCQTLIQYVEDGIGHEFSGRFFHDRRERRLGGLASQEPGAIIELFNSVLQFLASVVSSEQLCDLSWPVTEFAEAGGSRLLPHLHWNAPEHLAWLKQAVLGFQLPQMDLPPLGAPWLPVCSMVVQYASQIPSSRQTQPVLQSQVENLLHRTYCRWKSKSPSPVHGAGPSVMEIPWDDLIALCINHKLRDWTPPRLPVTSEALSEDGQICVYFFKNDLKKYDVPLSWEQARLQTQKELQLREGRLAIKPFHPSANNFPIPLLHMHRNWKRSTECAQEGRIPSTEDLMRGASAEELLAQCLSSSLLLEKEENKRFEDQLQQWLSEDSGAFTDLTSLPLYLPQTLVSLSHTIEPVMKTSVTTSPQSDMMREQLQLSEATGTCLGERLKHLERLIRSSREEEVASELHLSALLDMVDI

SEQ ID NO: 877896 - protein, 907 aa, Homo sapiens [sequence omitted]

SEQ ID NO: 877897 - protein, 1810 aa, Homo sapiens; identical to SEQ ID NO: 877884

SEQ ID NO: 877898 - protein, 551 aa, Homo sapiens
MVAHGALSDGAIDAVETQKDLLGASGLMLLLPPKMKSEDMAEEDVYWLSALLQLKQLLQAKPFQPALPLVVLVPSPGGDAVEKEVEDGLMLQDLVSAKLISDYTVTEIPDTINDLQGSTKVLQAVQWLVSHCPHSLDLCCQTLIQYVEDGIGHEFSGRFFHDRRERRLGGLASQEPGAIIELFNSVLQFLASVVSSEQLCDLSWPVTEFAEAGGSRLLPHLHWNAPEHLAWLKQAVLGFQLPQMDLPPLGAPWLPVCSMVVQYASQIPSSRQTQPVLQSQVENLLHRTYCRWKSKSPSPVHGAGPSVMEIPWDDLIALCINHKLRDWTPPRLPVTSEALSEDGQICVYFFKNDLKKYDVPLSWEQARLQTQKELQLREGRLAIKPFHPSANNFPIPLLHMHRNWKRSTECAQEGRIPSTEDLMRGASAEELLAQCLSSSLLLEKEENKRFEDQLQQWLSEDSGAFTDLTSLPLYLPQTLVSLSHTIEPVMKTSVTTSPQSDMMREQLQLSEATGTCLGERLKHLERLIRSSREEEVASELHLSALLDMVDI

SEQ ID NO: 877899 - protein, 721 aa, Homo sapiens; identical to SEQ ID NO: 877876

SEQ ID NO: 877900 - protein, 1810 aa, Homo sapiens; identical to SEQ ID NO: 877884

SEQ ID NO: 877901 - protein, 273 aa, Homo sapiens
MGRESCSSSYSRFCVSKSPSPVHGAGPSVMEIPWDDLIALCINHKLRDWTPPRLPVTSEALSEDGQICVYFFKNDLKKYDVPLSWEQARLQTQKELQLREGRLAIKPFHPSANNFPIPLLHMHRNWKRSTECAQEGRIPSTEDLMRGASAEELLAQCLSSSLLLEKEENKRFEDQLQQWLSEDSGAFTDLTSLPLYLPQTLVSLSHTIEPVMKTSVTTSPQSDMMREQLQLSEATGTCLGERLKHLERLIRSSREEEVASELHLSALLDMVDI

SEQ ID NO: 877902 - protein, 1598 aa, Homo sapiens
MNPTNPFSGQQPSAFSASSSNVGTLPSKPPFRFGQPSLFGQNSTLSGKSSGFSQVSSFPASSGVSHSSSVQTLGFTQTSSVGPFSGLEHTSTFVATSGPSSSSVLGNTGFSFKSPTSVGAFPSTSAFGQEAGEIVNSGFGKTEFSFKPLENAVFKPILGAESEPEKTQSQIASGFFTFSHPISSAPGGLAPFSFPQVTSSSATTSNFTFSKPVSSNNSLSAFTPALSNQNVEEEKRGPKSIFGSSNNSFSSFPVSSAVLGEPFQASKAGVRQGCEEAVSQVEPLPSLMKGLKRKEDQDRSPRRHGHEPAEDSDPLSRGDHPPDKRPVRLNRPRGGTLFGRTIQDVFKSNKEVGRLGNKEAKKETGFVESAESDHMAIPGGNQSVLAPSRIPGVNKEEETESREKKEDSLRGTPARQSNRSESTDSLGGLSPSEVTAIQCKNIPDYLNDRTILENHFGKIAKVQRIFTRRSKKLAVVHFFDHASAALARKKGKSLHKDMAIFWHRKKISPNKKPFSLKEKKPGDGEVSPSTEDAPFQHSPLGKAAGRTGASSLLNKSSPVKKPSLLKAHQFEGDSFDSASEGSEGLGPCVLSLSTLIGTVAETSKEKYRLLDQRDRIMRQARVKRTDLDKARTFVGTCLDMCPEKERYMRETRSQLSVFEVVPGTDQVDHAAAVKEYSRSSADQEEPLPHELRPLPVLSRTMDYLVTQIMDQKEGSLRDWYDFVWNRTRGIRKDITQQHLCDPLTVSLIEKCTRFHIHCAHFMCEEPMSSFDAKINNENMTKCLQSLKEMYQDLRNKGVFCASEAEFQGYNVLLSLNKGDILREVQQFHPAVRNSSEVKFAVQAFAALNSNNFVRFFKLVQSASYLNACLLHCYFSQIRKDALRALNFAYTVSTQRSTIFPLDGVVRMLLFRDCEEATDFLTCHGLTVSDGCVELNRSAFLEPEGLSKTRKSVFITRKLTVSVGEIVNGGPLPPVPRHTPVCSFNSQNKYIGESLAAELPVSTQRPGSDTVGGGRGEECGVEPDAPLSSLPQSLPAPAPSPVPLPPVLALTPSVAPSLFQLSVQPEPPPPEPVPMYSDEDLAQVVDELIQEALQRDCEEVGSAGAAYAAAALGVSNAAMEDLLTAATTGILRHIAAEEVSKERERREQERQRAEEERLKQERELVLSELSQGLAVELMERVMMEFVRETCSQELKNAVETDQRVRVARCCEDVCAHLVDLFLVEEIFQTAKETLQELQCFCKYLQRWREAVTARKKLRRQMRAFPAAPCCVDVSDRLRALAPSAECPIAEENLARGLLDLGHAGRLGISCTRLRRLRNKTAHQMKVQHFYQQLLSDVAWASLDLPSLVAEHLPGRQEHVFWKLVLVLPDVEEQSPESCGRILANWLKVKFMGDEGSVDDTSSDAGGIQTLSLFNSLSSKGDQMISVNVCIKVAHGALSDGAIDAVETQKDLLGASGLMLLLPPKMKSEDMAEEDVYWLSALLQLKQLLQAKPFQPALPLVVLVPSPGGDAVEKEVEDGLMLQDLVSAKLISDYTVTEIPDTINDLQGSTKVLQAVQWLVSHCPHSLDLCCQTLIQYVEDGIGHEFSGRFFHDRRAWRHH

SEQ ID NO: 877903 - protein, 1426 aa, Homo sapiens
MNPTNPFSGQQPSAFSASSSNVGTLPSKPPFRFGQPSLFGQNSTLSGKSSGFSQVSSFPASSGVSHSSSVQTLGFTQTSSVGPFSGLEHTSTFVATSGPSSSSVLGNTGFSFKSPTSVGAFPSTSAFGQEAGEIVNSGFGKTEFSFKPLENAVFKPILGAESEPEKTQSQIASGFFTFSHPISSAPGGLAPFSFPQVTSSSATTSNFTFSKPVSSNNSLSAFTPALSNQNVEEEKRGPKSIFGSSNNSFSSFPVSSAVLGEPFQASKAGVRQGCEEAVSQVEPLPSLMKGLKRKEDQDRSPRRHGHEPAEDSDPLSRGDHPPDKRPVRLNRPRGGTLFGRTIQDVFKSNKEVGRLGNKEAKKETGFVESAESDHMAIPGGNQSVLAPSRIPGVNKEEETESREKKEDSLRGTPARQSNRSESTDSLGGLSPSEVTAIQCKNIPDYLNDRTILENHFGKIAKVQRIFTRRSKKLAVVHFFDHASAALARKKGKSLHKDMAIFWHRKKISPNKKPFSLKEKKPGDGEVSPSTEDAPFQHSPLGKAAGRTGASSLLNKSSPVKKPSLLKAHQFEGDSFDSASEGSEGLGPCVLSLSTLIGTVAETSKEKYRLLDQRDRIMRQARVKRTDLDKARTFVGTCLDMCPEKERYMRETRSQLSVFEVVPGTDQVDHAAAVKEYSRSSADQEEPLPHELRPLPVLSRTMDYLVTQIMDQKEGSLRDWYDFVWNRTRGIRKDITQQHLCDPLTVSLIEKCTRFHIHCAHFMCEEPMSSFDAKINNENMTKCLQSLKEMYQDLRNKGVFCASEAEFQGYNVLLSLNKGDILREVQQFHPAVRNSSEVKFAVQAFAALNSNNFVRFFKLVQSASYLNACLLHCYFSQIRKDALRALNFAYTVSTQRSTIFPLDGVVRMLLFRDCEEATDFLTCHGLTVSDGCVELNRSAFLEPEGLSKTRKSVFITRKLTVSVGEIVNGGPLPPVPRHTPVCSFNSQNKYIGESLAAELPVSTQRPGSDTVGGGRGEECGVEPDAPLSSLPQSLPAPAPSPVPLPPVLALTPSVAPSLFQLSVQPEPPPPEPVPMYSDEDLAQVVDELIQEALQRDCEEVGSAGAAYAAAALGVSNAAMEDLLTAATTGILRHIAAEEVSKERERREQERQRAEEERLKQERELVLSELSQGLAVELMERVMMEFVRETCSQELKNAVETDQRVRVARCCEDVCAHLVDLFLVEEIFQTAKETLQELQCFCKYLQRWREAVTARKKLRRQMRAFPAAPCCVDVSDRLRALAPSAECPIAEENLARGLLDLGHAGRLGISCTRLRRLRNKTAHQMKVQHFYQQLLSDVAWASLDLPSLVAEHLPGRQEHVFWKLVLVLPDVEEQSPESCGRILANWLKVKFMGDEGSVDDTSSDAGGIQTLSLFNSLSSKGDQMIFWQ

SEQ ID NO: 877904 - protein, 1245 aa, Homo sapiens
MNPTNPFSGQQPSAFSASSSNVGTLPSKPPFRFGQPSLFGQNSTLSGKSSGFSQVSSFPASSGVSHSSSVQTLGFTQTSSVGPFSGLEHTSTFVATSGPSSSSVLGNTGFSFKSPTSVGAFPSTSAFGQEAGEIVNSGFGKTEFSFKPLENAVFKPILGAESEPEKTQSQIASGFFTFSHPISSAPGGLAPFSFPQVTSSSATTSNFTFSKPVSSNNSLSAFTPALSNQNVEEEKRGPKSIFGSSNNSFSSFPVSSAVLGEPFQASKAGVRQGCEEAVSQVEPLPSLMKGLKRKEDQDRSPRRHGHEPAEDSDPLSRGDHPPDKRPVRLNRPRGGTLFGRTIQDVFKSNKEVGRLGNKEAKKETGFVESAESDHMAIPGGNQSVLAPSRIPGVNKEEETESREKKEDSLRGTPARQSNRSESTDSLGGLSPSEVTAIQCKNIPDYLNDRTILENHFGKIAKVQRIFTRRSKKLAVVHFFDHASAALARKKGKSLHKDMAIFWHRKKISPNKKPFSLKEKKPGDGEVSPSTEDAPFQHSPLGKAAGRTGASSLLNKSSPVKKPSLLKAHQFEGDSFDSASEGSEGLGPCVLSLSTLIGTVAETSKEKYRLLDQRDRIMRQARVKRTDLDKARTFVGTCLDMCPEKERYMRETRSQLSVFEVVPGTDQVDHAAAVKEYSRSSADQEEPLPHELRPLPVLSRTMDYLVTQIMDQKEGSLRDWYDFVWNRTRGIRKDITQQHLCDPLTVSLIEKCTRFHIHCAHFMCEEPMSSFDAKINNENMTKCLQSLKEMYQDLRNKGVFCASEAEFQGYNVLLSLNKGDILREVQQFHPAVRNSSEVKFAVQAFAALNSNNFVRFFKLVQSASYLNACLLHCYFSQIRKDALRALNFAYTVSTQRSTIFPLDGVVRMLLFRDCEEATDFLTCHGLTVSDGCVELNRSAFLEPEGLSKTRKSVFITRKLTVSVGEIVNGGPLPPVPRHTPVCSFNSQNKYIGESLAAELPVSTQRPGSDTVGGGRGEECGVEPDAPLSSLPQSLPAPAPSPVPLPPVLALTPSVAPSLFQLSVQPEPPPPEPVPMYSDEDLAQVVDELIQEALQRDCEEVGSAGAAYAAAALGVSNAAMEDLLTAATTGILRHIAAEEVSKERERREQERQRAEEERLKQERELVLSELSQGLAVELMERVMMEFVRETCSQELKNAVETDQRVRVARCCEDVCAHLVDLFLVEEIFQTAKETLQELQCFCKYLQR

SEQ ID NO: 877905 - protein, 879 aa, Homo sapiens [sequence omitted]

SEQ ID NO: 877906 - protein, 420 aa, Homo sapiens
MSAAGAGAGVEAGFSSEELLSLRFPLHRACRDGDLATLCSLLQQTPHAHLASEDSFYGWTPVHWAAHFGKLECLVQLVRAGATLNVSTTRYAQTPAHIAAFGGHPQCLVWLIQAGANINKPDCEGETPIHKAARSGSLECISALVANGAHVDLRNASGLTAADIAQTQGFQECAQFLLNLQNCHLNHFYNNGILNGGHQNVFPNHISVGTNRKRCLEDSEDFGVKKARTEAQSLDSAVPLTNGDTEDDADKMHVDREFAVVTDMKNSSSVSNTLTNGCVINGHLDFPSTTPLSGMESRNGQCLTGTNGISSGLAPGQPFPSSQGSLCISGTEEPEKTLRANPELCGSLHLNGSPSSCIASRPSWVEDIGDNLYYGHYHGFGDTAESIPELNSVVEHSKSVKVQERYDSAVLGTMHLHHGS

SEQ ID NO: 877907 - protein, 220 aa, Homo sapiens
MSAAGAGAGVEAGFSSEELLSLRFPLHRACRDGDLATLCSLLQQTPHAHLASEDSFYGWTPVHWAAHFGKLECLVQLVRAGATLNVSTTRYAQTPAHIAAFGGHPQCLVWLIQAGANINKPDCEGETPIHKAARSGSLECISALVANGAHVEFISQSSVHSCLPGELQHGVTFDPSVLIQCLKPEKCQWPDSSRHCTNPGFPRVCPVSLEPPELSSEPFL

SEQ ID NO: 877908 - protein, 220 aa, Homo sapiens; identical to SEQ ID NO: 877907

SEQ ID NO: 877909 - protein, 172 aa, Homo sapiens
MSAAGAGAGVEAGFSSEELLSLRFPLHRACRDGDLATLCSLLQQTPHAHLASEDSFYGWTPVHWAAHFGKLECLVQLVRAGATLNVSTTRYAQTPAHIAAFGGHPQCLVWLIQAGANINKPDCEGETPIHKAARSGSLECISALVANGAHVDYVIRIDLIFSSNPRKGEHSI

SEQ ID NO: 877910 - protein, 157 aa, Homo sapiens
MKNSSSVSNTLTNGCVINGHLDFPSTTPLSGMESRNGQCLTGTNGISSGLAPGQPFPSSQGSLCISGTEEPEKTLRANPELCGSLHLNGSPSSCIASRPSWVEDIGDNLYYGHYHGFGDTAESIPELNSVVEHSKSVKVQERYDSAVLGTMHLHHGS

SEQ ID NO: 877911 - protein, 169 aa, Homo sapiens
MHVDREFAVVTDMKNSSSVSNTLTNGCVINGHLDFPSTTPLSGMESRNGQCLTGTNGISSGLAPGQPFPSSQGSLCISGTEEPEKTLRANPELCGSLHLNGSPSSCIASRPSWVEDIGDNLYYGHYHGFGDTAESIPELNSVVEHSKSVKVQERYDSAVLGTMHLHHGS

SEQ ID NO: 877912 - protein, 169 aa, Homo sapiens; identical to SEQ ID NO: 877911

SEQ ID NO: 877913 - protein, 163 aa, Homo sapiens [sequence omitted]

SEQ ID NO: 877914 - protein, 155 aa, Homo sapiens
MSAAGAGAGVEAGFSSEELLSLRFPLHRACRDGDLATLCSLLQQTPHAHLASEDSFYGWTPVHWAAHFGKLECLVQLVRAGATLNVSTTRYAQTPAHIAAFGGHPQCLVWLIQAGANINKPDCEGETPIHKAARSGSLECISALVANGAHVELHL

SEQ ID NO: 877915 - protein, 155 aa, Homo sapiens [sequence omitted]

SEQ ID NO: 877916 - protein, 155 aa, Homo sapiens
MSAAGAGAGVEAGFSSEELLSLRFPLHRACRDGDLATLCSLLQQTPHAHLASEDSFYGWTPVHWAAHFGKLECLVQLVRAGATLNVSTTRYAQTPAHIAAFGGHPQCLVWLIQAGANINKPDCEGETPIHKAARSGSLECISALVANGAHVENSY

SEQ ID NO: 877917 - protein, 169 aa, Homo sapiens; identical to SEQ ID NO: 877911

SEQ ID NO: 877918 - protein, 220 aa, Homo sapiens; identical to SEQ ID NO: 877907

SEQ ID NO: 877919 - protein, 152 aa, Homo sapiens
MSAAGAGAGVEAGFSSEELLSLRFPLHRACRDGDLATLCSLLQQTPHAHLASEDSFYGWTPVHWAAHFGKLECLVQLVRAGATLNVSTTRYAQTPAHIAAFGGHPQCLVWLIQAGANINKPDCEGETPIHKAARSGSLECISALVANGAHVE

SEQ ID NO: 877920 - protein, 263 aa, Homo sapiens
MITFLPLLLGLSLGCTGAGGFVAHVESTCLLDDAGTPKDFTYCISFNKDLLTCWDPEENKMAPCEFGVLNSLANVLSQHLNQKDTLMQRLRNGLQNCATHTQPFWGSLTNRTRPPSVQVAKTTPFNTREPVMLACYVWGFYPAEVTITWRKNGKLVMPHSSAHKTAQPNGDWTYQTLSHLALTPSYGDTYTCVVEHIGAPEPILRDWTPGLSPMQTLKVSVSAVTLGLGLIIFSLGVISWRRAGHSSYTPLPGSNYSEGWHIS

SEQ ID NO: 877921 - protein, 274 aa, Homo sapiens
MGHEQNQGAALLQMLPLLWLLPHSWAVPEGGFVAHVESTCLLDDAGTPKDFTYCISFNKDLLTCWDPEENKMAPCEFGVLNSLANVLSQHLNQKDTLMQRLRNGLQNCATHTQPFWGSLTNRTRPPSVQVAKTTPFNTREPVMLACYVWGFYPAEVTITWRKNGKLVMPHSSAHKTAQPNGDWTYQTLSHLALTPSYGDTYTCVVEHIGAPEPILRDWTPGLSPMQTLKVSVSAVTLGLGLIIFSLGVISWRRAGHSSYTPLPGSNYSEGWHIS

SEQ ID NO: 877922 - protein, 268 aa, Homo sapiens
MRARTGVYRCQLLLGLSLGCTGAGGFVAHVESTCLLDDAGTPKDFTYCISFNKDLLTCWDPEENKMAPCEFGVLNSLANVLSQHLNQKDTLMQRLRNGLQNCATHTQPFWGSLTNRTRPPSVQVAKTTPFNTREPVMLACYVWGFYPAEVTITWRKNGKLVMPHSSAHKTAQPNGDWTYQTLSHLALTPSYGDTYTCVVEHIGAPEPILRDWTPGLSPMQTLKVSVSAVTLGLGLIIFSLGVISWRRAGHSSYTPLPGSNYSEGWHIS

SEQ ID NO: 877923 - protein, 245 aa, Homo sapiens
MITFLPLLLGLSLGCTGAGGFVAHVESTCLLDDAGTPKDFTYCISFNKDLLTCWDPEENKMAPCEFGVLNSLANVLSQHLNQKDTLMQRLRNGLQNCATHTQPFWGSLTNRTRPPSVQVAGFYPAEVTITWRKNGKLVMPHSSAHKTAQPNGDWTYQTLSHLALTPSYGDTYTCVVEHIGAPEPILRDWTPGLSPMQTLKVSVSAVTLGLGLIIFSLGVISWRRAGHSSYTPLPGSNYSEGWHIS

SEQ ID NO: 877924 - protein, 224 aa, Homo sapiens [sequence omitted]

SEQ ID NO: 877925 - protein, 140 aa, Homo sapiens
MITFLPLLLGLSLGCTGAGGFVAHVESTCLLDDAGTPKDFTYCISFNKDLLTCWDPEENKMAPCEFGVLNSLANVLSQHLNQKDTLMQRLRNGLQNCATHTQPFWGSLTNRTREERGVQRGYQEVQLGGQAREDPTVAQG

SEQ ID NO: 877926 - protein, 212 aa, Homo sapiens [sequence omitted]

SEQ ID NO: 877927 - protein, 295 aa, Homo sapiens
MGHEQNQGAALLQMLPLLWLLPHSWAVPEEQSMITFLPLLLGLSLGCTGAGGFVAHVESTCLLDDAGTPKDFTYCISFNKDLLTCWDPEENKMAPCEFGVLNSLANVLSQHLNQKDTLMQRLRNGLQNCATHTQPFWGSLTNRTRPPSVQVAKTTPFNTREPVMLACYVWGFYPAEVTITWRKNGKLVMPHSSAHKTAQPNGDWTYQTLSHLALTPSYGDTYTCVVEHIGAPEPILRDWTPGLSPMQTLKVSVSAVTLGLGLIIFSLGVISWRRAGHSSYTPLPGSNYSEGWHIS

SEQ ID NO: 877928 - protein, 230 aa, Homo sapiens
CSTCPVPVMYRSMTKRRETRIDGHSINDTCNEYNVHYGGGGGLHSAIRPSIHSWNRLCNGGEYALWWRGEHSCPLTNTTRPPSVQVAKTTPFNTREPVMLACYVWGFYPAEVTITWRKNGKLVMPHSSAHKTAQPNGDWTYQTLSHLALTPSYGDTYTCVVEHIGAPEPILRDWTPGLSPMQTLKVSVSAVTLGLGLIIFSLGVISWRRAGHSSYTPLPGSNYSEGWHIS

SEQ ID NO: 877929 - protein, 251 aa, Homo sapiens [sequence omitted]

SEQ ID NO: 877930 - protein, 660 aa, Homo sapiens
PGPVLVQSIKKIKSTKALCGLDGLSTSQVQLSQSHSIHLPAMKNYLFSRNCQVKYSHIKPPFDVPGVPPESSHQTTSSPSAPGNAPSLAYGATQTVLSAFPCNAEAHLPSLGKQRPDVRPQRVKRQQLKPSESSPNRNNHRCQLRARGKRRCAPADCRFPGREPGSRWSVPVRNHGENPALLREKGSRFPRASYRHGAKTARVADQSNRQADQWAARVREDPDGGAGWREGGSFKASLTWLWPLGEMKLHCEVEVISRHLPALGLRNRGKGVRAVLSLCQQTSRSQPPVRAFLLISTLKDKRGTRYELRENIEQFFTKFVDEGKATVRLKEPPVDICLSKAISSSLKGFLSAMRLAHRGCNVDTPVSTLTPVKTSEFENFKTKMVITSKKDYPLSKNFPYSLEHLQTSYCGLVRVDMRMLCLKSLRKLDLSHNHIKKLPATIGDLIHLQELNLNDNHLESFSVALCHSTLQKSLRSLDLSKNKIKALPVQFCQLQELKNLKLDDNELIQFPCKIGQLINLRFLSAARNKLPFLPSEFRNLSLEYLDLFGNTFEQPKVLPVIKLQAPLTLLESSARTILHNRIPYGSHIIPFHLCQDLDTAKICVCGRFCLNSFIQGTTTMNLHSVAHTVVLVDNLGGTEAPIISYFCSLGCYVNSSDMLK

SEQ ID NO: 877931 - protein, 392 aa, Homo sapiens
PGPVLVQSIKKIKSTKALCGLDGLSTSQVQLSQSHSIHLPAMKNYLFSRNCQVKYSHIKPPFDVPGVPPESSHQTTSSPSAPGNAPSLAYGATQTVLSAFPCNAEAHLPSLGKQRPDVRPQRVKRQQLKPSESSPNRNNHRCQLRARGKRRCAPADCRFPGREPGSRWSVPVRNHGENPALLREKGSRFPRASYRHGAKTARVADQSNRQADQWAARVREDPDGGAGWREGGSFKASLTWLWPLGEMKLHCEVEVISRHLPALGLRNRGKGVRAVLSLCQQTSRSQPPVRAFLLISTLKDKRGTRYELRENIEQFFTKFVDEGKATVRLKEPPVDICLSKDSIWLSYHSIPSLPRFGYRKNLCLWKILSELFHSRNYYHESAFCCPHCGLSR

SEQ ID NO: 877932 - protein, 379 aa, Homo sapiens
PGPVLVQSIKKIKSTKALCGLDGLSTSQVQLSQSHSIHLPAMKNYLFSRNCQVKYSHIKPPFDVPGVPPESSHQTTSSPSAPGNAPSLAYGATQTVLSAFPCNAEAHLPSLGKQRPDVRPQRVKRQQLKPSESSPNRNNHRCQLRARGKRRCAPADCRFPGREPGSRWSVPVRNHGENPALLREKGSRFPRASYRHGAKTARVADQSNRQADQWAARVREDPDGGAGWREGGSFKASLTWLWPLGEMKLHCEVEVISRHLPALGLRNRGKGVRAVLSLCQQTSRSQPPVRAFLLISTLKDKRGTRYELRENIEQFFTKFVDEGKATVRLKEPPVDICLSKMESHSVSQVGVQWEELGSLQPTGHFQQFKRFPFSYETGS

SEQ ID NO: 877933 - protein, 308 aa, Homo sapiens [sequence omitted]

SEQ ID NO: 877934 - protein, 392 aa, Homo sapiens; identical to SEQ ID NO: 877931

SEQ ID NO: 877935 - protein, 374 aa, Homo sapiens
PGPVLVQSIKKIKSTKALCGLDGLSTSQVQLSQSHSIHLPAMKNYLFSRNCQVKYSHIKPPFDVPGVPPESSHQTTSSPSAPGNAPSLAYGATQTVLSAFPCNAEAHLPSLGKQRPDVRPQRVKRQQLKPSESSPNRNNHRCQLRARGKRRCAPADCRFPGREPGSRWSVPVRNHGENPALLREKGSRFPRASYRHGAKTARVADQSNRQADQWAARVREDPDGGAGWREGGSFKASLTWLWPLGEMKLHCEVEVISRHLPALGLRNRGKGVRAVLSLCQQTSRSQPPVRAFLLISTLKDKRGTRYEVREVGRPCQSRVLLGSRDAGHPRSSCSRLLPRRKPALGVPELPALRPTISPTPGSCASSYGPERRKL

SEQ ID NO: 877936 - protein, 581 aa, Homo sapiens
PGPVLVQSIKKIKSTKALCGLDGLSTSQVQLSQSHSIHLPAMKNYLFSRNCQVKYSHIKPPFDVPGVPPESSHQTTSSPSAPGNAPSLAYGATQTVLSAFPCNAEAHLPSLGKQRPDVRPQRVKRQQLKPSESSPNRNNHRCQLRARGKRRCAPADCRFPGREPGSRWSVPVRNHGENPALLREKGSRFPRASYRHGAKTARVADQSNRQADQWAARVREDPDGGAGWREGGSFKASLTWLWPLGEMKLHCEVEVISRHLPALGLRNRGKGVRAVLSLCQQTSRSQPPVRAFLLISTLKDKRGTRYELRENIEQFFTKFVDEGKATVRLKEPPVDICLSKAISSSLKGFLSAMRLAHRGCNVDTPVSTLTPVKTSEFENFKTKMVITSKKDYPLSKNFPYSLEHLQTSYCGLVRVDMRMLCLKSLRKLDLSHNHIKKLPATIGDLIHLQELNLNDNHLESFSVALCHSTLQKSLRSLDLSKNKIKALPVQFCQLQELKNLKLDDNELIQFPCKIGQLINLRFLSAARNKLPFLPSEFRNLSLEYLDLFGNTFEQPKVLPVIKLQAPLTLLESSARTILHNR

SEQ ID NO: 877937 - protein, 147 aa, Homo sapiens
MALKRINKELSDLARDPPAQCSAGPVGDDMFHWQATIMGPNDSPYQGGVFFLTIHFPTDYPFKPPKVAFTTRIYHPNINSNGSICLDILRSQWSPALTISKVLLSICSLLCDPNPDDPLVPEIARIYKTDRDKYNRISREWTQKYAM

SEQ ID NO: 877938 - protein, 149 aa, Homo sapiens
MLSNRKCLSKELSDLARDPPAQCSAGPVGDDMFHWQATIMGPNDSPYQGGVFFLTIHFPTDYPFKPPKVAFTTRIYHPNINSNGSICLDILRSQWSPALTISKVLLSICSLLCDPNPDDPLVPEIARIYKTDRDKYNRISREWTQKYAM

SEQ ID NO: 877939 - protein, 147 aa, Homo sapiens; identical to SEQ ID NO: 877937

SEQ ID NO: 877940 - protein, 147 aa, Homo sapiens; identical to SEQ ID NO: 877937

SEQ ID NO: 877941 - protein, 147 aa, Homo sapiens; identical to SEQ ID NO: 877937

SEQ ID NO: 877942 - protein, 147 aa, Homo sapiens; identical to SEQ ID NO: 877937

SEQ ID NO: 877943 - protein, 147 aa, Homo sapiens; identical to SEQ ID NO: 877937

SEQ ID NO: 877944 - protein, 147 aa, Homo sapiens; identical to SEQ ID NO: 877937

SEQ ID NO: 877945 - protein, 147 aa, Homo sapiens; identical to SEQ ID NO: 877937

SEQ ID NO: 877946 - protein, 147 aa, Homo sapiens; identical to SEQ ID NO: 877937

SEQ ID NO: 877947 - protein, 147 aa, Homo sapiens; identical to SEQ ID NO: 877937

SEQ ID NO: 877948 - protein, 147 aa, Homo sapiens; identical to SEQ ID NO: 877937

SEQ ID NO: 877949 - protein, 147 aa, Homo sapiens; identical to SEQ ID NO: 877937

SEQ ID NO: 877950 - protein, 110 aa, Homo sapiens
MGPNDSPYQGGVFFLTIHFPTDYPFKPPKVAFTTRIYHPNINSNGSICLDILRSQWSPALTISKVLLSICSLLCDPNPDDPLVPEIARIYKTDRDKYNRISREWTQKYAM

SEQ ID NO: 877951 - protein, 110 aa, Homo sapiens; identical to SEQ ID NO: 877950

SEQ ID NO: 877952 - protein, 147 aa, Homo sapiens; identical to SEQ ID NO: 877937

SEQ ID NO: 877953 - protein, 147 aa, Homo sapiens; identical to SEQ ID NO: 877937

SEQ ID NO: 877954 - protein, 125 aa, Homo sapiens
MALKRINKELSDLARDPPAQCSAGPVGDDMFHWQATIMGPNDSPYQGGVFFLTIHFPTDYPFKPPKVAFTTRIYHPNINSNGSICLDILRSQWSPALTISKVLLSICSLLCDPNPDDPLVPVMLP

SEQ ID NO: 877955 - protein, 147 aa, Homo sapiens; identical to SEQ ID NO: 877937

SEQ ID NO: 877956 - protein, 147 aa, Homo sapiens; identical to SEQ ID NO: 877937

SEQ ID NO: 877957 - protein, 148 aa, Homo sapiens
MALKRINKELSDLARDPPAQCSAGPVGDDMFHWQATIMGPNDSPYQGGVFFLTIHFPTDYPFKPPKVAFTTRIYHPNINSNGSICLDILRSQWSPALTISKVLLSICSLLCDPNPDDPLVPEIARIYKTDRDKYNRLAREWTEKYAML

SEQ ID NO: 877958 - protein, 136 aa, Homo sapiens
MALKRINKELSDLARDPPAQCSAGPVGDDMFHWQATIMGPNDSPYQGGVFFLTIHFPTDYPFKPPKVAFTTRIYHPNINSNGSICLDILRSKGRRCTIPKSLSLGHGIDPTKGPYGERPVLHSRDSPEFRWPSVGT

SEQ ID NO: 877959 - protein, 123 aa, Homo sapiens
MALKRINKELSDLARDPPAQCSAGPVGDDMFHWQATIMGPNDSPYQGGVFFLTIHFPTDYPFKPPKVAFTTRIYHPNINSNGSICLDILRSQWSPALTISKVLLSICSLLCDPNPDDPLVPGS

SEQ ID NO: 877960 - protein, 110 aa, Homo sapiens; identical to SEQ ID NO: 877950

SEQ ID NO: 877961 - protein, 147 aa, Homo sapiens; identical to SEQ ID NO: 877937

SEQ ID NO: 877962 - protein, 147 aa, Homo sapiens; identical to SEQ ID NO: 877937

SEQ ID NO: 877963 - protein, 147 aa, Homo sapiens; identical to SEQ ID NO: 877937

SEQ ID NO: 877964 - protein, 147 aa, Homo sapiens; identical to SEQ ID NO: 877937

SEQ ID NO: 877965 - protein, 147 aa, Homo sapiens; identical to SEQ ID NO: 877937

SEQ ID NO: 877966 - protein, 147 aa, Homo sapiens; identical to SEQ ID NO: 877937

SEQ ID NO: 877967 - protein, 147 aa, Homo sapiens; identical to SEQ ID NO: 877937

SEQ ID NO: 877968 - protein, 147 aa, Homo sapiens; identical to SEQ ID NO: 877937

SEQ ID NO: 877969 - protein, 110 aa, Homo sapiens; identical to SEQ ID NO: 877950

SEQ ID NO: 877970 - protein, 138 aa, Homo sapiens
ISSPGERDSSTMFVQVIGDDMFHWQATIMGPNDSPYQGGVFFLTIHFPTDYPFKPPKVAFTTRIYHPNINSNGSICLDILRSQWSPALTISKVLLSICSLLCDPNPDDPLVPEIARIYKTDRDKYNRISREWTQKYAM

SEQ ID NO: 877971 - protein, 107 aa, Homo sapiens
MALKRINKELSDLARDPPAQCSAGPVGDDMFHWQATIMGPNDSPYQGGVFFLTIHFPTDYPFKPPKVAFTTRIYHPNINSNGSICLDILRSQWSPALTISKGDCTDL

SEQ ID NO: 877972 - protein, 147 aa, Homo sapiens; identical to SEQ ID NO: 877937

SEQ ID NO: 877973 - protein, 147 aa, Homo sapiens; identical to SEQ ID NO: 877937

SEQ ID NO: 877974 - protein, 156 aa, Homo sapiens
MALKRINKELSDLARDPPAQCSAGPVGDDMFHWQATIMGPNDSPYQGGVFFLTIHFPTDYPFKPPKVAFTTRIYHPNINSNGSICLDILRSQWSPALTISKVLLSICSLLCDPNPDDPLVPEIARIYKTDRDNDHPTLPGMGPEYACYCPCSPAYR

SEQ ID NO: 877975 - protein, 130 aa, Homo sapiens
ASLVSGLPCLSALACLSALPCLSALPCLSALPCLWLYVSIILFLNKMDLLVEKVKTVSIKKHFPDFRGDPHRLEDVQRYLVQCFDRKRRNRSKPLFHHFTTAIDTENVRFVFHAVKDTILQENLKDIMLQ

SEQ ID NO: 877976 - protein, 130 aa, Homo sapiens; identical to SEQ ID NO: 877975

SEQ ID NO: 877977 - protein, 80 aa, Homo sapiens
TGMCTANSTHLPKRASHQGEQSRLKTPQLQKTNVVSCNRLIYIYATQKRNSTGNDLPKKVFKASVTSGNFRVFILPVSSH

SEQ ID NO: 877978 - protein, 104 aa, Homo sapiens
MGPCRDVFTVFVCVSVCLSVCLCLSLSGCIYCVGVCVCVCVCCVYVFVSLPGCVHRMHVYVFETHTPRDTPPLTLTSWTPGFVVVEQPPRLSVRLLGVCCLCGP

SEQ ID NO: 877979 - protein, 130 aa, Homo sapiens; identical to SEQ ID NO: 877975

SEQ ID NO: 877980 - protein, 115 aa, Homo sapiens
GQEVELWVSIKRGAAIGSPLVPSVYHSTEKSCLVCFGMCPSIYKKMKSVLLIGTRMLLWLSHISQGPRPEAVLPRAPSPSAAHPWLVFRKPGKRKPLGQMQKQKREGKPASGSPC

SEQ ID NO: 877981 - protein, 945 aa, Homo sapiens
ASTRPSQGETTLPAGGARRAQSPPGRWRLHGTAWSGAAPGQQSIPWPSLLVPAPYHRDAAWNSLLAIVDAPGRRVARGVAGLPQAVTEHPLVPGSPLRYSLVGWLSGGPDSPRSEVCSVFHSMTHRRFKVTSTVAAASLLPLQDGRRSCCANLPGCPLPGHGRGVSWQFLVLPGGLRVPPFCGRLQHIHPESLGVNTAAGDDHRLPSVQPWGCVLISAPPASCPAVQRLPMARGPAPAAPARPAQDRGGPCHSEDPPGGAEAPRVPGGPRVQLCGRPDPAGTGVSGPKTSLKACRGPEGHPRGARLGRGPYRSCTKLPTSWLGASQSLISLSVKRGIHSACLGDAEGWLSPDHRGIHSGAQGWAGSVGWGTDPRSSHEPCPTPLQGDDPEGLFAEANAVACTLDMVMAGTETTSATLQWAALLMGRHPDVQGRVQEELDRVLGPGRTPRLEDQQALPYTSAVLHEVQRFITLLPPGLPLTHAQDLTPAMSPAGPRPRPPTAVDPDAEPTLLREPQATVVFTTHVPTLGRYAFLLQLYTGGEAAWELKLPPPAVWAALQGARTQLRDVRAKKDQLEAHIQAAQAMLAMDTDETSKKIAHAKAVAAEAQDTATRVQSQLQAAAVCVGERLARTELFLLFAGLLQRYRLLPPPGVSPASLDATPARAFTMRPRAQALCAVLRPWSSPSPQVLLTTPLPALGPPTLSPPTPQLGLLWEGPEDSHPHPHPHRVSNCFRLHPGLPLPDPVGPPPLLMLSAAQSLPAPRSASRAPPTLPPLKLHSHPPSSPQGPPAPTAGAAGRQRVAASSQRQAQVGVLSVRALHPPGPGTPADPTPFPLLEHFLQLCLEAVGLQCQTLSQATGAMRMTGAGRQGPHSPSETGTGARGFLGAGEGTSAPEDKQHCSGKNGNTDPVRWFMPVIPALWEAEAGGSQGQEIETVLANMVKPCLY

SEQ ID NO: 877982 - protein, 500 aa, Homo sapiens
MAKRLCAGSALCVRGPRGPAPLLLVGLALLGAARAREEAGGGFSLHPPYFNLAEGARIAASATCGEEAPARGSPRPTEDLYCKLVGGPVAGGDPNQTIRGQYCDICTAANSNKAHPASNAIDGTERWWQSPPLSRGLEYNEVNVTLDLGQVFHVAYVLIKFANSPRPDLWVLERSMDFGRTYQPWQFFASSKRDCLERFGPQTLERITRDDAAICTTEYSRIVPLENGEIVVSLVNGRPGAMNFSYSPLLREFTKATNVRLRFLRTNTLLGHLMGKALRDPTVTRRYYYSIKDISIGGRCVCHGHADACDAKDPTDPFRLQCTCQHNTCGGTCDRCCPGFNQQPWKPATANSANECQSCNCYGHATDCYYDPEVDRRRASQSLDGTYQGGGVCIDCQHHTTGVNCERCLPGFYRSPNHPLDSPHVCRRCNCESDFTDGTCEDLTGRCYCRPNFSGERCDVCAEGFTGFPSCYPTPSSSNDTREQVLPAGQIVTNTKISWV

SEQ ID NO: 877983 - protein, 3695 aa, Homo sapiens
MAKRLCAGSALCVRGPRGPAPLLLVGLALLGAARAREEAGGGFSLHPPYFNLAEGARIAASATCGEEAPARGSPRPTEDLYCKLVGGPVAGGDPNQTIRGQYCDICTAANSNKAHPASNAIDGTERWWQSPPLSRGLEYNEVNVTLDLGQVFHVAYVLIKFANSPRPDLWVLERSMDFGRTYQPWQFFASSKRDCLERFGPQTLERITRDDAAICTTEYSRIVPLENGEIVVSLVNGRPGAMNFSYSPLLREFTKATNVRLRFLRTNTLLGHLMGKALRDPTVTRRYYYSIKDISIGGRCVCHGHADACDAKDPTDPFRLQCTCQHNTCGGTCDRCCPGFNQQPWKPATANSANECQSCNCYGHATDCYYDPEVDRRRASQSLDGTYQGGGVCIDCQHHTTGVNCERCLPGFYRSPNHPLDSPHVCRRCNCESDFTDGTCEDLTGRCYCRPNFSGERCDVCAEGFTGFPSCYPTPSSSNDTREQVLPAGQIVNCDCSAAGTQGNACRKDPRVGRCLCKPNFQGTHCELCAPGFYGPGCQPCQCSSPGVADDRCDPDTGQCRCRVGFEGATCDRCAPGYFHFPLCQLCGCSPAGTLPEGCDEAGRCLCQPEFAGPHCDRCRPGYHGFPNCQACTCDPRGALDQLCGAGGLCRCRPGYTGTACQECSPGFHGFPSCVPCHCSAEGSLHAACDPRSGQCSCRPRVTGLRCDTCVPGAYNFPYCEAGSCHPAGLAPVDPALPEAQVPCMCRAHVEGPSCDRCKPGFWGLSPSNPEGCTRCSCDLRGTLGGVAECQPGTGQCFCKPHVCGQACASCKDGFFGLDQADYFGCRSCRCDIGGALGQSCEPRTGVCRCRPNTQGPTCSEPARDHYLPDLHHLRLELEEAATPEGHAVRFGFNPLEFENFSWRGYAQMAPVQPRIVARLNLTSPDLFWLVFRYVNRGAMSVSGRVSVREEGRSATCANCTAQSQPVAFPPSTEPAFITVPQRGFGEPFVLNPGTWALRVEAEGVLLDYVVLLPSAYYEAALLQLRVTEACTYRPSAQQSGDNCLLYTHLPLDGFPSAAGLEALCRQDNSLPRPCPTEQLSPSHPPLITCTGSDVDVQLQVAVPQPGRYALVVEYANEDARQEVGVAVHTPQRAPQQGLLSLHPCLYSTLCRGTARDTQDHLAVFHLDSEASVRLTAEQARFFLHGVTLVPIEEFSPEFVEPRVSCISSHGAFGPNSAACLPSRFPKPPQPIILRDCQVIPLPPGLPLTHAQDLTPAMSPAGPRPRPPTAVDPDAEPTLLREPQATVVFTTHVPTLGRYAFLLHGYQPAHPTFPVEVLINAGRVWQGHANASFCPHGYGCRTLVVCEGQALLDVTHSELTVTVRVPEGRWLWLDYVLVVPENVYSFGYLREEPLDKSYDFISHCAAQGYHISPSSSSLFCRNAAASLSLFYNNGARPCGCHEVGATGPTCEPFGGQCPCHAHVIGRDCSRCATGYWGFPNCRPCDCGARLCDELTGQCICPPRTIPPDCLLCQPQTFGCHPLVGCEECNCSGPGIQELTDPTCDTDSGQCKCRPNVTGRRCDTCSPGFHGYPRCRPCDCHEAGTAPGVCDPLTGQCYCKENVQGPKCDQCSLGTFSLDAANPKGCTRCFCFGATERCRSSSYTRQEFVDMEGWVLLSTDRQVVPHERQPGTEMLRADLRHVPEAVPEAFPELYWQAPPSYLGDRVSSYGGTLRYELHSETQRGDVFVPMESRPDVVLQGNQMSITFLEPAYPTPGHVHRGQLQLVEGNFRHTETRNTVSREELMMVLASLEQLQIRALFSQISSAVSLRRVALEVASPAGQGALASNVELCLCPASYRGDSCQECAPGFYRDVKGLFLGRCVPCQCHGHSDRCLPGSGVCVDCQHNTEGAHCERCQAGFMSSRDDPSAPCVSCPCPLSVPSNNFAEGCVLRGGRTQCLCKPGYAGASCERCAPGFFGNPLVLGSSCQPCDCSGNGDPNLLFSDCDPLTGACRGCLRHTTGPRCEICAPGFYGNALLPGNCTRCDCTPCGTEACDPHSGHCLCKAGVTGRRCDRCQEGHFGFNGCGGCRPCACGPAAEGSECHPQSGQCHCRPGTMGPQCRECAPGYWGLPEQGCRRCQCPGGRCDPHTGRCNCPPGLSGERCDTCSQQHQVPVPGGPVGHSIHCEVCDHCVVLLLDDLERAGALLPAIHEQLRGINASSMAWARLHRLNASIADLQSQLRSPLGPRHETAQQLEVLEQQSTSLGQDARRLGGQAVGTRDQASQLLAGTEATLGHAKTLLAAIRAVDRTLSELMSQTGHLGLANASAPSGEQLLRTLAEVERLLWEMRARDLGAPQAAAEAELAAAQRLLARVQEQLSSLWEENQALATQTRDRLAQHEAGLMDLREALNRAVDATREAQELNSRNQERLEEALQRKQELSRDNATLQATLHAARDTLASVFRLLHSLDQAKEELERLAASLDGARTPLLQRMQTFSPAGSKLRLVEAAEAHAQQLGQLALNLSSIILDVNQDRLTQRAIEASNAYSRILQAVQAAEDAAGQALQQADHTWATVVRQGLVDRAQQLLANSTALEEAMLQEQQRLGLVWAALQGARTQLRDVRAKKDQLEAHIQAAQAMLAMDTDETSKKIAHAKAVAAEAQDTATRVQSQLQAMQENVERWQGQYEGLRGQDLGQAVLDAGHSVSTLEKTLPQLLAKLSILENRGVHNASLALSASIGRVRELIAQARGAASKVKVPMKFNGRSGVQLRTPRDLADLAAYTALKFYLQGPEPEPGQGTEDRFVMYMGSRQATGDYMGVSLRDKKVHWVYQLGEAGPAVLSIDEDIGEQFAAVSLDRTLQFGHMSVTVERQMIQETKGDTVAPGAEGLLNLRPDDFVFYVGGYPSTFTPPPLLRFPGYRGCIEMDTLNEEVVSLYNFERTFQLDTAVDRPCARSKSTGDPWLTDGSYLDGTGFARISFDSQISTTKRFEQELRLVSYSGVLFFLKQQSQFLCLAVQEGSLVLLYDFGAGLKKAVPLQPPPPLTSASKAIQVFLLGGSRKRVLVRVERATVYSVEQDNDLELADAYYLGGVPPDQLPPSLRWLFPTGGSVRGCVKGIKALGKYVDLKRLNTTGVSAGCTADLLVGRAMTFHGHGFLRLALSNVAPLTGNVYSGFGFHSAQDSALLYYRASPDGLCQVSLQQGRVSLQLLRTEVKTQAGFADGAPHYVAFYSNATGVWLYVDDQLQQMKPHRGPPPELQPQPEGPPRLLLGGLPESGTIYNFSGCISNVFVQRLLGPQRVFDLQQNLGSVNVSTGCAPALQAQTPGLGPRGLQATARKASRRSRQPARHPACMLPPHLRTTRDSYQFGGSLSSHLEFVGILARHRNWPSLSMHVLPRSSRGLLLFTARLRPGSPSLALFLSNGHFVAQMEGLGTRLRAQSRQRSRPGRWHKVSVRWEKNRILLVTDGARAWSQEGPHRQHQGAEHPQPHTLFVGGLPASSHSSKLPVTVGFSGCVKRLRLHGRPLGAPTRMAGVTPCILGPLEAGLFFPGSGGVITLDLPGATLPDVGLELEVRPLAVTGLIFHLGQARTPPYLQLQVTEKQVLLRADDGAGEFSTSVTRPSVLCDGQWHRLAVMKSGNVLRLEVDAQSNHTVGPLLAAAAGAPAPLYLGGLPEPMAVQPWPPAYCGCMRRLAVNRSPVAMTRSVEVHGAVGASGCPAA

SEQ ID NO: 877984 - protein, 3695 aa, Homo sapiens; identical to SEQ ID NO: 877983

SEQ ID NO: 877985 - protein, 3526 aa, Homo sapiens
MAKRLCAGSALCVRGPRGPAPLLLVGLALLGAARAREEAGGGFSLHPPYFNLAEGARIAASATCGEEAPARGSPRPTEDLYCKLVGGPVAGGDPNQTIRGQYCDICTAANSNKAHPASNAIDGTERWWQSPPLSRGLEYNEVNVTLDLGQVFHVAYVLIKFANSPRPDLWVLERSMDFGRTYQPWQFFASSKRDCLERFGPQTLERITRDDAAICTTEYSRIVPLENGEIVVSLVNGRPGAMNFSYSPLLREFTKATNVRLRFLRTNTLLGHLMGKALRDPTVTRRYYYSIKDISIGGRCVCHGHADACDAKDPTDPFRLQCTCQHNTCGGTCDRCCPGFNQQPWKPATANSANECQSCNCYGHATDCYYDPEVDRRRASQSLDGTYQGGGVCIDCQHHTTGVNCERCLPGFYRSPNHPLDSPHVCRRCNCESDFTDGTCEDLTGRCYCRPNFSGERCDVCAEGFTGFPSCYPTPSSSNDTREQVLPAGQIVNCDCSAAGTQGNACRKDPRVGRCLCKPNFQGTHCELCAPGFYGPGCQPCQCSSPGVADDRCDPDTGQCRCRVGFEGATCDRCAPGYFHFPLCQLCGCSPAGTLPEGCDEAGRCLCQPEFAGPHCDRCRPGYHGFPNCQACTCDPRGALDQLCGAGGLCRCRPGYTGTACQECSPGFHGFPSCVPCHCSAEGSLHAACDPRSGQCSCRPRVTGLRCDTCVPGAYNFPYCEAGSCHPAGLAPVDPALPEAQVPCMCRAHVEGPSCDRCKPGFWGLSPSNPEGCTRCSCDLRGTLGGVAECQPGTGQCFCKPHVCGQACASCKDGFFGLDQADYFGCRSCRCDIGGALGQSCEPRTGVCRCRPNTQGPTCSEPARDHYLPDLHHLRLELEEAATPEGHAVRFGFNPLEFENFSWRGYAQMAPVQPRIVARLNLTSPDLFWLVFRYVNRGAMSVSGRVSVREEGRSATCANCTAQSQPVAFPPSTEPAFITVPQRGFGEPFVLNPGTWALRVEAEGVLLDYVVLLPSAYYEAALLQLRVTEACTYRPSAQQSGDNCLLYTHLPLDGFPSAAGLEALCRQDNSLPRPCPTEQLSPSHPPLITCTGSDVDVQLQVAVPQPGRYALVVEYANEDARQEVGVAVHTPQRAPQQGLLSLHPCLYSTLCRGTARDTQDHLAVFHLDSEASVRLTAEQARFFLHGVTLVPIEEFSPEFVEPRVSCISSHGAFGPNSAACLPSRFPKPPQPIILRDCQVIPLPPGLPLTHAQDLTPAMSPAGPRPRPPTAVDPDAEPTLLREPQATVVFTTHVPTLGRYAFLLHGYQPAHPTFPVEVLINAGRVWQGHANASFCPHGYGCRTLVVCEGQALLDVTHSELTVTVRVPEGRWLWLDYVLVVPENVYSFGYLREEPLDKSYDFISHCAAQGYHISPSSSSLFCRNAAASLSLFYNNGARPCGCHEVGATGPTCEPFGGQCPCHAHVIGRDCSRCATGYWGFPNCRPCDCGARLCDELTGQCICPPRTIPPDCLLCQPQTFGCHPLVGCEECNCSGPGIQELTDPTCDTDSGQCKCRPNVTGRRCDTCSPGFHGYPRCRPCDCHEAGTAPGVCDPLTGQCYCKENVQGPKCDQCSLGTFSLDAANPKGCTRCFCFGATERCRSSSYTRQEFVDMEGWVLLSTDRQVVPHERQPGTEMLRADLRHVPEAVPEAFPELYWQAPPSYLGDRVSSYGGTLRYELHSETQRGDVFVPMESRPDVVLQGNQMSITFLEPAYPTPGHVHRGQLQLVEGNFRHTETRNTVSREELMMVLASLEQLQIRALFSQISSAVSLRRVALEVASPAGQGALASNVELCLCPASYRGDSCQECAPGFYRDVKGLFLGRCVPCQCHGHSDRCLPGSGVCVDCQHNTEGAHCERCQAGFMSSRDDPSAPCVSCPCPLSVPSNNFAEGCVLRGGRTQCLCKPGYAGASCERCAPGFFGNPLVLGSSCQPCDCSGNGDPNLLFSDCDPLTGACRGCLRHTTGPRCEICAPGFYGNALLPGNCTRCDCTPCGTEACDPHSGHCLCKAGVTGRRCDRCQEGHFGFNGCGGCRPCACGPAAEGSECHPQSGQCHCRPGTMGPQCRECAPGYWGLPEQGCRRCQCPGGRCDPHTGRCNCPPGLSGERCDTCSQQHQVPVPGGPVGHSIHCEVCDHCVVLLLDDLERAGALLPAIHEQLRGINASSMAWARLHRLNASIADLQSQLRSPLGPRHETAQQLEVLEQQSTSLGQDARRLGGQAVGTRDQASQLLAGTEATLGHAKTLLAAIRAVDRTLSELMSQTGHLGLANASAPSGEQLLRTLAEVERLLWEMRARDLGAPQAAAEAELAAAQRLLARVQEQLSSLWEENQALATQTRDRLAQHEAGLMDLREALNRAVDATREAQELNSRNQERLEEALQRKQELSRDNATLQATLHAARDTLASVFRLLHSLDQAKEELERLAASLDGARTPLLQRMQTFSPAGSKLRLVEAAEAHAQQLGQLALNLSSIILDVNQDRLTQRAIEASNAYSRILQAVQAAEDAAGQALQQADHTWATVVRQGLVDRAQQLLANSTALEEAMLQEQQRLGLVWAALQGARTQLRDVRAKKDQLEAHIQAAQAMLAMDTDETSKKIAHAKAVAAEAQDTATRVQSQLQAMQENVERWQGQYEGLRGQDLGQAVLDAGHSVSTLEKTLPQLLAKLSILENRGVHNASLALSASIGRVRELIAQARGAASKVGESPRGRWTSGRVVVELMDRAPQVKVPMKFNGRSGVQLRTPRDLADLAAYTALKFYLQGPEPEPGQGTEDRFVMYMGSRQVPGWLGGCGPSSGSVWKGAVPGPWSPVPIPTVCLSLPQATGDYMGVSLRDKKVHWVYQLGEAGPAVLSIDEDIGEQFAAVSLDRTLQFGHMSVTVERQMIQETKGDTVAPGAEGLLNLRPDDFVFYVGGYPSTFTPPPLLRFPGYRGCIEMDTLNEEVVSLYNFERTFQLDTAVDRPCARSKSTGDPWLTDGSYLDGTGFARISFDSQISTTKRFEQELRLVSYSGVLFFLKQQIQVFLLGGSRKRVLVRVERATVYSVEQDNDLELADAYYLGGVPPDQLPPSLRWLFPTGGSVRGCVKGIKALGKYVDLKRLNTTGVSAGCTADLLVGRAMTFHGHGFLRLALSNVAPLTGNVYSGFGFHSAQDSALLYYRASPDGLCQVSLQQGRVSLQLLRTEVKTQAGFADGAPHYVAFYSNATGVWLYVDDQLQQMKPHRGPPPELQPQPEGPPRLLLGGLPESGTIYNFSGCISNVFVQRLLGPQRVFDLQQNLGSVNVSTGCAPALQAQTPGLGPRGLQATARKASRRSRQPARHPACMLPPHLRTTRDSYQFGGSLSSHLEFVGILARHRNWPSLSMHVLPRSSRGLLLFTARLRPGSPSLALFLSNGHFVAQMEGLGTRLRAQSRQRSRPGRWHKVSVRWEKNRILLVTDGARAWSQEGPHRQHQGAEHPQPHTLFVGGLPASSHSSKLPTSQELHCLMWAWNWRCGPWQSPD

SEQ ID NO: 877986 - protein, 3828 aa, Homo sapiens
MAKRLCAGSALCVRGPRGPAPLLLVGLALLGAARAREEAGGGFSLHPPYFNLAEGARIAASATCGEEAPARGSPRPTEDLYCKLVGGPVAGGDPNQTIRGQYCDICTAANSNKAHPASNAIDGTERWWQSPPLSRGLEYNEVNVTLDLGQVFHVAYVLIKFANSPRPDLWVLERSMDFGRTYQPWQFFASSKRDCLERFGPQTLERITRDDAAICTTEYSRIVPLENGEIVVSLVNGRPGAMNFSYSPLLREFTKATNVRLRFLRTNTLLGHLMGKALRDPTVTRRYYYSIKDISIGGRCVCHGHADACDAKDPTDPFRLQCTCQHNTCGGTCDRCCPGFNQQPWKPATANSANECQSCNCYGHATDCYYDPEVDRRRASQSLDGTYQGGGVCIDCQHHTTGVNCERCLPGFYRSPNHPLDSPHVCRRCNCESDFTDGTCEDLTGRCYCRPNFSGERCDVCAEGFTGFPSCYPTPSSSNDTREQVLPAGQIVNCDCSAAGTQGNACRKDPRVGRCLCKPNFQGTHCELCAPGFYGPGCQPCQCSSPGVADDRCDPDTGQCRCRVGFEGATCDRCAPGYFHFPLCQLCGCSPAGTLPEGCDEAGRCLCQPEFAGPHCDRCRPGYHGFPNCQACTCDPRGALDQLCGAGGLCRCRPGYTGTACQECSPGFHGFPSCVPCHCSAEGSLHAACDPRSGQCSCRPRVTGLRCDTCVPGAYNFPYCEAGSCHPAGLAPVDPALPEAQVPCMCRAHVEGPSCDRCKPGFWGLSPSNPEGCTRCSCDLRGTLGGVAECQPGTGQCFCKPHVCGQACASCKDGFFGLDQADYFGCRSCRCDIGGALGQSCEPRTGVCRCRPNTQGPTCSEPARDHYLPDLHHLRLELEEAATPEGHAVRFGFNPLEFENFSWRGYAQMAPVQPRIVARLNLTSPDLFWLVFRYVNRGAMSVSGRVSVREEGRSATCANCTAQSQPVAFPPSTEPAFITVPQRGFGEPFVLNPGTWALRVEAEGVLLDYVVLLPSAYYEAALLQLRVTEACTYRPSAQQSGDNCLLYTHLPLDGFPSAAGLEALCRQDNSLPRPCPTEQLSPSHPPLITCTGSDVDVQLQVAVPQPGRYALVVEYANEDARQEVGVAVHTPQRAPQQGLLSLHPCLYSTLCRGTARDTQDHLAVFHLDSEASVRLTAEQARFFLHGVTLVPIEEFSPEFVEPRVSCISSHGAFGPNSAACLPSRFPKPPQPIILRDCQVIPLPPGLPLTHAQDLTPAMSPAGPRPRPPTAVDPDAEPTLLREPQATVVFTTHVPTLGRYAFLLHGYQPAHPTFPVEVLINAGRVWQGHANASFCPHGYGCRTLVVCEGQALLDVTHSELTVTVRVPEGRWLWLDYVLVVPENVYSFGYLREEPLDKSYDFISHCAAQGYHISPSSSSLFCRNAAASLSLFYNNGARPCGCHEVGATGPTCEPFGGQCPCHAHVIGRDCSRCATGYWGFPNCRREYPSPWAPSGRELVPEPKVDGSTRKQGQENVLEPGRAALLPHLRAWAQDFSLRAMQKVSGTSRWSTVSDDDVDSEQLPPCQELSKAQHPGQGSLFLSPPPPSHCHIPYGLHSGPLRGAGLGRGVSKPCTRPTACDCGARLCDELTGQCICPPRTIPPDCLLCQPQTFGCHPLVGCEECNCSGPGIQELTDPTCDTDSGQCKCRPNVTGRRCDTCSPGFHGYPRCRPCDCHEAGTAPGVCDPLTGQCYCKENVQGPKCDQCSLGTFSLDAANPKGCTRCFCFGATERCRSSSYTRQEFVDMEGWVLLSTDRQVVPHERQPGTEMLRADLRHVPEAVPEAFPELYWQAPPSYLGDRVSSYGGTLRYELHSETQRGDVFVPMESRPDVVLQGNQMSITFLEPAYPTPGHVHRGQLQLVEGNFRHTETRNTVSREELMMVLASLEQLQIRALFSQISSAVSLRRVALEVASPAGQGALASNVELCLCPASYRGDSCQECAPGFYRDVKGLFLGRCVPCQCHGHSDRCLPGSGVCVDCQHNTEGAHCERCQAGFMSSRDDPSAPCVSCPCPLSVPSNNFAEGCVLRGGRTQCLCKPGYAGASCERCAPGFFGNPLVLGSSCQPCDCSGNGDPNLLFSDCDPLTGACRGCLRHTTGPRCEICAPGFYGNALLPGNCTRCDCTPCGTEACDPHSGHCLCKAGVTGRRCDRCQEGHFGFNGCGGCRPCACGPAAEGSECHPQSGQCHCRPGTMGPQCRECAPGYWGLPEQGCRRCQCPGGRCDPHTGRCNCPPGLSGERCDTCSQQHQVPVPGGPVGHSIHCEVCDHCVVLLLDDLERAGALLPAIHEQLRGINASSMAWARLHRLNASIADLQSQLRSPLGPRHETAQQLEVLEQQSTSLGQDARRLGGQAVGTRDQASQLLAGTEATLGHAKTLLAAIRAVDRTLSELMSQTGHLGLANASAPSGEQLLRTLAEVERLLWEMRARDLGAPQAAAEAELAAAQRLLARVQEQLSSLWEENQALATQTRDRLAQHEAGLMDLREALNRAVDATREAQELNSRNQERLEEALQRKQELSRDNATLQATLHAARDTLASVFRLLHSLDQAKEELERLAASLDGARTPLLQRMQTFSPAGSKLRLVEAAEAHAQQLGQLALNLSSIILDVNQDRLTQRAIEASNAYSRILQAVQAAEDAAGQALQQADHTWATVVRQGLVDRAQQLLANSTALEEAMLQEQQRLGLVWAALQGARTQLRDVRAKKDQLEAHIQAAQAMLAMDTDETSKKIAHAKAVAAEAQDTATRVQSQLQAMQENVERWQGQYEGLRGQDLGQAVLDAGHSVSTLEKTLPQLLAKLSILENRGVHNASLALSASIGRVRELIAQARGAASKVKVPMKFNGRSGVQLRTPRDLADLAAYTALKFYLQGPEPEPGQGTEDRFVMYMGSRQATGDYMGVSLRDKKVHWVYQLGEAGPAVLSIDEDIGEQFAAVSLDRTLQFGHMSVTVERQMIQETKGDTVAPGAEGLLNLRPDDFVFYVGGYPSTFTPPPLLRFPGYRGCIEMDTLNEEVVSLYNFERTFQLDTAVDRPCARSKSTGDPWLTDGSYLDGTGFARISFDSQISTTKRFEQELRLVSYSGVLFFLKQQSQFLCLAVQEGSLVLLYDFGAGLKKAVPLQPPPPLTSASKAIQVFLLGGSRKRVLVRVERATVYSVEQDNDLELADAYYLGGVPPDQLPPSLRWLFPTGGSVRGCVKGIKALGKYVDLKRLNTTGVSAGCTADLLVGRAMTFHGHGFLRLALSNVAPLTGNVYSGFGFHSAQDSALLYYRASPDGLCQVSLQQGRVSLQLLRTEVKTQAGFADGAPHYVAFYSNATGVWLYVDDQLQQMKPHRGPPPELQPQPEGPPRLLLGGLPESGTIYNFSGCISNVFVQRLLGPQRVFDLQQNLGSVNVSTGCAPALQAQTPGLGPRGLQATARKASRRSRQPARHPACMLPPHLRTTRDSYQFGGSLSSHLEFVGILARHRNWPSLSMHVLPRSSRGLLLFTARLRPGSPSLALFLSNGHFVAQMEGLGTRLRAQSRQRSRPGRWHKVSVRWEKNRILLVTDGARAWSQEGPHRQHQGAEHPQPHTLFVGGLPASSHSSKLPVTVGFSGCVKRLRLHGRPLGAPTRMAGVTPCILGPLEAGLFFPGSGGVITLDLPGATLPDVGLELEVRPLAVTGLIFHLGQARTPPYLQLQVTEKQVLLRADDGAGEFSTSVTRPSVLCDGQWHRLAVMKSGNVLRLEVDAQSNHTVGPLLAAAAGAPAPLYLGGLPEPMAVQPWPPAYCGCMRRLAVNRSPVAMTRSVEVHGAVGASGCPAA

SEQ ID NO: 877987 - protein, 3646 aa, Homo sapiens
MAKRLCAGSALCVRGPRGPAPLLLVGLALLGAARAREEAGGGFSLHPPYFNLAEGARIAASATCGEEAPARGSPRPTEDLYCKLVGGPVAGGDPNQTIRGQYCDICTAANSNKAHPASNAIDGTERWWQSPPLSRGLEYNEVNVTLDLGQVFHVAYVLIKFANSPRPDLWVLERSMDFGRTYQPWQFFASSKRDCLERFGPQTLERITRDDAAICTTEYSRIVPLENGEIVVSLVNGRPGAMNFSYSPLLREFTKATNVRLRFLRTNTLLGHLMGKALRDPTVTRRYYYSIKDISIGGRCVCHGHADACDAKDPTDPFRLQCTCQHNTCGGTCDRCCPGFNQQPWKPATANSANECQSCNCYGHATDCYYDPEVDRRRASQSLDGTYQGGGVCIDCQHHTTGVNCERCLPGFYRSPNHPLDSPHVCRRCNCESDFTDGTCEDLTGRCYCRPNFSGERCDVCAEGFTGFPSCYPTPSSSNDTREQVLPAGQIVNCDCSAAGTQGNACRKDPRVGRCLCKPNFQGTHCELCAPGFYGPGCQPCQCSSPGVADDRCDPDTGQCRCRVGFEGATCDRCAPGYFHFPLCQLCGCSPAGTLPEGCDEAGRCLCQPEFAGPHCDRCRPGYHGFPNCQACTCDPRGALDQLCGAGGLCRCRPGYTGTACQECSPGFHGFPSCVPCHCSAEGSLHAACDPRSGQCSCRPRVTGLRCDTCVPGAYNFPYCEAGSCHPAGLAPVDPALPEAQVPCMCRAHVEGPSCDRCKPGFWGLSPSNPEGCTRCSCDLRGTLGGVAECQPGTGQCFCKPHVCGQACASCKDGFFGLDQADYFGCRSCRCDIGGALGQSCEPRTGVCRCRPNTQGPTCSEPARDHYLPDLHHLRLELEEAATPEGHAVRFGFNPLEFENFSWRGYAQMAPVQPRIVARLNLTSPDLFWLVFRYVNRGAMSVSGRVSVREEGRSATCANCTAQSQPVAFPPSTEPAFITVPQRGFGEPFVLNPGTWALRVEAEGVLLDYVVLLPSAYYEAALLQLRVTEACTYRPSAQQSGDNCLLYTHLPLDGFPSAAGLEALCRQDNSLPRPCPTEQLSPSHPPLITCTGSDVDVQLQVAVPQPGRYALVVEYANEDARQEVGVAVHTPQRAPQQGLLSLHPCLYSTLCRGTARDTQDHLAVFHLDSEASVRLTAEQARFFLHGVTLVPIEEFSPEFVEPRVSCISSHGAFGPNSAACLPSRFPKPPQPIILRDCQVIPLPPGLPLTHAQDLTPAMSPAGPRPRPPTAVDPDAEPTLLREPQATVVFTTHVPTLGRYAFLLHGYQPAHPTFPVEVLINAGRVWQGHANASFCPHGYGCRTLVVCEGQALLDVTHSELTVTVRVPEGRWLWLDYVLVVPENVYSFGYLREEPLDKSYDFISHCAAQGYHISPSSSSLFCRNAAASLSLFYNNGARPCGCHEVGATGPTCEPFGGQCPCHAHVIGRDCSRCATGYWGFPNCRPCDCGARLCDELTGQCICPPRTIPPDCLLCQPQTFGCHPLVGCEECNCSGPGIQELTDPTCDTDSGQCKCRPNVTGRRCDTCSPGFHGYPRCRPCDCHEAGTAPGVCDPLTGQCYCKENVQGPKCDQCSLGTFSLDAANPKGCTRCFCFGATERCRSSSYTRQEFVDMEGWVLLSTDRQVVPHERQPGTEMLRADLRHVPEAVPEAFPELYWQAPPSYLGDRVSSYGGTLRYELHSETQRGDVFVPMESRPDVVLQGNQMSITFLEPAYPTPGHVHRGQLQLVEGNFRHTETRNTVSREELMMVLASLEQLQIRALFSQISSAVSLRRVALEVASPAGQGALASNVELCLCPASYRGDSCQECAPGFYRDVKGLFLGRCVPCQCHGHSDRCLPGSGVCVDCQHNTEGAHCERCQAGFMSSRDDPSAPCVSCPCPLSVPSNNFAEGCVLRGGRTQCLCKPGYAGASCERCAPGFFGNPLVLGSSCQPCDCSGNGDPNLLFSDCDPLTGACRGCLRHTTGPRCEICAPGFYGNALLPGNCTRCDCTPCGTEACDPHSGHCLCKAGVTGRRCDRCQEGHFGFNGCGGCRPCACGPAAEGSECHPQSGQCHCRPGTMGPQCRECAPGYWGLPEQGCRRCQCPGGRCDPHTGRCNCPPGLSGERCDTCSQQHQVPVPGGPVGHSIHCEVCDHCVVLLLDDLERAGALLPAIHEQLRGINASSMAWARLHRLNASIADLQSQLRSPLGPRHETAQQLEVLEQQSTSLGQDARRLGGQAVGTRDQASQLLAGTEATLGHAKTLLAAIRAVDRTLSELMSQTGHLGLANASAPSGEQLLRTLAEVERLLWEMRARDLGAPQAAAEAELAAAQRLLARVQEQLSSLWEENQALATQTRDRLAQHEAGLMDLREALNRAVDATREAQELNSRNQERLEEALQRKQELSRDNATLQATLHAARDTLASVFRLLHSLDQAKEELERLAASLDGARTPLLQRMQTFSPAGSKLRLVEAAEAHAQQLGQLALNLSSIILDVNQDRLTQRAIEASNAYSRILQAVQAAEDAAGQALQQADHTWATVVRQGLVDRAQQLLANSTALEEAMLQEQQRLGLVWAALQGARTQLRDVRAKKDQLEAHIQAAQAMLAMDTDETSKKIAHAKAVAAEAQDTATRVQSQLQAMQENVERWQGQYEGLRGQDLGQAVLDAGHSVSTLEKTLPQLLAKLSILENRGVHNASLALSASIGRVRELIAQARGAASKVKVPMKFNGRSGVQLRTPRDLADLAAYTALKFYLQGPEPEPGQGTEDRFVMYMGSRQATGDYMGVSLRDKKVHWVYQLGEAGPAVLSIDEDIGEQFAAVSLDRTLQFGHMSVTVERQMIQETKGDTVAPGAEGLLNLRPDDFVFYVGGYPSTFTPPPLLRFPGYRGCIEMDTLNEEVVSLYNFERTFQLDTAVDRPCARSKSTGDPWLTDGSYLDGTGFARISFDSQISTTKRFEQELRLVSYSGVLFFLKQQSQFLCLAVQEGSLVLLYDFGAGLKKAVPLQPPPPLTSASKAIQVFLLGGSRKRVLVRVERATVYSVEQDNDLELADAYYLGGVPPDQLPPSLRWLFPTGGSVRGCVKGIKALGKYVDLKRLNTTGVSAGCTADLLVGRAMTFHGHGFLRLALSNVAPLTGNVYSGFGFHSAQDSALLYYRASPDGLCQVSLQQGRVSLQLLRTEVKTQAGFADGAPHYVAFYSNATGVWLYVDDQLQQMKPHRGPPPELQPQPEGPPRLLLGGLPESGTIYNFSGCISNVFVQRLLGPQRVFDLQQNLGSVNVSTGCAPALQAQTPGLGPRGLQATARKASRRSRQPARHPACMLPPHLRTTRDSYQFGGSLSSHLEFVGILARHRNWPSLSMHVLPRSSRGLLLFTARLRPGSPSLALFLSNGHFVAQMEGLGTRLRAQSRQRSRPGRWHKVSVRWEKNRILLVTDGARAWSQEGPHRQHQGAEHPQPHTLFVGGLPASSHSSKLPVTVGFSGCVKRLRLHGRPLGAPTRMAGVTPCILGPLEAGLFFPGSGGVITLDLPGATLPDVGLELEVRPLAVTGLIFHLGQARTPPYLQLQVTEKQVLLRADDGAGEFSTSVTRPSVLCDGQWHRLAAWAPCWRLQLVPQPLCTSGACLSPWPCSPGPPPTAAA

SEQ ID NO: 877988 - protein, 3654 aa, Homo sapiens
MAKRLCAGSALCVRGPRGPAPLLLVGLALLGAARAREEAGGGFSLHPPYFNLAEGARIAASATCGEEAPARGSPRPTEDLYCKLVGGPVAGGDPNQTIRGQYCDICTAANSNKAHPASNAIDGTERWWQSPPLSRGLEYNEVNVTLDLGQVFHVAYVLIKFANSPRPDLWVLERSMDFGRTYQPWQFFASSKRDCLERFGPQTLERITRDDAAICTTEYSRIVPLENGEIVVSLVNGRPGAMNFSYSPLLREFTKATNVRLRFLRTNTLLGHLMGKALRDPTVTRRYYYSIKDISIGGRCVCHGHADACDAKDPTDPFRLQCTCQHNTCGGTCDRCCPGFNQQPWKPATANSANECQSCNCYGHATDCYYDPEVDRRRASQSLDGTYQGGGVCIDCQHHTTGVNCERCLPGFYRSPNHPLDSPHVCRRCNCESDFTDGTCEDLTGRCYCRPNFSGERCDVCAEGFTGFPSCYPTPSSSNDTREQVLPAGQIVNCDCSAAGTQGNACRKDPRVGRCLCKPNFQGTHCELCAPGFYGPGCQPCQCSSPGVADDRCDPDTGQCRCRVGFEGATCDRCAPGYFHFPLCQLCGCSPAGTLPEGCDEAGRCLCQPEFAGPHCDRCRPGYHGFPNCQACTCDPRGALDQLCGAGGLCRCRPGYTGTACQECSPGFHGFPSCVPCHCSAEGSLHAACDPRSGQCSCRPRVTGLRCDTCVPGAYNFPYCEAGSCHPAGLAPVDPALPEAQVPCMCRAHVEGPSCDRCKPGFWGLSPSNPEGCTRCSCDLRGTLGGVAECQPGTGQCFCKPHVCGQACASCKDGFFGLDQADYFGCRSCRCDIGGALGQSCEPRTGVCRCRPNTQGPTCSEPARDHYLPDLHHLRLELEEAATPEGHAVRFGFNPLEFENFSWRGYAQMAPVQPRIVARLNLTSPDLFWLVFRYVNRGAMSVSGRVSVREEGRSATCANCTAQSQPVAFPPSTEPAFITVPQRGFGEPFVLNPGTWALRVEAEGVLLDYVVLLPSAYYEAALLQLRVTEACTYRPSAQQSGDNCLLYTHLPLDGFPSAAGLEALCRQDNSLPRPCPTEQLSPSHPPLITCTGSDVDVQLQVAVPQPGRYALVVEYANEDARQEVGVAVHTPQRAPQQGLLSLHPCLYSTLCRGTARDTQDHLAVFHLDSEASVRLTAEQARFFLHGVTLVPIEEFSPEFVEPRVSCISSHGAFGPNSAACLPSRFPKPPQPIILRDCQVIPLPPGLPLTHAQDLTPAMSPAGPRPRPPTAVDPDAEPTLLREPQATVVFTTHVPTLGRYAFLLHGYQPAHPTFPVEVLINAGRVWQGHANASFCPHGYGCRTLVVCEGQALLDVTHSELTVTVRVPEGRWLWLDYVLVVPENVYSFGYLREEPLDKSYDFISHCAAQGYHISPSSSSLFCRNAAASLSLFYNNGARPCGCHEVGATGPTCEPFGGQCPCHAHVIGRDCSRCATGYWGFPNCRPCDCGARLCDELTGQCICPPRTIPPDCLLCQPQTFGCHPLVGCEECNCSGPGIQELTDPTCDTDSGQCKCRPNVTGRRCDTCSPGFHGYPRCRPCDCHEAGTAPGVCDPLTGQCYCKENVQGPKCDQCSLGTFSLDAANPKGCTRCFCFGATERCRSSSYTRQEFVDMEGWVLLSTDRQVVPHERQPGTEMLRADLRHVPEAVPEAFPELYWQAPPSYLGDRVSSYGGTLRYELHSETQRGDVFVPMESRPDVVLQGNQMSITFLEPAYPTPGHVHRGQLQLVEGNFRHTETRNTVSREELMMVLASLEQLQIRALFSQISSAVSLRRVALEVASPAGQGALASNVELCLCPASYRGDSCQECAPGFYRDVKGLFLGRCVPCQCHGHSDRCLPGSGVCVDCQHNTEGAHCERCQAGFMSSRDDPSAPCVSCPCPLSVPSNNFAEGCVLRGGRTQCLCKPGYAGASCERCAPGFFGNPLVLGSSCQPCDCSGNGDPNLLFSDCDPLTGACRGCLRHTTGPRCEICAPGFYGNALLPGNCTRCDCTPCGTEACDPHSGHCLCKAGVTGRRCDRCQEGHFGFNGCGGCRPCACGPAAEGSECHPQSGQCHCRPGTMGPQCRECAPGYWGLPEQGCRRCQCPGGRCDPHTGRCNCPPGLSGERCDTCSQQHQVPVPGGPVGHSIHCEVCDHCVVLLLDDLERAGALLPAIHEQLRGINASSMAWARLHRLNASIADLQSQLRSPLGPRHETAQQLEVLEQQSTSLGQDARRLGGQAVGTRDQASQLLAGTEATLGHAKTLLAAIRAVDRTLSELMSQTGHLGLANASAPSGEQLLRTLAEVERLLWEMRARDLGAPQAAAEAELAAAQRLLARVQEQLSSLWEENQALATQTRDRLAQHEAGLMDLREALNRAVDATREAQELNSRNQERLEEALQRKQELSRDNATLQATLHAARDTLASVFRLLHSLDQAKEELERLAASLDGARTPLLQRMQTFSPAGSKLRLVEAAEAHAQQLGQLALNLSSIILDVNQDRLTQRAIEASNAYSRILQAVQAAEDAAGQALQQADHTWATVVRQGLVDRAQQLLANSTALEEAMLQEQQRLGLVWAALQGARTQLRDVRAKKDQLEAHIQAAQAMLAMDTDETSKKIAHAKAVAAEAQDTATRVQSQLQAMQENVERWQGQYEGLRGQDLGQAVLDAGHSVSTLEKTLPQLLAKLSILENRGVHNASLALSASIGRVRELIAQARGAASKVKVPMKFNGRSGVQLRTPRDLADLAAYTALKFYLQGPEPEPGQGTEDRFVMYMGSRQATGDYMGVSLRDKKVHWVYQLGEAGPAVLSIDEDIGEQFAAVSLDRTLQFGHMSVTVERQMIQETKGDTVAPGAEGLLNLRPDDFVFYVGGYPSTFTPPPLLRFPGYRGCIEMDTLNEEVVSLYNFERTFQLDTAVDRPCARSKSTGDPWLTDGSYLDGTGFARISFDSQISTTKRFEQELRLVSYSGVLFFLKQQSQFLCLAVQEGSLVLLYDFGAGLKKAVPLQPPPPLTSASKAIQVFLLGGSRKRVLVRVERATVYSVEQDNDLELADAYYLGGVPPDQLPPSLRWLFPTGGSVRGCVKGIKALGKYVDLKRLNTTGVSAGCTADLLVGRAMTFHGHGFLRLALSNVAPLTGNVYSGFGFHSAQDSALLYYRASPDGLCQVSLQQGRVSLQLLRTEVKTQAGFADGAPHYVAFYSNATGVWLYVDDQLQQMKPHRGPPPELQPQPEGPPRLLLGGLPESGTIYNFSGCISNVFVQRLLGPQRVFDLQQNLGSVNVSTGCAPALQAQTPGLGPRGLQATARKASRRSRQPARHPACMLPPHLRTTRDSYQFGGSLSSHLEFVGILARHRNWPSLSMHVLPRSSRGLLLFTARLRPGSPSLALFLSNGHFVAQMEGLGTRLRAQSRQRSRPGRWHKVSVRWEKNRILLVTDGARAWSQEGPHRQHQGAEHPQPHTLFVGGLPASSHSSKLPVTVGFSGCVKRLRLHGRPLGAPTRMAGVTPCILGPLEAGLFFPGSGGVITLDLPGATLPDVGLELEVRPLAVTGLIFHLGQARTPPYLQLQVTEKQVLLRADDGAGEFSTSVTRPSVLCDGQWHRLAVMKSGNVLRLEVDAQSNHTVGPLLAAAAGAPAPLYLGGLPGCPAA

SEQ ID NO: 877989 - protein, 3447 aa, Homo sapiens
  misc_feature (3435)..(3435): Xaa can be any naturally occurring amino acid
  misc_feature (3443)..(3444): Xaa can be any naturally occurring amino acid
MAKRLCAGSALCVRGPRGPAPLLLVGLALLGAARAREEAGGGFSLHPPYFNLAEGARIAASATCGEEAPARGSPRPTEDLYCKLVGGPVAGGDPNQTIRGQYCDICTAANSNKAHPASNAIDGTERWWQSPPLSRGLEYNEVNVTLDLGQVFHVAYVLIKFANSPRPDLWVLERSMDFGRTYQPWQFFASSKRDCLERFGPQTLERITRDDAAICTTEYSRIVPLENGEIVVSLVNGRPGAMNFSYSPLLREFTKATNVRLRFLRTNTLLGHLMGKALRDPTVTRRYYYSIKDISIGGRCVCHGHADACDAKDPTDPFRLQCTCQHNTCGGTCDRCCPGFNQQPWKPATANSANECQSCNCYGHATDCYYDPEVDRRRASQSLDGTYQGGGVCIDCQHHTTGVNCERCLPGFYRSPNHPLDSPHVCRRCNCESDFTDGTCEDLTGRCYCRPNFSGERCDVCAEGFTGFPSCYPTPSSSNDTREQVLPAGQIVNCDCSAAGTQGNACRKDPRVGRCLCKPNFQGTHCELCAPGFYGPGCQPCQCSSPGVADDRCDPDTGQCRCRVGFEGATCDRCAPGYFHFPLCQLCGCSPAGTLPEGCDEAGRCLCQPEFAGPHCDRCRPGYHGFPNCQACTCDPRGALDQLCGAGGLCRCRPGYTGTACQECSPGFHGFPSCVPCHCSAEGSLHAACDPRSGQCSCRPRVTGLRCDTCVPGAYNFPYCEAGSCHPAGLAPVDPALPEAQVPCMCRAHVEGPSCDRCKPGFWGLSPSNPEGCTRCSCDLRGTLGGVAECQPGTGQCFCKPHVCGQACASCKDGFFGLDQADYFGCRSCRCDIGGALGQSCEPRTGVCRCRPNTQGPTCSEPARDHYLPDLHHLRLELEEAATPEGHAVRFGFNPLEFENFSWRGYAQMAPVQPRIVARLNLTSPDLFWLVFRYVNRGAMSVSGRVSVREEGRSATCANCTAQSQPVAFPPSTEPAFITVPQRGFGEPFVLNPGTWALRVEAEGVLLDYVVLLPSAYYEAALLQLRVTEACTYRPSAQQSGDNCLLYTHLPLDGFPSAAGLEALCRQDNSLPRPCPTEQLSPSHPPLITCTGSDVDVQLQVAVPQPGRYALVVEYANEDARQEVGVAVHTPQRAPQQGLLSLHPCLYSTLCRGTARDTQDHLAVFHLDSEASVRLTAEQARFFLHGVTLVPIEEFSPEFVEPRVSCISSHGAFGPNSAACLPSRFPKPPQPIILRDCQVIPLPPGLPLTHAQDLTPAMSPAGPRPRPPTAVDPDAEPTLLREPQATVVFTTHVPTLGRYAFLLHGYQPAHPTFPVEVLINAGRVWQGHANASFCPHGYGCRTLVVCEGQALLDVTHSELTVTVRVPEGRWLWLDYVLVVPENVYSFGYLREEPLDKSYDFISHCAAQGYHISPSSSSLFCRNAAASLSLFYNNGARPCGCHEVGATGPTCEPFGGQCPCHAHVIGRDCSRCATGYWGFPNCRPCDCGARLCDELTGQCICPPRTIPPDCLLCQPQTFGCHPLVGCEECNCSGPGIQELTDPTCDTDSGQCKCRPNVTGRRCDTCSPGFHGYPRCRPCDCHEAGTAPGVCDPLTGQCYCKENVQGPKCDQCSLGTFSLDAANPKGCTRCFCFGATERCRSSSYTRQEFVDMEGWVLLSTDRQVVPHERQPGTEMLRADLRHVPEAVPEAFPELYWQAPPSYLGDRVSSYGGTLRYELHSETQRGDVFVPMESRPDVVLQGNQMSITFLEPAYPTPGHVHRGQLQLVEGNFRHTETRNTVSREELMMVLASLEQLQIRALFSQISSAVSLRRVALEVASPAGQGALASNVELCLCPASYRGDSCQECAPGFYRDVKGLFLGRCVPCQCHGHSDRCLPGSGVCVDCQHNTEGAHCERCQAGFMSSRDDPSAPCVSCPCPLSVPSNNFAEGCVLRGGRTQCLCKPGYAGASCERCAPGFFGNPLVLGSSCQPCDCSGNGDPNLLFSDCDPLTGACRGCLRHTTGPRCEICAPGFYGNALLPGNCTRCDCTPCGTEACDPHSGHCLCKAGVTGRRCDRCQEGHFGFNGCGGCRPCACGPAAEGSECHPQSGQCHCRPGTMGPQCRECAPGYWGLPEQGCRRCQCPGGRCDPHTGRCNCPPGLSGERCDTCSQQHQVPVPGGPVGHSIHCEVCDHCVVLLLDDLERAGALLPAIHEQLRGINASSMAWARLHRLNASIADLQSQLRSPLGPRHETAQQLEVLEQQSTSLGQDARRLGGQAVGTRDQASQLLAGTEATLGHAKTLLAAIRAVDRTLSELMSQTGHLGLANASAPSGEQLLRTLAEVERLLWEMRARDLGAPQAAAEAELAAAQRLLARVQEQLSSLWEENQALATQTRDRLAQHEAGLMDLREALNRAVDATREAQELNSRNQERLEEALQRKQELSRDNATLQATLHAARDTLASVFRLLHSLDQAKEELERLAASLDGARTPLLQRMQTFSPAGSKLRLVEAAEAHAQQLGQLALNLSSIILDVNQDRLTQRAIEASNAYSRILQAVQAAEDAAGQALQQADHTWATVVRQGLVDRAQQLLANSTALEEAMLQEQQRLGLVWAALQGARTQLRDVRAKKDQLEAHIQAAQAMLAMDTDETSKKIAHAKAVAAEAQDTATRVQSQLQAMQENVERWQGQYEGLRGQDLGQAVLDAGHSVSTLEKTLPQLLAKLSILENRGVHNASLALSASIGRVRELIAQARGAASKVKVPMKFNGRSGVQLRTPRDLADLAAYTALKFYLQGPEPEPGQGTEDRFVMYMGSRQATGDYMGVSLRDKKVHWVYQLGEAGPAVLSIDEDIGEQFAAVSLDRTLQFGHMSVTVERQMIQETKGDTVAPGAEGLLNLRPDDFVFYVGGYPSTFTPPPLLRFPGYRGCIEMDTLNEEVVSLYNFERTFQLDTAVDRPCARSKSTGDPWLTDGSYLDGTGFARISFDSQISTTKRFEQELRLVSYSGVLFFLKQQSQFLCLAVQEGSLVLLYDFGAGLKKAVPLQPPPPLTSASKAIQVFLLGGSRKRVLVRVERATVYSVEQDNDLELADAYYLGGVPPDQLPPSLRWLFPTGGSVRGCVKGIKALGKYVDLKRLNTTGVSAGCTADLLVGRAMTFHGHGFLRLALSNVAPLTGNVYSGFGFHSAQDSALLYYRASPDGLCQVSLQQGRVSLQLLRTEVKTQAGFADGAPHYVAFYSNATGVWLYVDDQLQQMKPHRGPPPELQPQPEGPPRLLLGGLPESGTIYNFSGCISNVFVQRLLGPQRVFDLQQNLGSVNVSTGCAPALQAQTPGLGPRGLQATARKASRRSRQPARHPACMLPPHLRTTRDSYQFGGSLSSHLEFVGILARHRNWPSLSMHVLPRSSRGLLLFTARLRPGSPSLALFLSNGHFVAQMEGLGTRLRAQSRQRSRPGRWHKSRRWRRTXLCTAGRLXXGRR

SEQ ID NO: 877990 - protein, 3329 aa, Homo sapiens
MAKRLCAGSALCVRGPRGPAPLLLVGLALLGAARAREEAGGGFSLHPPYFNLAEGARIAASATCGEEAPARGSPRPTEDLYCKLVGGPVAGGDPNQTIRGQYCDICTAANSNKAHPASNAIDGTERWWQSPPLSRGLEYNEVNVTLDLGQVFHVAYVLIKFANSPRPDLWVLERSMDFGRTYQPWQFFASSKRDCLERFGPQTLERITRDDAAICTTEYSRIVPLENGEIVVSLVNGRPGAMNFSYSPLLREFTKATNVRLRFLRTNTLLGHLMGKALRDPTVTRRYYYSIKDISIGGRCVCHGHADACDAKDPTDPFRLQCTCQHNTCGGTCDRCCPGFNQQPWKPATANSANECQSCNCYGHATDCYYDPEVDRRRASQSLDGTYQGGGVCIDCQHHTTGVNCERCLPGFYRSPNHPLDSPHVCRRCNCESDFTDGTCEDLTGRCYCRPNFSGERCDVCAEGFTGFPSCYPTPSSSNDTREQVLPAGQIVNCDCSAAGTQGNACRKDPRVGRCLCKPNFQGTHCELCAPGFYGPGCQPCQCSSPGVADDRCDPDTGQCRCRVGFEGATCDRCAPGYFHFPLCQLCGCSPAGTLPEGCDEAGRCLCQPEFAGPHCDRCRPGYHGFPNCQACTCDPRGALDQLCGAGGLCRCRPGYTGTACQECSPGFHGFPSCVPCHCSAEGSLHAACDPRSGQCSCRPRVTGLRCDTCVPGAYNFPYCEAGSCHPAGLAPVDPALPEAQVPCMCRAHVEGPSCDRCKPGFWGLSPSNPEGCTRCSCDLRGTLGGVAECQPGTGQCFCKPHVCGQACASCKDGFFGLDQADYFGCRSCRCDIGGALGQSCEPRTGVCRCRPNTQGPTCSEPARDHYLPDLHHLRLELEEAATPEGHAVRFGFNPLEFENFSWRGYAQMAPVQPRIVARLNLTSPDLFWLVFRYVNRGAMSVSGRVSVREEGRSATCANCTAQSQPVAFPPSTEPAFITVPQRGFGEPFVLNPGTWALRVEAEGVLLDYVVLLPSAYYEAALLQLRVTEACTYRPSAQQSGDNCLLYTHLPLDGFPSAAGLEALCRQDNSLPRPCPTEQLSPSHPPLITCTGSDVDVQLQVAVPQPGRYALVVEYANEDARQEVGVAVHTPQRAPQQGLLSLHPCLYSTLCRGTARDTQDHLAVFHLDSEASVRLTAEQARFFLHGVTLVPIEEFSPEFVEPRVSCISSHGAFGPNSAACLPSRFPKPPQPIILRDCQVIPLPPGLPLTHAQDLTPAMSPAGPRPRPPTAVDPDAEPTLLREPQATVVFTTHVPTLGRYAFLLHGYQPAHPTFPVEVLINAGRVWQGHANASFCPHGYGCRTLVVCEGQALLDVTHSELTVTVRVPEGRWLWLDYVLVVPENVYSFGYLREEPLDKSYDFISHCAAQGYHISPSSSSLFCRNAAASLSLFYNNGARPCGCHEVGATGPTCEPFGGQCPCHAHVIGRDCSRCATGYWGFPNCRPCDCGARLCDELTGQCICPPRTIPPDCLLCQPQTFGCHPLVGCEECNCSGPGIQELTDPTCDTDSGQCKCRPNVTGRRCDTCSPGFHGYPRCRPCDCHEAGTAPGVCDPLTGQCYCKENVQGPKCDQCSLGTFSLDAANPKGCTRCFCFGATERCRSSSYTRQEFVDMEGWVLLSTDRQVVPHERQPGTEMLRADLRHVPEAVPEAFPELYWQAPPSYLGDRVSSYGGTLRYELHSETQRGDVFVPMESRPDVVLQGNQMSITFLEPAYPTPGHVHRGQLQLVEGNFRHTETRNTVSREELMMVLASLEQLQIRALFSQISSAVSLRRVALEVASPAGQGALASNVELCLCPASYRGDSCQECAPGFYRDVKGLFLGRCVPCQCHGHSDRCLPGSGVCVDCQHNTEGAHCERCQAGFMSSRDDPSAPCVSCPCPLSVPSNNFAEGCVLRGGRTQCLCKPGYAGASCERCAPGFFGNPLVLGSSCQPCDCSGNGDPNLLFSDCDPLTGACRGCLRHTTGPRCEICAPGFYGNALLPGNCTRCDCTPCGTEACDPHSGHCLCKAGVTGRRCDRCQEGHFGFNGCGGCRPCACGPAAEGSECHPQSGQCHCRPGTMGPQCRECAPGYWGLPEQGCRRCQCPGGRCDPHTGRCNCPPGLSGERCDTCSQQHQVPVPGGPVGHSIHCEVCDHCVVLLLDDLERAGALLPAIHEQLRGINASSMAWARLHRLNASIADLQSQLRSPLGPRHETAQQLEVLEQQSTSLGQDARRLGGQAVGTRDQASQLLAGTEATLGHAKTLLAAIRAVDRTLSELMSQTGHLGLANASAPSGEQLLRTLAEVERLLWEMRARDLGAPQAAAEAELAAAQRLLARVQEQLSSLWEENQALATQTRDRLAQHEAGLMDLREALNRAVDATREAQELNSRNQERLEEALQRKQELSRDNATLQATLHAARDTLASVFRLLHSLDQAKEELERLAASLDGARTPLLQRMQTFSPAGSKLRLVEAAEAHAQQLGQLALNLSSIILDVNQDRLTQRAIEASNAYSRILQAVQAAEDAAGQALQQADHTWATVVRQGLVDRAQQLLANSTALEEAMLQEQQRLGLVWAALQGARTQLRDVRAKKDQLEAHIQAAQAMLAMDTDETSKKIAHAKAVAAEAQDTATRVQSQLQAMQENVERWQGQYEGLRGQDLGQAVLDAGHSVSTLEKTLPQLLAKLSILENRGVHNASLALSASIGRVRELIAQARGAASKVKVPMKFNGRSGVQLRTPRDLADLAAYTALKFYLQGPEPEPGQGTEDRFVMYMGSRQATGDYMGVSLRDKKVHWVYQLGEAGPAVLSIDEDIGEQFAAVSLDRTLQFGHMSVTVERQMIQETKGDTVAPGAEGLLNLRPDDFVFYVGGYPSTFTPPPLLRFPGYRGCIEMDTLNEEVVSLYNFERTFQLDTAVDRPCARSKSTGDPWLTDGSYLDGTGFARISFDSQISTTKRFEQELRLVSYSGVLFFLKQQSQFLCLAVQEGSLVLLYDFGAGLKKAVPLQPPPPLTSASKAIQVFLLGGSRKRVLVRVERATVYSVEQDNDLELADAYYLGGVPPDQLPPSLRWLFPTGGSVRGCVKGIKALGKYVDLKRLNTTGVSAGCTADLLVGRAMTFHGHGFLRLALSNVAPLTGNVYSGFGFHSAQDSALLYYRASPDGLCQVSLQQGRVSLQLLRTEVKTQAGFADGAPHYVAFYSNATGVWLYVDDQLQQMKPHRGPPPELQPQPEGPPRLLLGGLPESGTIYNFSGWAQHEAGLMDLREALNRAVDATREAQELNRLPSRLGHSQPRPLVRPLQLPHTAPCARLIGVYLDSKLYG

SEQ ID NO: 877991 - protein, 3226 aa, Homo sapiens
MAKRLCAGSALCVRGPRGPAPLLLVGLALLGAARAREEAGGGFSLHPPYFNLAEGARIAASATCGEEAPARGSPRPTEDLYCKLVGGPVAGGDPNQTIRGQYCDICTAANSNKAHPASNAIDGTERWWQSPPLSRGLEYNEVNVTLDLGQVFHVAYVLIKFANSPRPDLWVLERSMDFGRTYQPWQFFASSKRDCLERFGPQTLERITRDDAAICTTEYSRIVPLENGEIVVSLVNGRPGAMNFSYSPLLREFTKATNVRLRFLRTNTLLGHLMGKALRDPTVTRRYYYSIKDISIGGRCVCHGHADACDAKDPTDPFRLQCTCQHNTCGGTCDRCCPGFNQQPWKPATANSANECQSCNCYGHATDCYYDPEVDRRRASQSLDGTYQGGGVCIDCQHHTTGVNCERCLPGFYRSPNHPLDSPHVCRRCNCESDFTDGTCEDLTGRCYCRPNFSGERCDVCAEGFTGFPSCYPTPSSSNDTREQVLPAGQIVNCDCSAAGTQGNACRKDPRVGRCLCKPNFQGTHCELCAPGFYGPGCQPCQCSSPGVADDRCDPDTGQCRCRVGFEGATCDRCAPGYFHFPLCQLCGCSPAGTLPEGCDEAGRCLCQPEFAGPHCDRCRPGYHGFPNCQACTCDPRGALDQLCGAGGLCRCRPGYTGTACQECSPGFHGFPSCVPCHCSAEGSLHAACDPRSGQCSCRPRVTGLRCDTCVPGAYNFPYCEAGSCHPAGLAPVDPALPEAQVPCMCRAHVEGPSCDRCKPGFWGLSPSNPEGCTRCSCDLRGTLGGVAECQPGTGQCFCKPHVCGQACASCKDGFFGLDQADYFGCRSCRCDIGGALGQSCEPRTGVCRCRPNTQGPTCSEPARDHYLPDLHHLRLELEEAATPEGHAVRFGFNPLEFENFSWRGYAQMAPVQPRIVARLNLTSPDLFWLVFRYVNRGAMSVSGRVSVREEGRSATCANCTAQSQPVAFPPSTEPAFITVPQRGFGEPFVLNPGTWALRVEAEGVLLDYVVLLPSAYYEAALLQLRVTEACTYRPSAQQSGDNCLLYTHLPLDGFPSAAGLEALCRQDNSLPRPCPTEQLSPSHPPLITCTGSDVDVQLQVAVPQPGRYALVVEYANEDARQEVGVAVHTPQRAPQQGLLSLHPCLYSTLCRGTARDTQDHLAVFHLDSEASVRLTAEQARFFLHGVTLVPIEEFSPEFVEPRVSCISSHGAFGPNSAACLPSRFPKPPQPIILRDCQVIPLPPGLPLTHAQDLTPAMSPAGPRPRPPTAVDPDAEPTLLREPQATVVFTTHVPTLGRYAFLLHGYQPAHPTFPVEVLINAGRVWQGHANASFCPHGYGCRTLVVCEGQALLDVTHSELTVTVRVPEGRWLWLDYVLVVPENVYSFGYLREEPLDKSYDFISHCAAQGYHISPSSSSLFCRNAAASLSLFYNNGARPCGCHEVGATGPTCEPFGGQCPCHAHVIGRDCSRCATGYWGFPNCRPCDCGARLCDELTGQCICPPRTIPPDCLLCQPQTFGCHPLVGCEECNCSGPGIQELTDPTCDTDSGQCKCRPNVTGRRCDTCSPGFHGYPRCRPCDCHEAGTAPGVCDPLTGQCYCKENVQGPKCDQCSLGTFSLDAANPKGCTRCFCFGATERCRSSSYTRQEFVDMEGWVLLSTDRQVVPHERQPGTEMLRADLRHVPEAVPEAFPELYWQAPPSYLGDRVSSYGGTLRYELHSETQRGDVFVPMESRPDVVLQGNQMSITFLEPAYPTPGHVHRGQLQLVEGNFRHTETRNTVSREELMMVLASLEQLQIRALFSQISSAVSLRRVALEVASPAGQGALASNVELCLCPASYRGDSCQECAPGFYRDVKGLFLGRCVPCQCHGHSDRCLPGSGVCVDCQHNTEGAHCERCQAGFMSSRDDPSAPCVSCPCPLSVPSNNFAEGCVLRGGRTQCLCKPGYAGASCERCAPGFFGNPLVLGSSCQPCDCSGNGDPNLLFSDCDPLTGACRGCLRHTTGPRCEICAPGFYGNALLPGNCTRCDCTPCGTEACDPHSGHCLCKAGVTGRRCDRCQEGHFGFNGCGGCRPCACGPAAEGSECHPQSGQCHCRPGTMGPQCRECAPGYWGLPEQGCRRCQCPGGRCDPHTGRCNCPPGLSGERCDTCSQQHQVPVPGGPVGHSIHCEVCDHCVVLLLDDLERAGALLPAIHEQLRGINASSMAWARLHRLNASIADLQSQLRSPLGPRHETAQQLEVLEQQSTSLGQDARRLGGQAVGTRDQASQLLAGTEATLGHAKTLLAAIRAVDRTLSELMSQTGHLGLANASAPSGEQLLRTLAEVERLLWEMRARDLGAPQAAAEAELAAAQRLLARVQEQLSSLWEENQALATQTRDRLAQHEAGLMDLREALNRAVDATREAQELNSRNQERLEEALQRKQELSRDNATLQATLHAARDTLASVFRLLHSLDQAKEELERLAASLDGARTPLLQRMQTFSPAGSKLRLVEAAEAHAQQLGQLALNLSSIILDVNQDRLTQRAIEASNAYSRILQAVQAAEDAAGQALQQADHTWATVVRQGLVDRAQQLLANSTALEEAMLQEQQRLGLVWAALQGARTQLRDVRAKKDQLEAHIQAAQAMLAMDTDETSKKIAHAKAVAAEAQDTATRVQSQLQAMQENVERWQGQYEGLRGQDLGQAVLDAGHSVSTLEKTLPQLLAKLSILENRGVHNASLALSASIGRVRELIAQARGAASKVKVPMKFNGRSGVQLRTPRDLADLAAYTALKFYLQGPEPEPGQGTEDRFVMYMGSRQATGDYMGVSLRDKKVHWVYQLGEAGPAVLSIDEDIGEQFAAVSLDRTLQFGHMSVTVERQMIQETKGDTVAPGAEGLLNLRPDDFVFYVGGYPSTFTPPPLLRFPGYRGCIEMDTLNEEVVSLYNFERTFQLDTAVDRPCARSKSTGDPWLTDGSYLDGTGFARISFDSQISTTKRFEQELRLVSYSGVLFFLKQQSQFLCLAVQEGSLVLLYDFGAGLKKAVPLQPPPPLTSASKAIQVFLLGGSRKRVLVRVERATVYSVEQDNDLELADAYYLGGVPPDQLPPSLRWLFPTGGSVRGCVKGIKALGKYVDLKRLNTTGVSAGCTADLLVGRAMTFHGHGFLRLALSNVAPLTGNVYSGFGFHSAQDSALLYYRASPDGLCQVSLQQGRVSLQLLRTEVKTQAGFADGAPHYVAFYSNATGVWLYVDDQHQHEFP

SEQ ID NO: 877992 - protein, 2053 aa, Homo sapiens
MAKRLCAGSALCVRGPRGPAPLLLVGLALLGAARAREEAGGGFSLHPPYFNLAEGARIAASATCGEEAPARGSPRPTEDLYCKLVGGPVAGGDPNQTIRGQYCDICTAANSNKAHPASNAIDGTERWWQSPPLSRGLEYNEVNVTLDLGQVFHVAYVLIKFANSPRPDLWVLERSMDFGRTYQPWQFFASSKRDCLERFGPQTLERITRDDAAICTTEYSRIVPLENGEIVVSLVNGRPGAMNFSYSPLLREFTKATNVRLRFLRTNTLLGHLMGKALRDPTVTRRYYYSIKDISIGGRCVCHGHADACDAKDPTDPFRLQCTCQHNTCGGTCDRCCPGFNQQPWKPATANSANECQSCNCYGHATDCYYDPEVDRRRASQSLDGTYQGGGVCIDCQHHTTGVNCERCLPGFYRSPNHPLDSPHVCRRCNCESDFTDGTCEDLTGRCYCRPNFSGERCDVCAEGFTGFPSCYPTPSSSNDTREQVLPAGQIVNCDCSAAGTQGNACRKDPRVGRCLCKPNFQGTHCELCAPGFYGPGCQPCQCSSPGVADDRCDPDTGQCRCRVGFEGATCDRCAPGYFHFPLCQLCGCSPAGTLPEGCDEAGRCLCQPEFAGPHCDRCRPGYHGFPNCQACTCDPRGALDQLCGAGGLCRCRPGYTGTACQECSPGFHGFPSCVPCHCSAEGSLHAACDPRSGQCSCRPRVTGLRCDTCVPGAYNFPYCEAGSCHPAGLAPVDPALPEAQVPCMCRAHVEGPSCDRCKPGFWGLSPSNPEGCTRCSCDLRGTLGGVAECQPGTGQCFCKPHVCGQACASCKDGFFGLDQADYFGCRSCRCDIGGALGQSCEPRTGVCRCRPNTQGPTCSEPARDHYLPDLHHLRLELEEAATPEGHAVRFGFNPLEFENFSWRGYAQMAPVQPRIVARLNLTSPDLFWLVFRYVNRGAMSVSGRVSVREEGRSATCANCTAQSQPVAFPPSTEPAFITVPQRGFGEPFVLNPGTWALRVEAEGVLLDYVVLLPSAYYEAALLQLRVTEACTYRPSAQQSGDNCLLYTHLPLDGFPSAAGLEALCRQDNSLPRPCPTEQLSPSHPPLITCTGSDVDVQLQVAVPQPGRYALVVEYANEDARQEVGVAVHTPQRAPQQGLLSLHPCLYSTLCRGTARDTQDHLAVFHLDSEASVRLTAEQARFFLHGVTLVPIEEFSPEFVEPRVSCISSHGAFGPNSAACLPSRFPKPPQPIILRDCQVIPLPPGLPLTHAQDLTPAMSPAGPRPRPPTAVDPDAEPTLLREPQATVVFTTHVPTLGRYAFLLHGYQPAHPTFPVEVLINAGRVWQGHANASFCPHGYGCRTLVVCEGQALLDVTHSELTVTVRVPEGRWLWLDYVLVVPENVYSFGYLREEPLDKSYDFISHCAAQGYHISPSSSSLFCRNAAASLSLFYNNGARPCGCHEVGATGPTCEPFGGQCPCHAHVIGRDCSRCATGYWGFPNCRREYPSPWAPSGRELVPEPKVDGSTRKQGQENVLEPGRAALLPHLRAWAQDFSLRAMQKVSGTSRWSTVSDDDVDSEQLPPCQELSKAQHPGQGSLFLSPPPPSHCHIPYGLHSGPLRGAGLGRGVSKPCTRPTACDCGARLCDELTGQCICPPRTIPPDCLLCQPQTFGCHPLVGCEECNCSGPGIQELTDPTCDTDSGQCKCRPNVTGRRCDTCSPGFHGYPRCRPCDCHEAGTAPGVCDPLTGQCYCKENVQGPKCDQCSLGTFSLDAANPKGCTRCFCFGATERCRSSSYTRQEFVDMEGWVLLSTDRQVVPHERQPGTEMLRADLRHVPEAVPEAFPELYWQAPPSYLGDRVSSYGGTLRYELHSETQRGDVFVPMESRPDVVLQGNQMSITFLEPAYPTPGHVHRGQLQLVEGNFRHTETRNTVSREELMMVLASLEQLQIRALFSQISSAVSLRRVALEVASPAGQGALASNVELCLCPASYRGDSCQVRLGQHQTARRLTCAHPSLQHPPCVPFLAASTSCHPTHLSSCPCFSQAAGQLMGLPVPCCLSACPSSACLPLIRLPL

SEQ ID NO: 877993 - protein, 370 aa, Homo sapiens
MAKRLCAGSALCVRGPRGPAPLLLVGLALLGAARAREEAGGGFSLHPPYFNLAEGARIAASATCGEEAPARGSPRPTEDLYCKLVGGPVAGGDPNQTIRGQYCDICTAANSNKAHPASNAIDGTERWWQSPPLSRGLEYNEVNVTLDLGQVFHVAYVLIKFANSPRPDLWVLERSMDFGRTYQPWQFFASSKRDCLERFGPQTLERITRDDAAICTTEYSRIVPLENGEIVVSLVNGRPGAMNFSYSPLLREFTKATNVRLRFLRTNTLLGHLMGKALRDPTVTRRYYYSIKDISIGGRCVCHGHADACDAKDPTDPFRLQCTCQHNTCGGTCDRCCPGSTALPTTLSTRPTSAAAATASPTSRMAPART

SEQ ID NO: 877994 - protein, 84 aa, Homo sapiens
VRWEKNRILLVTDGARAWSQEGPHRQHQGAEHPQPHTLFVGGLPASSHSSKLPVRTILPQPPLPTHCSLSAALGPDPCPVCSYR

SEQ ID NO: 877995 - protein, 34 aa, Homo sapiens
MVLASLEQLQIRALFSQISSAVSLRRVALEVASP

SEQ ID NO: 877996 - protein, 256 aa, Homo sapiens
RVRPGRDAPGPTPLVVNRRVPRLFIVENPPTPARVSLGPRLPGYLPSGPARPHGLALRTLLSGRRARPTNFFLFCDCFFFFETQFCSCCPGWSAMARSRLTITSASRVQAILLPQPPESWDYRHTPPRPANFVFLVQMGFLHVGQAGLELLTSGDLPISASQMLARVQEQLSSLWEENQALATQTRDRLAQHEAGLMDLREALNRAVDATREAQELNSRNQERLEEALVRTPDLFFLLLLFPPPPCNPSPLRLLPS

SEQ ID NO: 877997 - protein, 3695 aa, Homo sapiens; identical to SEQ ID NO: 877983

SEQ ID NO: 877998 - protein, 3719 aa, Homo sapiens
MAKRLCAGSALCVRGPRGPAPLLLVGLALLGAARAREEAGGGFSLHPPYFNLAEGARIAASATCGEEAPARGSPRPTEDLYCKLVGGPVAGGDPNQTIRGQYCDICTAANSNKAHPASNAIDGTERWWQSPPLSRGLEYNEVNVTLDLGQVFHVAYVLIKFANSPRPDLWVLERSMDFGRTYQPWQFFASSKRDCLERFGPQTLERITRDDAAICTTEYSRIVPLENGEIVVSLVNGRPGAMNFSYSPLLREFTKATNVRLRFLRTNTLLGHLMGKALRDPTVTRRYYYSIKDISIGGRCVCHGHADACDAKDPTDPFRLQCTCQHNTCGGTCDRCCPGFNQQPWKPATANSANECQSCNCYGHATDCYYDPEVDRRRASQSLDGTYQGGGVCIDCQHHTTGVNCERCLPGFYRSPNHPLDSPHVCRRCNCESDFTDGTCEDLTGRCYCRPNFSGERCDVCAEGFTGFPSCYPTPSSSNDTREQVLPAGQIVNCDCSAAGTQGNACRKDPRVGRCLCKPNFQGTHCELCAPGFYGPGCQPCQCSSPGVADDRCDPDTGQCRCRVGFEGATCDRCAPGYFHFPLCQLCGCSPAGTLPEGCDEAGRCLCQPEFAGPHCDRCRPGYHGFPNCQACTCDPRGALDQLCGAGGLCRCRPGYTGTACQECSPGFHGFPSCVPCHCSAEGSLHAACDPRSGQCSCRPRVTGLRCDTCVPGAYNFPYCEAGSCHPAGLAPVDPALPEAQVPCMCRAHVEGPSCDRCKPGFWGLSPSNPEGCTRCSCDLRGTLGGVAECQPGTGQCFCKPHVCGQACASCKDGFFGLDQADYFGCRSCRCDIGGALGQSCEPRTGVCRCRPNTQGPTCSEPARDHYLPDLHHLRLELEEAATPEGHAVRFGFNPLEFENFSWRGYAQMAPVQPRIVARLNLTSPDLFWLVFRYVNRGAMSVSGRVSVREEGRSATCANCTAQSQPVAFPPSTEPAFITVPQRGFGEPFVLNPGTWALRVEAEGVLLDYVVLLPSAYYEAALLQLRVTEACTYRPSAQQSGDNCLLYTHLPLDGFPSAAGLEALCRQDNSLPRPCPTEQLSPSHPPLITCTGSDVDVQLQVAVPQPGRYALVVEYANEDARQEVGVAVHTPQRAPQQGLLSLHPCLYSTLCRGTARDTQDHLAVFHLDSEASVRLTAEQARFFLHGVTLVPIEEFSPEFVEPRVSCISSHGAFGPNSAACLPSRFPKPPQPIILRDCQVIPLPPGLPLTHAQDLTPAMSPAGPRPRPPTAVDPDAEPTLLREPQATVVFTTHVPTLGRYAFLLHGYQPAHPTFPVEVLINAGRVWQGHANASFCPHGYGCRTLVVCEGQALLDVTHSELTVTVRVPEGRWLWLDYVLVVPENVYSFGYLREEPLDKSYDFISHCAAQGYHISPSSSSLFCRNAAASLSLFYNNGARPCGCHEVGATGPTCEPFGGQCPCHAHVIGRDCSRCATGYWGFPNCRPCDCGARLCDELTGQCICPPRTIPPDCLLCQPQTFGCHPLVGCEECNCSGPGIQELTDPTCDTDSGQCKCRPNVTGRRCDTCSPGFHGYPRCRPCDCHEAGTAPGVCDPLTGQCYCKENVQGPKCDQCSLGTFSLDAANPKGCTRCFCFGATERCRSSSYTRQEFVDMEGWVLLSTDRQVVPHERQPGTEMLRADLRHVPEAVPEAFPELYWQAPPSYLGDRVSSYGGTLRYELHSETQRGDVFVPMESRPDVVLQGNQMSITFLEPAYPTPGHVHRGQLQLVEGNFRHTETRNTVSREELMMVLASLEQLQIRALFSQISSAVSLRRVALEVASPAGQGALASNVELCLCPASYRGDSCQECAPGFYRDVKGLFLGRCVPCQCHGHSDRCLPGSGVCVDCQHNTEGAHCERCQAGFMSSRDDPSAPCVSCPCPLSVPSNNFAEGCVLRGGRTQCLCKPGYAGASCERCAPGFFGNPLVLGSSCQPCDCSGNGDPNLLFSDCDPLTGACRGCLRHTTGPRCEICAPGFYGNALLPGNCTRCDCTPCGTEACDPHSGHCLCKAGVTGRRCDRCQEGHFGFNGCGGCRPCACGPAAEGSECHPQSGQCHCRPGTMGPQCRECAPGYWGLPEQGCRRCQCPGGRCDPHTGRCNCPPGLSGERCDTCSQQHQVPVPGGPVGHSIHCEVCDHCVVLLLDDLERAGALLPAIHEQLRGINASSMAWARLHRLNASIADLQSQLRSPLGPRHETAQQLEVLEQQSTSLGQDARRLGGQAVGTRDQASQLLAGTEATLGHAKTLLAAIRAVDRTLSELMSQTGHLGLANASAPSGEQLLRTLAEVERLLWEMRARDLGAPQAAAEAELAAAQRLLARVQEQLSSLWEENQALATQTRDRLAQHEAGLMDLREALNRAVDATREAQELNSRNQERLEEALQRKQELSRDNATLQATLHAARDTLASVFRLLHSLDQAKEELERLAASLDGARTPLLQRMQTFSPAGSKLRLVEAAEAHAQQLGQLALNLSSIILDVNQDRLTQRAIEASNAYSRILQAVQAAEDAAGQALQQADHTWATVVRQGLVDRAQQLLANSTALEEAMLQEQQRLGLVWAALQGARTQLRDVRAKKDQLEAHIQAAQAMLAMDTDETSKKIAHAKAVAAEAQDTATRVQSQLQAMQENVERWQGQYEGLRGQDLGQAVLDAGHSVSTLEKTLPQLLAKLSILENRGVHNASLALSASIGRVRELIAQARGAASKVGESPRGRWTSGRVVVELMDRAPQVKVPMKFNGRSGVQLRTPRDLADLAAYTALKFYLQGPEPEPGQGTEDRFVMYMGSRQATGDYMGVSLRDKKVHWVYQLGEAGPAVLSIDEDIGEQFAAVSLDRTLQFGHMSVTVERQMIQETKGDTVAPGAEGLLNLRPDDFVFYVGGYPSTFTPPPLLRFPGYRGCIEMDTLNEEVVSLYNFERTFQLDTAVDRPCARSKSTGDPWLTDGSYLDGTGFARISFDSQISTTKRFEQELRLVSYSGVLFFLKQQSQFLCLAVQEGSLVLLYDFGAGLKKAVPLQPPPPLTSASKAIQVFLLGGSRKRVLVRVERATVYSVEQDNDLELADAYYLGGVPPDQLPPSLRWLFPTGGSVRGCVKGIKALGKYVDLKRLNTTGVSAGCTADLLVGRAMTFHGHGFLRLALSNVAPLTGNVYSGFGFHSAQDSALLYYRASPDGLCQVSLQQGRVSLQLLRTEVKTQAGFADGAPHYVAFYSNATGVWLYVDDQLQQMKPHRGPPPELQPQPEGPPRLLLGGLPESGTIYNFSGCISNVFVQRLLGPQRVFDLQQNLGSVNVSTGCAPALQAQTPGLGPRGLQATARKASRRSRQPARHPACMLPPHLRTTRDSYQFGGSLSSHLEFVGILARHRNWPSLSMHVLPRSSRGLLLFTARLRPGSPSLALFLSNGHFVAQMEGLGTRLRAQSRQRSRPGRWHKVSVRWEKNRILLVTDGARAWSQEGPHRQHQGAEHPQPHTLFVGGLPASSHSSKLPVTVGFSGCVKRLRLHGRPLGAPTRMAGVTPCILGPLEAGLFFPGSGGVITLDLPGATLPDVGLELEVRPLAVTGLIFHLGQARTPPYLQLQVTEKQVLLRADDGAGEFSTSVTRPSVLCDGQWHRLAVMKSGNVLRLEVDAQSNHTVGPLLAAAAGAPAPLYLGGLPEPMAVQPWPPAYCGCMRRLAVNRSPVAMTRSVEVHGAVGASGCPAA

SEQ ID NO: 877999 - protein, 3448 aa, Homo sapiens
MGLIPPPVYPKAAVHLPAQHLRGHLRPLLPRFYRSPNHPLDSPHVCRRCNCESDFTDGTCEDLTGRCYCRPNFSGERCDVCAEGFTGFPSCYPTPSSSNDTREQVLPAGQIVNCDCSAAGTQGNACRKDPRVGRCLCKPNFQGTHCELCAPGFYGPGCQPCQCSSPGVADDRCDPDTGQCRCRVGFEGATCDRCAPGYFHFPLCQLCGCSPAGTLPEGCDEAGRCLCQPEFAGPHCDRCRPGYHGFPNCQACTCDPRGALDQLCGAGGLCRCRPGYTGTACQECSPGFHGFPSCVPCHCSAEGSLHAACDPRSGQCSCRPRVTGLRCDTCVPGAYNFPYCEAGSCHPAGLAPVDPALPEAQVPCMCRAHVEGPSCDRCKPGFWGLSPSNPEGCTRCSCDLRGTLGGVAECQPGTGQCFCKPHVCGQACASCKDGFFGLDQADYFGCRSCRCDIGGALGQSCEPRTGVCRCRPNTQGPTCSEPARDHYLPDLHHLRLELEEAATPEGHAVRFGFNPLEFENFSWRGYAQMAPVQPRIVARLNLTSPDLFWLVFRYVNRGAMSVSGRVSVREEGRSATCANCTAQSQPVAFPPSTEPAFITVPQRGFGEPFVLNPGTWALRVEAEGVLLDYVVLLPSAYYEAALLQLRVTEACTYRPSAQQSGDNCLLYTHLPLDGFPSAAGLEALCRQDNSLPRPCPTEQLSPSHPPLITCTGSDVDVQLQVAVPQPGRYALVVEYANEDARQEVGVAVHTPQRAPQQGLLSLHPCLYSTLCRGTARDTQDHLAVFHLDSEASVRLTAEQARFFLHGVTLVPIEEFSPEFVEPRVSCISSHGAFGPNSAACLPSRFPKPPQPIILRDCQVIPLPPGLPLTHAQDLTPAMSPAGPRPRPPTAVDPDAEPTLLREPQATVVFTTHVPTLGRYAFLLHGYQPAHPTFPVEVLINAGRVWQGHANASFCPHGYGCRTLVVCEGQALLDVTHSELTVTVRVPEGRWLWLDYVLVVPENVYSFGYLREEPLDKSYDFISHCAAQGYHISPSSSSLFCRNAAASLSLFYNNGARPCGCHEVGATGPTCEPFGGQCPCHAHVIGRDCSRCATGYWGFPNCRREYPSPWAPSGRELVPEPKVDGSTRKQGQENVLEPGRAALLPHLRAWAQDFSLRAMQKVSGTSRWSTVSDDDVDSEQLPPCQELSKAQHPGQGSLFLSPPPPSHCHIPYGLHSGPLRGAGLGRGVSKPCTRPTACDCGARLCDELTGQCICPPRTIPPDCLLCQPQTFGCHPLVGCEECNCSGPGIQELTDPTCDTDSGQCKCRPNVTGRRCDTCSPGFHGYPRCRPCDCHEAGTAPGVCDPLTGQCYCKENVQGPKCDQCSLGTFSLDAANPKGCTRCFCFGATERCRSSSYTRQEFVDMEGWVLLSTDRQVVPHERQPGTEMLRADLRHVPEAVPEAFPELYWQAPPSYLGDRVSSYGGTLRYELHSETQRGDVFVPMESRPDVVLQGNQMSITFLEPAYPTPGHVHRGQLQLVEGNFRHTETRNTVSREELMMVLASLEQLQIRALFSQISSAVSLRRVALEVASPAGQGALASNVELCLCPASYRGDSCQECAPGFYRDVKGLFLGRCVPCQCHGHSDRCLPGSGVCVDCQHNTEGAHCERCQAGFMSSRDDPSAPCVSCPCPLSVPSNNFAEGCVLRGGRTQCLCKPGYAGASCERCAPGFFGNPLVLGSSCQPCDCSGNGDPNLLFSDCDPLTGACRGCLRHTTGPRCEICAPGFYGNALLPGNCTRCDCTPCGTEACDPHSGHCLCKAGVTGRRCDRCQEGHFGFNGCGGCRPCACGPAAEGSECHPQSGQCHCRPGTMGPQCRECAPGYWGLPEQGCRRCQCPGGRCDPHTGRCNCPPGLSGERCDTCSQQHQVPVPGGPVGHSIHCEVCDHCVVLLLDDLERAGALLPAIHEQLRGINASSMAWARLHRLNASIADLQSQLRSPLGPRHETAQQLEVLEQQSTSLGQDARRLGGQAVGTRDQASQLLAGTEATLGHAKTLLAAIRAVDRTLSELMSQTGHLGLANASAPSGEQLLRTLAEVERLLWEMRARDLGAPQAAAEAELAAAQRLLARVQEQLSSLWEENQALATQTRDRLAQHEAGLMDLREALNRAVDATREAQELNSRNQERLEEALQRKQELSRDNATLQATLHAARDTLASVFRLLHSLDQAKEELERLAASLDGARTPLLQRMQTFSPAGSKLRLVEAAEAHAQQLGQLALNLSSIILDVNQDRLTQRAIEASNAYSRILQAVQAAEDAAGQALQQADHTWATVVRQGLVDRAQQLLANSTALEEAMLQEQQRLGLVWAALQGARTQLRDVRAKKDQLEAHIQAAQAMLAMDTDETSKKIAHAKAVAAEAQDTATRVQSQLQAMQENVERWQGQYEGLRGQDLGQAVLDAGHSVSTLEKTLPQLLAKLSILENRGVHNASLALSASIGRVRELIAQARGAASKVKVPMKFNGRSGVQLRTPRDLADLAAYTALKFYLQGPEPEPGQGTEDRFVMYMGSRQATGDYMGVSLRDKKVHWVYQLGEAGPAVLSIDEDIGEQFAAVSLDRTLQFGHMSVTVERQMIQETKGDTVAPGAEGLLNLRPDDFVFYVGGYPSTFTPPPLLRFPGYRGCIEMDTLNEEVVSLYNFERTFQLDTAVDRPCARSKSTGDPWLTDGSYLDGTGFARISFDSQISTTKRFEQELRLVSYSGVLFFLKQQSQFLCLAVQEGSLVLLYDFGAGLKKAVPLQPPPPLTSASKAIQVFLLGGSRKRVLVRVERATVYSVEQDNDLELADAYYLGGVPPDQLPPSLRWLFPTGGSVRGCVKGIKALGKYVDLKRLNTTGVSAGCTADLLVGRAMTFHGHGFLRLALSNVAPLTGNVYSGFGFHSAQDSALLYYRASPDGLCQVSLQQGRVSLQLLRTEVKTQAGFADGAPHYVAFYSNATGVWLYVDDQLQQMKPHRGPPPELQPQPEGPPRLLLGGLPESGTIYNFSGCISNVFVQRLLGPQRVFDLQQNLGSVNVSTGCAPALQAQTPGLGPRGLQATARKASRRSRQPARHPACMLPPHLRTTRDSYQFGGSLSSHLEFVGILARHRNWPSLSMHVLPRSSRGLLLFTARLRPGSPSLALFLSNGHFVAQMEGLGTRLRAQSRQRSRPGRWHKVSVRWEKNRILLVTDGARAWSQEGPHRQHQGAEHPQPHTLFVGGLPASSHSSKLPVTVGFSGCVKRLRLHGRPLGAPTRMAGVTPCILGPLEAGLFFPGSGGVITLDLPGATLPDVGLELEVRPLAVTGLIFHLGQARTPPYLQLQVTEKQVLLRADDGAGEFSTSVTRPSVLCDGQWHRLAVMKSGNVLRLEVDAQSNHTVGPLLAAAAGAPAPLYLGGLPEPMAVQPWPPAYCGCMRRLAVNRSPVAMTRSVEVHGAVGASGCPAA

SEQ ID NO: 878000 - protein, 1893 aa, Homo sapiens
MLHGFPVPRACRIPEGLTCELAGWGPSSSQSLMPPAPVHPQECAPGFYRDVKGLFLGRCVPCQCHGHSDRCLPGSGVCVDCQHNTEGAHCERCQAGFMSSRDDPSAPCVSCPCPLSVPSNNFAEGCVLRGGRTQCLCKPGYAGASCERCAPGFFGNPLVLGSSCQPCDCSGNGDPNLLFSDCDPLTGACRGCLRHTTGPRCEICAPGFYGNALLPGNCTRCDCTPCGTEACDPHSGHCLCKAGVTGRRCDRCQEGHFGFNGCGGCRPCACGPAAEGSECHPQSGQCHCRPGTMGPQCRECAPGYWGLPEQGCRRCQCPGGRCDPHTGRCNCPPGLSGERCDTCSQQHQVPVPGGPVGHSIHCEVCDHCVVLLLDDLERAGALLPAIHEQLRGINASSMAWARLHRLNASIADLQSQLRSPLGPRHETAQQLEVLEQQSTSLGQDARRLGGQAVGTRDQASQLLAGTEATLGHAKTLLAAIRAVDRTLSELMSQTGHLGLANASAPSGEQLLRTLAEVERLLWEMRARDLGAPQAAAEAELAAAQRLLARVQEQLSSLWEENQALATQTRDRLAQHEAGLMDLREALNRAVDATREAQELNSRNQERLEEALQRKQELSRDNATLQATLHAARDTLASVFRLLHSLDQAKEELERLAASLDGARTPLLQRMQTFSPAGSKLRLVEAAEAHAQQLGQLALNLSSIILDVNQDRLTQRAIEASNAYSRILQAVQAAEDAAGQALQQADHTWATVVRQGLVDRAQQLLANSTALEEAMLQEQQRLGLVWAALQGARTQLRDVRAKKDQLEAHIQAAQAMLAMDTDETSKKIAHAKAVAAEAQDTATRVQSQLQAMQENVERWQGQYEGLRGQDLGQAVLDAGHSVSTLEKTLPQLLAKLSILENRGVHNASLALSASIGRVRELIAQARGAASKVKVPMKFNGRSGVQLRTPRDLADLAAYTALKFYLQGPEPEPGQGTEDRFVMYMGSRQATGDYMGVSLRDKKVHWVYQLGEAGPAVLSIDEDIGEQFAAVSLDRTLQFGHMSVTVERQMIQETKGDTVAPGAEGLLNLRPDDFVFYVGGYPSTFTPPPLLRFPGYRGCIEMDTLNEEVVSLYNFERTFQLDTAVDRPCARSKSTGDPWLTDGSYLDGTGFARISFDSQISTTKRFEQELRLVSYSGVLFFLKQQSQFLCLAVQEGSLVLLYDFGAGLKKAVPLQPPPPLTSASKAIQVFLLGGSRKRVLVRVERATVYSVEQDNDLELADAYYLGGVPPDQLPPSLRWLFPTGGSVRGCVKGIKALGKYVDLKRLNTTGVSAGCTADLLVGRAMTFHGHGFLRLALSNVAPLTGNVYSGFGFHSAQDSALLYYRASPDGLCQVSLQQGRVSLQLLRTEVKTQAGFADGAPHYVAFYSNATGVWLYVDDQLQQMKPHRGPPPELQPQPEGPPRLLLGGLPESGTIYNFSGCISNVFVQRLLGPQRVFDLQQNLGSVNVSTGCAPALQAQTPGLGPRGLQATARKASRRSRQPARHPACMLPPHLRTTRDSYQFGGSLSSHLEFVGILARHRNWPSLSMHVLPRSSRGLLLFTARLRPGSPSLALFLSNGHFVAQMEGLGTRLRAQSRQRSRPGRWHKVSVRWEKNRILLVTDGARAWSQEGPHRQHQGAEHPQPHTLFVGGLPASSHSSKLPVTVGFSGCVKRLRLHGRPLGAPTRMAGVTPCILGPLEAGLFFPGSGGVITLDLPGATLPDVGLELEVRPLAVTGLIFHLGQARTPPYLQLQVTEKQVLLRADDGAGEFSTSVTRPSVLCDGQWHRLAVMKSGNVLRLEVDAQSNHTVGPLLAAAAGAPAPLYLGGLPEPMAVQPWPPAYCGCMRRLAVNRSPVAMTRSVEVHGAVGASGCPAA

SEQ ID NO: 878001 - protein, 3579 aa, Homo sapiens
MAKRLCAGSALCVRGPRGPAPLLLVGLALLGAARAREEAGGGFSLHPPYFNLAEGARIAASATCGEEAPARGSPRPTEDLYCKLVGGPVAGGDPNQTIRGQYCDICTAANSNKAHPASNAIDGTERWWQSPPLSRGLEYNEVNVTLDLGQVFHVAYVLIKFANSPRPDLWVLERSMDFGRTYQPWQFFASSKRDCLERFGPQTLERITRDDAAICTTEYSRIVPLENGEIVVSLVNGRPGAMNFSYSPLLREFTKATNVRLRFLRTNTLLGHLMGKALRDPTVTRRYYYSIKDISIGGRCVCHGHADACDAKDPTDPFRLQCTCQHNTCGGTCDRCCPGFNQQPWKPATANSANECQSCNCYGHATDCYYDPEVDRRRASQSLDGTYQGGGVCIDCQHHTTGVNCERCLPGFYRSPNHPLDSPHVCRRCNCESDFTDGTCEDLTGRCYCRPNFSGERCDVCAEGFTGFPSCYPTPSSSNDTREQVLPAGQIVNCDCSAAGTQGNACRKDPRVGRCLCKPNFQGTHCELCAPGFYGPGCQPCQCSSPGVADDRCDPDTGQCRCRVGFEGATCDRCAPGYFHFPLCQLCGCSPAGTLPEGCDEAGRCLCQPEFAGPHCDRCRPGYHGFPNCQACTCDPRGALDQLCGAGGLCRCRPGYTGTACQECSPGFHGFPSCVPCHCSAEGSLHAACDPRSGQCSCRPRVTGLRCDTCVPGAYNFPYCEAGSCHPAGLAPVDPALPEAQVPCMCRAHVEGPSCDRCKPGFWGLSPSNPEGCTRCSCDLRGTLGGVAECQPGTGQCFCKPHVCGQACASCKDGFFGLDQADYFGCRSCRCDIGGALGQSCEPRTGVCRCRPNTQGPTCSEPARDHYLPDLHHLRLELEEAATPEGHAVRFGFNPLEFENFSWRGYAQMAPVQPRIVARLNLTSPDLFWLVFRYVNRGAMSVSGRVSVREEGRSATCANCTAQSQPVAFPPSTEPAFITVPQRGFGEPFVLNPGTWALRVEAEGVLLDYVVLLPSAYYEAALLQLRVTEACTYRPSAQQSGDNCLLYTHLPLDGFPSAAGLEALCRQDNSLPRPCPTEQLSPSHPPLITCTGSDVDVQLQVAVPQPGRYALVVEYANEDARQEVGVAVHTPQRAPQQGLLSLHPCLYSTLCRGTARDTQDHLAVFHLDSEASVRLTAEQARFFLHGVTLVPIEEFSPEFVEPRVSCISSHGAFGPNSAACLPSRFPKPPQPIILRDCQVIPLPPGLPLTHAQDLTPAMSPAGPRPRPPTAVDPDAEPTLLREPQATVVFTTHVPTLGRYAFLLHGYQPAHPTFPVEVLINAGRVWQGHANASFCPHGYGCRTLVVCEGQALLDVTHSELTVTVRVPEGRWLWLDYVLVVPENVYSFGYLREEPLDKSYDFISHCAAQGYHISPSSSSLFCRNAAASLSLFYNNGARPCGCHEVGATGPTCEPFGGQCPCHAHVIGRDCSRCATGYWGFPNCRPCDCGARLCDELTGQCICPPRTIPPDCLLCQPQTFGCHPLVGCEECNCSGPGIQELTDPTCDTDSGQCKCRPNVTGRRCDTCSPGFHGYPRCRPCDCHEAGTAPGVCDPLTGQCYCKENVQGPKCDQCSLGTFSLDAANPKGCTRCFCFGATERCRSSSYTRQEFVDMEGWVLLSTDRQVVPHERQPGTEMLRADLRHVPEAVPEAFPELYWQAPPSYLGDRVSSYGGTLRYELHSETQRGDVFVPMESRPDVVLQGNQMSITFLEPAYPTPGHVHRGQLQLVEGNFRHTETRNTVSREELMMVLASLEQLQIRALFSQISSAVSLRRVALEVASPAGQGALASNVELCLCPASYRGDSCQECAPGFYRDVKGLFLGRCVPCQCHGHSDRCLPGSGVCVDCQHNTEGAHCERCQAGFMSSRDDPSAPCVSCPCPLSVPSNNFAEGCVLRGGRTQCLCKPGYAGASCERCAPGFFGNPLVLGSSCQPCDCSGNGDPNLLFSDCDPLTGACRGCLRHTTGPRCEICAPGFYGNALLPGNCTRCDCTPCGTEACDPHSGHCLCKAGVTGRRCDRCQEGHFGFNGCGGCRPCACGPAAEGSECHPQSGQCHCRPGTMGPQCRECAPGYWGLPEQGCRRCQCPGGRCDPHTGRCNCPPGLSGERCDTCSQQHQVPVPGGPVGHSIHCEVCDHCVVLLLDDLERAGALLPAIHEQLRGINASSMAWARLHRLNASIADLQSQLRSPLGPRHETAQQLEVLEQQSTSLGQDARRLGGQAVGTRDQASQLLAGTEATLGHAKTLLAAIRAVDRTLSELMSQTGHLGLANASAPSGEQLLRTLAEVERLLWEMRARDLGAPQAAAEAELAAAQRLLARVQEQLSSLWEENQALATQTRDRLAQHEAGLMDLREALNRAVDATREAQELNSRNQERLEEALQRKQELSRDNATLQATLHAARDTLASVFRLLHSLDQAKEELERLAASLDGARTPLLQRMQTFSPAGSKLRLVEAAEAHAQQLGQLALNLSSIILDVNQDRLTQRAIEASNAYSRILQAVQAAEDAAGQALQQADHTWATVVRQGLVDRAQQLLANSTALEEAMLQEQQRLGLVWAALQGARTQLRDVRAKKDQLEAHIQAAQAMLAMDTDETSKKIAHAKAVAAEAQDTATRVQSQLQAMQENVERWQGQYEGLRGQDLGQAVLDAGHSVSTLEKTLPQLLAKLSILENRGVHNASLALSASIGRVRELIAQARGAASKVKVPMKFNGRSGVQLRTPRDLADLAAYTALKFYLQGPEPEPGQGTEDRFVMYMGSRQATGDYMGVSLRDKKVHWVYQLGEAGPAVLSIDEDIGEQFAAVSLDRTLQFGHMSVTVERQMIQETKGDTVAPGAEGLLNLRPDDFVFYVGGYPSTFTPPPLLRFPGYRGCIEMDTLNEEVVSLYNFERTFQLDTAVDRPCARSKSTGDPWLTDGSYLDGTGFARISFDSQISTTKRFEQELRLVSYSGVLFFLKQQSQFLCLAVQEGSLVLLYDFGAGLKKAVPLQPPPPLTSASKAIQVFLLGGSRKRVLVRVERATVYSVEQDNDLELADAYYLGGVPPDQLPPSLRWLFPTGGSVRGCVKGIKALGKYVDLKRLNTTGVSAGCTADLLVGRAMTFHGHGFLRLALSNVAPLTGNVYSGFGFHSAQDSALLYYRASPDGLCQVSLQQGRVSLQLLRTEVKTQAGFADGAPHYVAFYSNATGVWLYVDDQLQQMKPHRGPPPELQPQPEGPPRLLLGGLPESGTIYNFSGCISNVFVQRLLGPQRVFDLQQNLGSVNVSTGCAPALQAQTPGLGPRGLQATARKASRRSRQPARHPACMLPPHLRTTRDSYQFGGSLSSHLEFVGILARHRNWPSLSMHVLPRSSRGLLLFTARLRPGSPSLALFLSNGHFVAQMEGLGTRLRAQSRQRSRPGRWHKVSVRWEKNRILLVTDGARAWSQEGPHRQHQGAEHPQPHTLFVGGLPASSHSSKLPVTVGFSGCVKRLRLHGRPLGAPTRMAGVTPCILGPLEAGLFFPGSGGVITLEPMAVQPWPPAYCGCMRRLAVNRSPVAMTRSVEVHGAVGASGCPAA

SEQ ID NO: 878002 - protein, 794 aa, Homo sapiens
MDTLNEEVVSLYNFERTFQLDTAVDRPCARSKSTGDPWLTDGSYLDGTGFARISFDSQISTTKRFEQELRLVSYSGVLFFLKQQSQFLCLAVQEGSLVLLYDFGAGLKKAVPLQPPPPLTSASKAIQVFLLGGSRKRVLVRVERATVYSVEQDNDLELADAYYLGGVPPDQLPPSLRWLFPTGGSVRGCVKGIKALGKYVDLKRLNTTGVSAGCTADLLVGRAMTFHGHGFLRLALSNVAPLTGNVYSGFGFHSAQDSALLYYRASPDGLCQVSLQQGRVSLQLLRTEVKTQAGFADGAPHYVAFYSNATGVWLYVDDQLQQMKPHRGPPPELQPQPEGPPRLLLGGLPESGTIYNFSGCISNVFVQRLLGPQRVFDLQQNLGSVNVSTGCAPALQAQTPGLGPRGLQATARKASRRSRQPARHPACMLPPHLRTTRDSYQFGGSLSSHLEFVGILARHRNWPSLSMHVLPRSSRGLLLFTARLRPGSPSLALFLSNGHFVAQMEGLGTRLRAQSRQRSRPGRWHKVSVRWEKNRILLVTDGARAWSQEGPHRQHQGAEHPQPHTLFVGGLPASSHSSKLPVTVGFSGCVKRLRLHGRPLGAPTRMAGVTPCILGPLEAGLFFPGSGGVITLDLPGATLPDVGLELEVRPLAVTGLIFHLGQARTPPYLQLQVTEKQVLLRADDGAGEFSTSVTRPSVLCDGQWHRLAVMKSGNVLRLEVDAQSNHTVGPLLAAAAGAPAPLYLGGLPEPMAVQPWPPAYCGCMRRLAVNRSPVAMTRSVEVHGAVGASGCPAA

SEQ ID NO: 878003 - protein, 2871 aa, Homo sapiens
MAKRLCAGSALCVRGPRGPAPLLLVGLALLGAARAREEAGGGFSLHPPYFNLAEGARIAASATCGEEAPARGSPRPTEDLYCKLVGGPVAGGDPNQTIRGQYCDICTAANSNKAHPASNAIDGTERWWQSPPLSRGLEYNEVNVTLDLGQVFHVAYVLIKFANSPRPDLWVLERSMDFGRTYQPWQFFASSKRDCLERFGPQTLERITRDDAAICTTEYSRIVPLENGEIVVSLVNGRPGAMNFSYSPLLREFTKATNVRLRFLRTNTLLGHLMGKALRDPTVTRRYYYSIKDISIGGRCVCHGHADACDAKDPTDPFRLQCTCQHNTCGGTCDRCCPGFNQQPWKPATANSANECQSCNCYGHATDCYYDPEVDRRRASQSLDGTYQGGGVCIDCQHHTTGVNCERCLPGFYRSPNHPLDSPHVCRRCNCESDFTDGTCEDLTGRCYCRPNFSGERCDVCAEGFTGFPSCYPTPSSSNDTREQVLPAGQIVNCDCSAAGTQGNACRKDPRVGRCLCKPNFQGTHCELCAPGFYGPGCQPCQCSSPGVADDRCDPDTGQCRCRVGFEGATCDRCAPGYFHFPLCQLCGCSPAGTLPEGCDEAGRCLCQPEFAGPHCDRCRPGYHGFPNCQACTCDPRGALDQLCGAGGLCRCRPGYTGTACQECSPGFHGFPSCVPCHCSAEGSLHAACDPRSGQCSCRPRVTGLRCDTCVPGAYNFPYCEAGSCHPAGLAPVDPALPEAQVPCMCRAHVEGPSCDRCKPGFWGLSPSNPEGCTRCSCDLRGTLGGVAECQPGTGQCFCKPHVCGQACASCKDGFFGLDQADYFGCRSCRCDIGGALGQSCEPRTGVCRCRPNTQGPTCSEPARDHYLPDLHHLRLELEEAATPEGHAVRFGFNPLEFENFSWRGYAQMAPVQPRIVARLNLTSPDLFWLVFRYVNRGAMSVSGRVSVREEGRSATCANCTAQSQPVAFPPSTEPAFITVPQRGFGEPFVLNPGTWALRVEAEGVLLDYVVLLPSAYYEAALLQLRVTEACTYRPSAQQSGDNCLLYTHLPLDGFPSAAGLEALCRQDNSLPRPCPTEQLSPSHPPLITCTGSDVDVQLQVAVPQPGRYALVVEYANEDARQEVGVAVHTPQRAPQQGLLSLHPCLYSTLCRGTARDTQDHLAVFHLDSEASVRLTAEQARFFLHGVTLVPIEEFSPEFVEPRVSCISSHGAFGPNSAACLPSRFPKPPQPIILRDCQVIPLPPGLPLTHAQDLTPAMSPAGPRPRPPTAVDPDAEPTLLREPQATVVFTTHVPTLGRYAFLLHGYQPAHPTFPVEVLINAGRVWQGHANASFCPHGYGCRTLVVCEGQALLDVTHSELTVTVRVPEGRWLWLDYVLVVPENVYSFGYLREEPLDKSYDFISHCAAQGYHISPSSSSLFCRNAAASLSLFYNNGARPCGCHEVGATGPTCEPFGGQCPCHAHVIGRDCSRCATGYWGFPNCRPCDCGARLCDELTGQCICPPRTIPPDCLLCQPQTFGCHPLVGCEECNCSGPGIQELTDPTCDTDSGQCKCRPNVTGRRCDTCSPGFHGYPRCRPCDCHEAGTAPGVCDPLTGQCYCKENVQGPKCDQCSLGTFSLDAANPKGCTRCFCFGATERCRSSSYTRQEFVDMEGWVLLSTDRQVVPHERQPGTEMLRADLRHVPEAVPEAFPELYWQAPPSYLGDRVSSYGGTLRYELHSETQRGDVFVPMESRPDVVLQGNQMSITFLEPAYPTPGHVHRGQLQLVEGNFRHTETRNTVSREELMMVLASLEQLQIRALFSQISSAVSLRRVALEVASPAGQGALASNVELCLCPASYRGDSCQECAPGFYRDVKGLFLGRCVPCQCHGHSDRCLPGSGVCVDCQHNTEGAHCERCQAGFMSSRDDPSAPCVSCPCPLSVPSNNFAEGCVLRGGRTQCLCKPGYAGASCERCAPGFFGNPLVLGSSCQPCDCSGNGDPNLLFSDCDPLTGACRGCLRHTTGPRCEICAPGFYGNALLPGNCTRCDCTPCGTEACDPHSGHCLCKAGVTGRRCDRCQEGHFGFNGCGGCRPCACGPAAEGSECHPQSGQCHCRPGTMGPQCRECAPGYWGLPEQGCRRCQCPGGRCDPHTGRCNCPPGLSGERCDTCSQQHQVPVPGGPVGHSIHCEVCDHCVVLLLDDLERAGALLPAIHEQLRGINASSMAWARLHRLNASIADLQSQLRSPLGPRHETAQQLEVLEQQSTSLGQDARRLGGQAVGTRDQASQLLAGTEATLGHAKTLLAAIRAVDRTLSELMSQTGHLGLANASAPSGEQLLRTLAEVERLLWEMRARDLGAPQAAAEAELAAAQRLLARVQEQLSSLWEENQALATQTRDRLAQHEAGLMDLREALNRAVDATREAQELNSRNQERLEEALQRKQELSRDNATLQATLHAARDTLASVFRLLHSLDQAKEELERLAASLDGARTPLLQRMQTFSPAGSKLRLVEAAEAHAQQLGQLALNLSSIILDVNQDRLTQRAIEASNAYSRILQAVQAAEDAAGQALQQADHTWATVVRQGLVDRAQQLLANSTALEEAMLQEQQRLGLVWAALQGARTQLRDVRAKKDQLEAHIQAAQAMLAMDTDETSKKIAHAKAVAAEAQDTATRVQSQLQAMQENVERWQGQYEGLRGQDLGQAVLDAGHSVSTLEKTLPQLLAKLSILENRGVHNASLALSASIGRVRELIAQARGAASKVKVPMKFNGRSGVQLRTPRDLADLAAYTALKFYLQGPEPEPGQGTEDRFVMYMGSRQATGDYMGVSLRDKKVHWVYQLGEAGPAVLSIDEDIGEQFAAVSLDRWEAQERGRMPPTAGPLPVRHLSPLRVHPPPFTSPCP

SEQ ID NO: 878004 - protein, 1316 aa, Homo sapiens
MAKRLCAGSALCVRGPRGPAPLLLVGLALLGAARAREEAGGGFSLHPPYFNLAEGARIAASATCGEEAPARGSPRPTEDLYCKLVGGPVAGGDPNQTIRGQYCDICTAANSNKAHPASNAIDGTERWWQSPPLSRGLEYNEVNVTLDLGQVFHVAYVLIKFANSPRPDLWVLERSMDFGRTYQPWQFFASSKRDCLERFGPQTLERITRDDAAICTTEYSRIVPLENGEIVVSLVNGRPGAMNFSYSPLLREFTKATNVRLRFLRTNTLLGHLMGKALRDPTVTRRYYYSIKDISIGGRCVCHGHADACDAKDPTDPFRLQCTCQHNTCGGTCDRCCPGFNQQPWKPATANSANECQSCNCYGHATDCYYDPEVDRRRASQSLDGTYQGGGVCIDCQHHTTGVNCERCLPGFYRSPNHPLDSPHVCRRCNCESDFTDGTCEDLTGRCYCRPNFSGERCDVCAEGFTGFPSCYPTPSSSNDTREQVLPAGQIVNCDCSAAGTQGNACRKDPRVGRCLCKPNFQGTHCELCAPGFYGPGCQPCQCSSPGVADDRCDPDTGQCRCRVGFEGATCDRCAPGYFHFPLCQLCGCSPAGTLPEGCDEAGRCLCQPEFAGPHCDRCRPGYHGFPNCQACTCDPRGALDQLCGAGGLCRCRPGYTGTACQECSPGFHGFPSCVPCHCSAEGSLHAACDPRSGQCSCRPRVTGLRCDTCVPGAYNFPYCEAGSCHPAGLAPVDPALPEAQVPCMCRAHVEGPSCDRCKPGFWGLSPSNPEGCTRCSCDLRGTLGGVAECQPGTGQCFCKPHVCGQACASCKDGFFGLDQADYFGCRSCRCDIGGALGQSCEPRTGVCRCRPNTQGPTCSEPARDHYLPDLHHLRLELEEAATPEGHAVRFGFNPLEFENFSWRGYAQMAPVQPRIVARLNLTSPDLFWLVFRYVNRGAMSVSGRVSVREEGRSATCANCTAQSQPVAFPPSTEPAFITVPQRGFGEPFVLNPGTWALRVEAEGVLLDYVVLLPSAYYEAALLQLRVTEACTYRPSAQQSGDNCLLYTHLPLDGFPSAAGLEALCRQDNSLPRPCPTEQLSPSHPPLITCTGSDVDVQLQVAVPQPGRYALVVEYANEDARQEVGVAVHTPQRAPQQGLLSLHPCLYSTLCRGTARDTQDHLAVFHLDSEASVRLTAEQARFFLVRTPQVPTPRGQLLSEDLNMHERGEDSWGPRSPRRPHSLMPSPACFFWNPSCKRFVDSVPFDVPPSCSMCSGKHLQSQLPGPRAATSWHRQRWLPVLELSFLVLRASLYKKERDEEQDIITEPAVSPCTASV

SEQ ID NO: 878005 - protein, 88 aa, Homo sapiens
MGVREGAQALSRYGNERKYPGPAQGSVLGVPRPLLTGSEPVARVWPGHLCLSCLQVSSYGGTLRYELHSETQRGDVFVPMESRPDVVL

SEQ ID NO: 878006 - protein, 195 aa, Homo sapiens
MSQTGHLGLANASAPSGEQLLRTLAEVERLLWEMRARDLGAPQAAAEAELAAAQRCGGVVPGRRGGERQGPGSSKGEVSMEWHQVGITGQMDLAGTKWRPGVMKGPGFQSDHPHLVSASAVARVQEQLSSLWEENQALATQTRDRLAQHEAGLMDLREALNRAVDATREAQELNSRNQERLEEALVRTPDLFFLL

SEQ ID NO: 878007 - protein, 790 aa, Homo sapiens
MSRRRHSDENDGGQPHKRRKTSDANETEDHLESLICKVGEKSACSLESNLEGLAGVLEADLPNYKSKILRLLCTVARLLPEKLTIYTTLVGLLNARNYNFGGEFVEAMIRQLKESLKANNYNEAVYLVRFLSDLVNCHVIAAPSMVAMFENFVSVTQEEDVPQVRRDWYVYAFLSSLPWVGKELYEKKDAEMDRIFANTESYLKRRQKTHVPMLQVWTADKPHPQEEYLDCLWAQIQKLKKDRWQERHILRPYLAFDSILCEALQHNLPPFTPPPHTEDSVYPMPRVIFRMFDYTDDPEGPVMPGSHSVERFVIEENLHCIIKSHWKERKTCAAQLVSYPGKNKIPLNYHIVEVIFAELFQLPAPPHIDVMYTTLLIELCKLQPGSLPQVLAQATEMLYMRLDTMNTTCVDRFINWFSHHLSNFQFRWSWEDWSDCLSQDPESPKPKFVREVLEKCMRLSYHQRILDIVPPTFSALCPANPTCIYKYGDESSNSLPGHSVALCLAVAFKSKATNDEIFSILKDVPNPNQDDDDDEGFSFNPLKIEVFVQTLLHLAAKSFSHSFSALAKFHEVFKTLAESDEGKLHVLRVMFEVWRNHPQMIAVLVDKMIRTQIVDCAAVANWIFSSELSRDFTRLFVWEILHSTIRKMNKHVLKIQKELEEAKEKLARQHKRRSDDDDRSSDRKDGVLEEQIERLQEKVESAQSEQKNLFLVIFQRFIMILTEHLVRCETDGTSVLTPWYKNCIERLQQIFLQHHQIIQQYMVTLENLLFTAELDPHILAVFQQFCALQA

SEQ ID NO: 878008 - protein, 790 aa, Homo sapiens; identical to SEQ ID NO: 878007

SEQ ID NO: 878009 - protein, 790 aa, Homo sapiens; identical to SEQ ID NO: 878007

SEQ ID NO: 878010 - protein, 723 aa, Homo sapiens
MQKIYESSARLLPEKLTIYTTLVGLLNARNYNFGGEFVEAMIRQLKESLKANNYNEAVYLVRFLSDLVNCHVIAAPSMVAMFENFVSVTQEEDVPQVRRDWYVYAFLSSLPWVGKELYEKKDAEMDRIFANTESYLKRRQKTHVPMLQVWTADKPHPQEEYLDCLWAQIQKLKKDRWQERHILRPYLAFDSILCEALQHNLPPFTPPPHTEDSVYPMPRVIFRMFDYTDDPEGPVMPGSHSVERFVIEENLHCIIKSHWKERKTCAAQLVSYPGKNKIPLNYHIVEVIFAELFQLPAPPHIDVMYTTLLIELCKLQPGSLPQVLAQATEMLYMRLDTMNTTCVDRFINWFSHHLSNFQFRWSWEDWSDCLSQDPESPKPKFVREVLEKCMRLSYHQRILDIVPPTFSALCPANPTCIYKYGDESSNSLPGHSVALCLAVAFKSKATNDEIFSILKDVPNPNQDDDDDEGFSFNPLKIEVFVQTLLHLAAKSFSHSFSALAKFHEVFKTLAESDEGKLHVLRVMFEVWRNHPQMIAVLVDKMIRTQIVDCAAVANWIFSSELSRDFTRLFVWEILHSTIRKMNKHVLKIQKELEEAKEKLARQHKRRSDDDDRSSDRKDGVLEEQIERLQEKVESAQSEQKNLFLVIFQRFIMILTEHLVRCETDGTSVLTPWYKNCIERLQQIFLQHHQIIQQYMVTLENLLFTAELDPHILAVFQQFCALQA

SEQ ID NO: 878011 - protein, 590 aa, Homo sapiens
MYLRRRQKTHVPMLQVWTADKPHPQEEYLDCLWAQIQKLKKDRWQERHILRPYLAFDSILCEALQHNLPPFTPPPHTEDSVYPMPRVIFRMFDYTDDPEGPVMPGSHSVERFVIEENLHCIIKSHWKERKTCAAQLVSYPGKNKIPLNYHIVEVIFAELFQLPAPPHIDVMYTTLLIELCKLQPGSLPQVLAQATEMLYMRLDTMNTTCVDRFINWFSHHLSNFQFRWSWEDWSDCLSQDPESPKPKFVREVLEKCMRLSYHQRILDIVPPTFSALCPANPTCIYKYGDESSNSLPGHSVALCLAVAFKSKATNDEIFSILKDVPNPNQDDDDDEGFSFNPLKIEVFVQTLLHLAAKSFSHSFSALAKFHEVFKTLAESDEGKLHVLRVMFEVWRNHPQMIAVLVDKMIRTQIVDCAAVANWIFSSELSRDFTRLFVWEILHSTIRKMNKHVLKIQKELEEAKEKLARQHKRRSDDDDRSSDRKDGVLEEQIERLQEKVESAQSEQKNLFLVIFQRFIMILTEHLVRCETDGTSVLTPWYKNCIERLQQIFLQHHQIIQQYMVTLENLLFTAELDPHILAVFQQFCALQA

SEQ ID NO: 878012 - protein, 790 aa, Homo sapiens; identical to SEQ ID NO: 878007

SEQ ID NO: 878013 - protein, 790 aa, Homo sapiens; identical to SEQ ID NO: 878007

SEQ ID NO: 878014 - protein, 788 aa, Homo sapiens [sequence omitted]

SEQ ID NO: 878015 - protein, 790 aa, Homo sapiens; identical to SEQ ID NO: 878007

SEQ ID NO: 878016 - protein, 790 aa, Homo sapiens; identical to SEQ ID NO: 878007

SEQ ID NO: 878017 - protein, 759 aa, Homo sapiens
MSRRRHSDENDGGQPHKRRKTSDANETEDHLESLICKVGEKSACSLESNLEGLAGVLEADLPNYKSKILRLLCTVARLLPEKLTIYTTLVGLLNARNYNFGGEFVEAMIRQLKESLKANNYNEAVYLVRFLSDLVNCHVIAAPSMVAMFENFVSVTQEEDVPQVRRDWYVYAFLSSLPWVGKELYEKKDAEMDRIFANTESYLKRRQKTHVPMLQVWTADKPHPQEEYLDCLWAQIQKLKKDRWQERHILRPYLAFDSILCEALQHNLPPFTPPPHTEDSVYPMPRVIFRMFDYTDDPEGPVMPGSHSVERFVIEENLHCIIKSHWKERKTCAAQLVSYPGKNKIPLNYHIVEVIFAELFQLPAPPHIDVMYTTLLIELCKLQPGSLPQVLAQATEMLYMRLDTMNTTCVDRFINWFSHHLSNFQFRWSWEDWSDCLSQDPESPKPKFVREVLEKCMRLSYHQRILDIVPPTFSALCPANPTCIYKYGDESSNSLPGHSVALCLAVAFKSKATNDEIFSILKDVPNPNQDDDDDEGFSFNPLKIEVFVQTLLHLAAKSFSHSFSALAKFHEVFKTLAESDEGKLHVLRVMFEVWRNHPQMIAVLVDKMIRTQIVDCAAVANWIFSSELSRDFTRLFVWEILHSTIRKMNKHVLKIQKELEEAKEKLARQHKRRSDDDDRSSDRKDGVLEEQIERLQEKVESAQSEQKNLFLVIFQVSWLGTFIHKRKQYISLVLVFKNVIFHCKRNTHSFIEEIKNTKI

SEQ ID NO: 878018 - protein, 790 aa, Homo sapiens; identical to SEQ ID NO: 878007

SEQ ID NO: 878019 - protein, 790 aa, Homo sapiens; identical to SEQ ID NO: 878007

SEQ ID NO: 878020 - protein, 759 aa, Homo sapiens; identical to SEQ ID NO: 878017

SEQ ID NO: 878021 - protein, 91 aa, Homo sapiens
GPSKRFYATMPAYDLPPIRMPCFASQASTSPQAQLIHEVLTDSSPHPQEELALSSSAPIPCLVETLNLAAVQGQESLAVEDAGFWKGTKKS

SEQ ID NO: 878022 - protein, 194 aa, Homo sapiens
MDMFPLTWVFLALYFSRHQVRGQPDPPCGGRLNSKDAGYITSPGYPQDYPSHQNCEWIVYAPEPNQKIVLNFNPHFEIEKHDCNLCLLGKFHSQAAALPDSVQSKAIISGELPLTPPSSHLQKCKSWAPTGCLGACIEAVGRNQRPLWYCWTPAAKGQKGETTGRLGKQREATLFPVEWRMLGCCCSGRQRPFA

SEQ ID NO: 878023 - protein, 926 aa, Homo sapiens
MDMFPLTWVFLALYFSRHQVRGQPDPPCGGRLNSKDAGYITSPGYPQDYPSHQNCEWIVYAPEPNQKIVLNFNPHFEIEKHDCKYDFIEIRDGDSESADLLGKHCGNIAPPTIISSGSMLYIKFTSDYARQGAGFSLRYEIFKTGSEDCSKNFTSPNGTIESPGFPEKYPHNLDCTFTILAKPKMEIILQFLIFDLEHDPLQVGEGDCKYDWLDIWDGIPHVGPLIGKYCGTKTPSELRSSTGILSLTFHTDMAVAKDGFSARYYLVHQEPLENFQCNVPLGMESGRIANEQISASSTYSDGRWTPQQSRLHGDDNGWTPNLDSNKEYLQVDLRFLTMLTAIATQGAISRETQNGYYVKSYKLEVSTNGEDWMVYRHGKNHKVFQANNDATEVVLNKLHAPLLTRFVRIRPQTWHSGIALRLELFGCRVTDAPCSNMLGMLSGLIADSQISASSTQEYLWSPSAARLVSSRSGWFPRIPQAQPGEEWLQVDLGTPKTVKGVIIQGARGGDSITAVEARAFVRKFKVSYSLNGKDWEYIQDPRTQQPKLFEGNMHYDTPDIRRFDPIPAQYVRVYPERWSPAGIGMRLEVLGCDWTDSKPTVETLGPTVKSEETTTPYPTEEEATECGENCSFEDDKDLQLPSGFNCNFDFLEEPCGWMYDHAKWLRTTWASSSSPNDRTFPDDRNFLRLQSDSQREGQYARLISPPVHLPRSPVCMEFQYQATGGRGVALQVVREASQESKLLWVIREDQGGEWKHGRIILPSYDMEYQIVFEGVIGKGRSGEIAIDDIRISTDVPLENCMEPISAFAVDIPEIHEREGYEDEIDDEYEVDWSNSSSATSGSGAPSTDKEKSWLYTLDPILITIIAMSSLGVLLGATCAGLLLYCTCSYSGLSSRSCTTLENYNFELYDGLKHKVKMNHQKCCSEA

SEQ ID NO: 878024 - protein, 926 aa, Homo sapiens; identical to SEQ ID NO: 878023

SEQ ID NO: 878025 - protein, 909 aa, Homo sapiens
MDMFPLTWVFLALYFSRHQVRGQPDPPCGGRLNSKDAGYITSPGYPQDYPSHQNCEWIVYAPEPNQKIVLNFNPHFEIEKHDCKYDFIEIRDGDSESADLLGKHCGNIAPPTIISSGSMLYIKFTSDYARQGAGFSLRYEIFKTGSEDCSKNFTSPNGTIESPGFPEKYPHNLDCTFTILAKPKMEIILQFLIFDLEHDPLQVGEGDCKYDWLDIWDGIPHVGPLIGKYCGTKTPSELRSSTGILSLTFHTDMAVAKDGFSARYYLVHQEPLENFQCNVPLGMESGRIANEQISASSTYSDGRWTPQQSRLHGDDNGWTPNLDSNKEYLQVDLRFLTMLTAIATQGAISRETQNGYYVKSYKLEVSTNGEDWMVYRHGKNHKVFQANNDATEVVLNKLHAPLLTRFVRIRPQTWHSGIALRLELFGCRVTDAPCSNMLGMLSGLIADSQISASSTQEYLWSPSAARLVSSRSGWFPRIPQAQPGEEWLQVDLGTPKTVKGVIIQGARGGDSITAVEARAFVRKFKVSYSLNGKDWEYIQDPRTQQPKLFEGNMHYDTPDIRRFDPIPAQYVRVYPERWSPAGIGMRLEVLGCDWTDSKPTVETLGPTVKSEETTTPYPTEEEATECGENCSFEDDKDLQLPSGFNCNFDFLEEPCGWMYDHAKWLRTTWASSSSPNDRTFPDDRNFLRLQSDSQREGQYARLISPPVHLPRSPVCMEFQYQATGGRGVALQVVREASQESKLLWVIREDQGGEWKHGRIILPSYDMEYQIVFEGVIGKGRSGEIAIDDIRISTDVPLENCMEPISAFADEYEVDWSNSSSATSGSGAPSTDKEKSWLYTLDPILITIIAMSSLGVLLGATCAGLLLYCTCSYSGLSSRSCTTLENYNFELYDGLKHKVKMNHQKCCSEA

SEQ ID NO: 878026 - protein, 817 aa, Homo sapiens
MDMFPLTWVFLALYFSRHQVRGQPDPPCGGRLNSKDAGYITSPGYPQDYPSHQNCEWIVYAPEPNQKIVLNFNPHFEIEKHDCKYDFIEIRDGDSESADLLGKHCGNIAPPTIISSGSMLYIKFTSDYARQGAGFSLRYEIFKTGSEDCSKNFTSPNGTIESPGFPEKYPHNLDCTFTILAKPKMEIILQFLIFDLEHDPLQVGEGDCKYDWLDIWDGIPHVGPLIGKYCGTKTPSELRSSTGILSLTFHTDMAVAKDGFSARYYLVHQEPLENFQCNVPLGMESGRIANEQISASSTYSDGRWTPQQSRLHGDDNGWTPNLDSNKEYLQVDLRFLTMLTAIATQGAISRETQNGYYVKSYKLEVSTNGEDWMVYRHGKNHKVFQANNDATEVVLNKLHAPLLTRFVRIRPQTWHSGIALRLELFGCRVTDAPCSNMLGMLSGLIADSQISASSTQEYLWSPSAARLVSSRSGWFPRIPQAQPGEEWLQVDLGTPKTVKGVIIQGARGGDSITAVEARAFVRKFKVSYSLNGKDWEYIQDPRTQQPKLFEGNMHYDTPDIRRFDPIPAQYVRVYPERWSPAGIGMRLEVLGCDWTDSKPTVETLGPTVKSEETTTPYPTEEEATECGENCSFEDDKDLQLPSGFNCNFDFLEEPCGWMYDHAKWLRTTWASSSSPNDRTFPDDRNFLRLQSDSQREGQYARLISPPVHLPRSPVCMEFQYQATGGRGVALQVVREASQESKLLWVIREDQGGEWKHGRIILPSYDMEYQHHRHELTGRPPGGHLCRPPALLHLFLLGPELPKLHHTGELQLRALRWP

SEQ ID NO: 878027 - protein, 269 aa, Homo sapiens [sequence omitted]

SEQ ID NO: 878028 - protein, 256 aa, Homo sapiens
MENLCLGLFLPDDRNFLRLQSDSQREGQYARLISPPVHLPRSPVCMEFQYQATGGRGVALQVVREASQESKLLWVIREDQGGEWKHGRIILPSYDMEYQIVFEGVIGKGRSGEIAIDDIRISTDVPLENCMEPISAFAVDIPEIHEREGYEDEIDDEYEVDWSNSSSATSGSGAPSTDKEKSWLYTLDPILITIIAMSSLGVLLGATCAGLLLYCTCSYSGLSSRSCTTLENYNFELYDGLKHKVKMNHQKCCSEA

SEQ ID NO: 878029 - protein, 555 aa, Homo sapiens
MDMFPLTWVFLALYFSRHQVRGQPDPPCGGRLNSKDAGYITSPGYPQDYPSHQNCEWIVYAPEPNQKIVLNFNPHFEIEKHDCKYDFIEIRDGDSESADLLGKHCGNIAPPTIISSGSMLYIKFTSDYARQGAGFSLRYEIFKTGSEDCSKNFTSPNGTIESPGFPEKYPHNLDCTFTILAKPKMEIILQFLIFDLEHDPLQVGEGDCKYDWLDIWDGIPHVGPLIGKYCGTKTPSELRSSTGILSLTFHTDMAVAKDGFSARYYLVHQEPLENFQCNVPLGMESGRIANEQISASSTYSDGRWTPQQSRLHGDDNGWTPNLDSNKEYLQVDLRFLTMLTAIATQGAISRETQNGYYVKSYKLEVSTNGEDWMVYRHGKNHKVFQANNDATEVVLNKLHAPLLTRFVRIRPQTWHSGIALRLELFGCRVTDAPCSNMLGMLSGLIADSQISASSTQEYLWSPSAARLVSSRSGWFPRIPQAQPGEEWLQVDLGTPKTVKGVIIQGARGGDSITAVEARAFVRKFKVSYSLNGKDWEYIQDPRTQQPKVGCSWRPL

SEQ ID NO: 878030 - protein, 173 aa, Homo sapiens
GSRRGGRDRERGTSLQPAPSTSSAAQTLGEVEVRAGASELGEGLAHSQAIPAATAAAPAAATAAAASFLRLPSRGWPSGCSRWGRLPPGEPGEDKSRAAAFHSGCPAAAASARVSVKGAAGCVSVYASEITQLPGGRVMPKASLGFNYYYYHYCYAWLSGNTRDICRIKEMTL

SEQ ID NO: 878031 - protein, 117 aa, Homo sapiens [sequence omitted]

SEQ ID NO: 878032 - protein, 119 aa, Homo sapiens [sequence omitted]

SEQ ID NO: 878033 - protein, 926 aa, Homo sapiens; identical to SEQ ID NO: 878023

SEQ ID NO: 878034 - protein, 774 aa, Homo sapiens
MGTVNPQTSWANTVGTSPRPPSSPRAPCSTSSSPPTTPGRGQASLCATRSSRQALKIAQKTSQAPTGPSNLLGFLRSIHTTWTSELRSSTGILSLTFHTDMAVAKDGFSARYYLVHQEPLENFQCNVPLGMESGRIANEQISASSTYSDGRWTPQQSRLHGDDNGWTPNLDSNKEYLQVDLRFLTMLTAIATQGAISRETQNGYYVKSYKLEVSTNGEDWMVYRHGKNHKVFQANNDATEVVLNKLHAPLLTRFVRIRPQTWHSGIALRLELFGCRVTDAPCSNMLGMLSGLIADSQISASSTQEYLWSPSAARLVSSRSGWFPRIPQAQPGEEWLQVDLGTPKTVKGVIIQGARGGDSITAVEARAFVRKFKVSYSLNGKDWEYIQDPRTQQPKLFEGNMHYDTPDIRRFDPIPAQYVRVYPERWSPAGIGMRLEVLGCDWTDSKPTVETLGPTVKSEETTTPYPTEEEATECGENCSFEDDKDLQLPSGFNCNFDFLEEPCGWMYDHAKWLRTTWASSSSPNDRTFPDDRNFLRLQSDSQREGQYARLISPPVHLPRSPVCMEFQYQATGGRGVALQVVREASQESKLLWVIREDQGGEWKHGRIILPSYDMEYQIVFEGVIGKGRSGEIAIDDIRISTDVPLENCMEPISAFAVDIPEIHEREGYEDEIDDEYEVDWSNSSSATSGSGAPSTDKEKSWLYTLDPILITIIAMSSLGVLLGATCAGLLLYCTCSYSGLSSRSCTTLENYNFELYDGLKHKVKMNHQKCCSEA

SEQ ID NO: 878035 - protein, 654 aa, Homo sapiens
MAQIANEQISASSTSHQSRKISASSTYSDGRWTPQQSRLHGDDNGWTPNLDSNKEYLQVDLRFLTMLTAIATQGAISRETQNGYYVKSYKLEVSTNGEDWMVYRHGKNHKVFQANNDATEVVLNKLHAPLLTRFVRIRPQTWHSGIALRLELFGCRVTDAPCSNMLGMLSGLIADSQISASSTQEYLWSPSAARLVSSRSGWFPRIPQAQPGEEWLQVDLGTPKTVKGVIIQGARGGDSITAVEARAFVRKFKVSYSLNGKDWEYIQDPRTQQPKLFEGNMHYDTPDIRRFDPIPAQYVRVYPERWSPAGIGMRLEVLGCDWTDSKPTVETLGPTVKSEETTTPYPTEEEATECGENCSFEDDKDLQLPSGFNCNFDFLEEPCGWMYDHAKWLRTTWASSSSPNDRTFPDDRNFLRLQSDSQREGQYARLISPPVHLPRSPVCMEFQYQATGGRGVALQVVREASQESKLLWVIREDQGGEWKHGRIILPSYDMEYQIVFEGVIGKGRSGEIAIDDIRISTDVPLENCMEPISAFAVDIPEIHEREGYEDEIDDEYEVDWSNSSSATSGSGAPSTDKEKSWLYTLDPILITIIAMSSLGVLLGATCAGLLLYCTCSYSGLSSRSCTTLENYNFELYDGLKHKVKMNHQKCCSEA

SEQ ID NO: 878036 - protein, 901 aa, Homo sapiens
MDMFPLTWVFLALYFSRHQVRGQPDPPCGGRLNSKDAGYITSPGYPQDYPSHQNCEWIVYAPEPNQKIVLNFNPHFEIEKHDCKYDFIEIRDGDSESADLLGKHCGNIAPPTIISSGSMLYIKFTSDYARQGAGFSLRYEIFKTGSEDCSKNFTSPNGTIESPGFPEKYPHNLDCTFTILAKPKMEIILQFLIFDLEHDPLQVGEGDCKYDWLDIWDGIPHVGPLIGKYCGTKTPSELRSSTGILSLTFHTDMAVAKDGFSARYYLVHQEPLENFQCNVPLGMESGRIANEQISASSTYSDGRWTPQQSRLHGDDNGWTPNLDSNKEYLQVDLRFLTMLTAIATQGAISRETQNGYYVKSYKLEVSTNGEDWMVYRHGKNHKVFQANNDATEVVLNKLHAPLLTRFVRIRPQTWHSGIALRLELFGCRVTDAPCSNMLGMLSGLIADSQISASSTQEYLWSPSAARLVSSRSGWFPRIPQAQPGEEWLQVDLGTPKTVKGVIIQGARGGDSITAVEARAFVRKFKVSYSLNGKDWEYIQDPRTQQPKLFEGNMHYDTPDIRRFDPIPAQYVRVYPERWSPAGIGMRLEVLGCDWTDSKPTVETLGPTVKSEETTTPYPTEEEATECGENCSFEDDKDLQLPSGFNCNFDFLEEPCGWMYDHAKWLRTTWASSSSPNDRTFPDDRNFLRLQSDSQREGQYARLISPPVHLPRSPVCMEFQYQATGGRGVALQVVREASQESKLLWVIREDQGGEWKHGRIILPSYDMEYQIVFEGVIGKGRSGEIAIDDIRISTDVPLENCMEPISAFAGGTLLPGTEPTVDTVPMQPIPAYWYYVMAAGGAVLVLVSVALALVLHYHRFRYAAKKTDHSITYKTSHYTNGAPLAVEPTLTIKLEQDRGSHC

SEQ ID NO: 878037 - protein, 826 aa, Homo sapiens
MDMFPLTWVFLALYFSRHQVRGQPDPPCGGRLNSKDAGYITSPGYPQDYPSHQNCEWIVYAPEPNQKIVLNFNPHFEIEKHDCKYDFIEIRDGDSESADLLGKHCGNIAPPTIISSGSMLYIKFTSDYARQGAGFSLRYEIFKTGSEDCSKNFTSPNGTIESPGFPEKYPHNLDCTFTILAKPKMEIILQFLIFDLEHDPLQVGEGDCKYDWLDIWDGIPHVGPLIGKYCGTKTPSELRSSTGILSLTFHTDMAVAKDGFSARYYLVHQEPLENFQCNVPLGMESGRIANEQISASSTYSDGRWTPQQSRLHGDDNGWTPNLDSNKEYLQVDLRFLTMLTAIATQGAISRETQNGYYVKSYKLEVSTNGEDWMVYRHGKNHKVFQANNDATEVVLNKLHAPLLTRFVRIRPQTWHSGIALRLELFGCRVTDAPCSNMLGMLSGLIADSQISASSTQEYLWSPSAARLVSSRSGWFPRIPQAQPGEEWLQVDLGTPKTVKGVIIQGARGGDSITAVEARAFVRKFKVSYSLNGKDWEYIQDPRTQQPKLFEGNMHYDTPDIRRFDPIPAQYVRVYPERWSPAGIGMRLEVLGCDWTDSKPTVETLGPTVKSEETTTPYPTEEEATECGENCSFEDDKDLQLPSGFNCNFDFLEEPCGWMYDHAKWLRTTWASSSSPNDRTFPDDRNFLRLQSDSQREGQYARLISPPVHLPRSPVCMEFQYQATGGRGVALQVVREASQESKLLWVIREDQGGEWKHGRIILPSYDMEYQIVFEGVIGKGRSGEIAIDDIRISTDVPLENCMEPISAFADFKGKKKFFFCMLFPSPM

SEQ ID NO: 878038 - protein, 147 aa, Homo sapiens
GSRRGGRDRERGTSLQPAPSTSSAAQTLGEVEVRAGASELGEGLAHSQAIPAATAAAPAAATAAAASFLRLPSRGWPSGCSRWGRLPPGEPGEDKSRAAAFHSGCPAAAASARVSVKGAAGCVSVYASEITQLPGGRVMPKELLSSW

SEQ ID NO: 878039 - protein, 552 aa, Homo sapiens
MTRGGPGGRPGLPQPPPLLLLLLLPLLLVTAEPPKPAGVYYATAYWMPAEKTVQVKNVMDKNGDAYGFYNNSVKTTGWGILEIRAGYGSQTLSNEIIMFVAGFLEGYLTAPHMNDHYTNLYPQLITKPSIMDKVQDFMEKQDKWTRKNIKEYKTDSFWRHTGYVMAQIDGLYVGAKKRAILEGTKPMTLFQIQFLNSVGDLLDLIPSLSPTKNGSLKVFKRWDMGHCSALIKVLPGFENILFAHSSWYTYAAMLRIYKHWDFNIIDKDTSSSRLSFSSYPGFLESLDDFYILSSGLILLQTTNSVFNKTLLKQVIPETLLSWQRVRVANMMADSGKRWADIFSKYNSGTYNNQYMVLDLKKVKLNHSLDKGTLYIVEQIPTYVEYSEQTDVLRKGYWPSYNVPFHEKIYNWSGYPLLVQKLGLDYSYDLAPRAKIFRRDQGKVTDTASMKYIMRYNNYKKDPYSRGDPCNTICCREDLNSPNPSPGGCYDTKVADIYLASQYTSYAISGPTVQGGLPVFRWDRFNKTLHQGMAEVYNFDFITMKPILKLDIK

SEQ ID NO: 878040 - protein, 300 aa, Homo sapiens [sequence omitted]

SEQ ID NO: 878041 - protein, 186 aa, Homo sapiens
MDNISFALSPFLSPSLSIPPLLPFHSKSGYWPSYNVPFHEKIYNWSGYPLLVQKLGLDYSYDLAPRAKIFRRDQGKVTDTASMKYIMRYNNYKKDPYSRGDPCNTICCREDLNSPNPSPGGCYDTKVADIYLASQYTSYAISGPTVQGGLPVFRWDRFNKTLHQGMAEVYNFDFITMKPILKLDIK

SEQ ID NO: 878042 - protein, 104 aa, Homo sapiens [sequence omitted]

SEQ ID NO: 878043 - protein, 440 aa, Homo sapiens
MNDHYTNLYPQLITKPSIMDKVQDFMEKQDKWTRKNIKEYKTDSFWRHTGYVMAQIDGLYVGAKKRAILEGTKPMTLFQIQFLNSVGDLLDLIPSLSPTKNGSLKVFKRWDMGHCSALIKVLPGFENILFAHSSWYTYAAMLRIYKHWDFNIIDKDTSSSRLSFSSYPGFLESLDDFYILSSGLILLQTTNSVFNKTLLKQVIPETLLSWQRVRVANMMADSGKRWADIFSKYNSGTYNNQYMVLDLKKVKLNHSLDKGTLYIVEQIPTYVEYSEQTDVLRKGYWPSYNVPFHEKIYNWSGYPLLVQKLGLDYSYDLAPRAKIFRRDQGKVTDTASMKYIMRYNNYKKDPYSRGDPCNTICCREDLNSPNPSPGGCYDTKVADIYLASQYTSYAISGPTVQGGLPVFRWDRFNKTLHQGMAEVYNFDFITMKPILKLDIK

SEQ ID NO: 878044 - protein, 236 aa, Homo sapiens
GSPIWSASVRVANMMADSGKRWADIFSKYNSGTYNNQYMVLDLKKVKLNHSLDKGTLYIVEQIPTYVEYSEQTDVLRKGYWPSYNVPFHEKIYNWSGYPLLVQKLGLDYSYDLAPRAKIFRRDQGKVTDTASMKYIMRYNNYKKDPYSRGDPCNTICCREDLNSPNPSPGGCYDTKVADIYLASQYTSYAISGPTVQGGLPVFRWDRFNKTLHQGMAEVYNFDFITMKPILKLDIK

SEQ ID NO: 878045 - protein, 188 aa, Homo sapiens
MTRGGPGGRPGLPQPPPLLLLLLLPLLLVTAEPPKPAGVYYATAYWMPAEKTVQVKNVMDKNGDAYGFYNNSVKTTGWGILEIRAGYGSQTLSNEIIMFVAGFLEGYLTAPHMNDHYTNLYPQLITKPSIMDKVQDFMEKQDKWTRKNIKEYKTDSFWRHTGYVMAQIDGLYVGAKKRAILEGTKVGL

SEQ ID NO: 878046 - protein, 1119 aa, Homo sapiens
MKCSLRKMWRPGEKKEPQGVVYEDVPDDTEDFKESLKVVFEGSAYGLQNFNKQKKLKTCDDMDTFFLHYAAAEGQIELMEKITRDSSLEVLHEMDDYGNTPLHCAVEKNQIESVKFLLSRGANPNLRNFNMMAPLHIAVQGMNNEVMKVLLEHRTIDVNLEGENGNTAVIIACTTNNSEALQILLNKGAKPCKSNKWGCFPIHQAAFSGSKECMEIILRFGEEHGYSRQLHINFMNNGKATPLHLAVQNGDLEMIKMCLDNGAQIDPVEKGRCTAIHFAATQGATEIVKLMISSYSGSVDIVNTTDGCHETMLHRASLFDHHELADYLISVGADINKIDSEGRSPLILATASASWNIVNLLLSKGAQVDIKDNFGRNFLHLTVQQPYGLKNLRPEFMQMQQIKELVMDEDNDGCTPLHYACRQGGPGSVNNLLGFNVSIHSKSKDKKSPLHFAASYGRINTCQRLLQDISDTRLLNEGDLHGMTPLHLAAKNGHDKVVQLLLKKGALFLSDHNGWTALHHASMGGYTQTMKVILDTNLKCTDRLDEDGNTALHFAAREGHAKAVALLLSHNADIVLNKQQASFLHLALHNKRKEVVLTIIRSKRWDECLKIFSHNSPGNKCPITEMIEYLPECMKVLLDFCMLHSTEDKSCRDYYIEYNFKYLQCPLEFTKKTPTQDVIYEPLTALNAMVQNNRIELLNHPVCKEYLLMKWLAYGFRAHMMNLGSYCLGLIPMTILVVNIKPGMAFNSTGIINETSDHSEILDTTNSYLIKTCMILVFLSSIFGYCKEAGQIFQQKRNYFMDISNVLEWIIYTTGIIFVLPLFVEIPAHLQWQCGAIAVYFYWMNFLLYLQRFENCGIFIVMLEVILKTLLRSTVVFIFLLLAFGLSFYILLNLQDPFSSPLLSIIQTFSMMLGDINYRESFLEPYLRNELAHPVLSFAQLVSFTIFVPIVLMNLLIGLAVGDIAEVQKHASLKRIAMQVELHTSLEKKLPLWFLRKVDQKSTIVYPNKPRSGGMLFHIFCFLFCTGEIRQEIPNADKSLEMEILKQKYRLKDLTFLLEKQHELIKLIIQKMEIISETEDDDSHCSFQDRFKKEQMEQRNSRWNTVLRAVKAKTHHLEP

SEQ ID NO: 878047 - protein, 597 aa, Homo sapiens
MGGYTQTMKVILDTNLKCTDRLDEDGNTALHFAAREGHAKAVALLLSHNADIVLNKQQASFLHLALHNKRKEVVLTIIRSKRWDECLKIFSHNSPGNKCPITEMIEYLPECMKVLLDFCMLHSTEDKSCRDYYIEYNFKYLQCPLEFTKKTPTQDVIYEPLTALNAMVQNNRIELLNHPVCKEYLLMKWLAYGFRAHMMNLGSYCLGLIPMTILVVNIKPGMAFNSTGIINETSDHSEILDTTNSYLIKTCMILVFLSSIFGYCKEAGQIFQQKRNYFMDISNVLEWIIYTTGIIFVLPLFVEIPAHLQWQCGAIAVYFYWMNFLLYLQRFENCGIFIVMLEVILKTLLRSTVVFIFLLLAFGLSFYILLNLQDPFSSPLLSIIQTFSMMLGDINYRESFLEPYLRNELAHPVLSFAQLVSFTIFVPIVLMNLLIGLAVGDIAEVQKHASLKRIAMQVELHTSLEKKLPLWFLRKVDQKSTIVYPNKPRSGGMLFHIFCFLFCTGEIRQEIPNADKSLEMEILKQKYRLKDLTFLLEKQHELIKLIIQKMEIISETEDDDSHCSFQDRFKKEQMEQRNSRWNTVLRAVKAKTHHLEP

SEQ ID NO: 878048 - protein, 426 aa, Homo sapiens
LYRIIRVSGKYNINNIFRLAYGFRAHMMNLGSYCLGLIPMTILVVNIKPGMAFNSTGIINETSDHSEILDTTNSYLIKTCMILVFLSSIFGYCKEAGQIFQQKRNYFMDISNVLEWIIYTTGIIFVLPLFVEIPAHLQWQCGAIAVYFYWMNFLLYLQRFENCGIFIVMLEVILKTLLRSTVVFIFLLLAFGLSFYILLNLQDPFSSPLLSIIQTFSMMLGDINYRESFLEPYLRNELAHPVLSFAQLVSFTIFVPIVLMNLLIGLAVGDIAEVQKHASLKRIAMQVELHTSLEKKLPLWFLRKVDQKSTIVYPNKPRSGGMLFHIFCFLFCTGEIRQEIPNADKSLEMEILKQKYRLKDLTFLLEKQHELIKLIIQKMEIISETEDDDSHCSFQDRFKKEQMEQRNSRWNTVLRAVKAKTHHLEP

SEQ ID NO: 878049 - protein, 721 aa, Homo sapiens
MQQIKELVMDEDNDGCTPLHYACRQGGPGSVNNLLGFNVSIHSKSKDKKSPLHFAASYGRINTCQRLLQDISDTRLLNEGDLHGMTPLHLAAKNGHDKVVQLLLKKGALFLSDHNGWTALHHASMGGYTQTMKVILDTNLKCTDRLDEDGNTALHFAAREGHAKAVALLLSHNADIVLNKQQASFLHLALHNKRKEVVLTIIRSKRWDECLKIFSHNSPGNKCPITEMIEYLPECMKVLLDFCMLHSTEDKSCRDYYIEYNFKYLQCPLEFTKKTPTQDVIYEPLTALNAMVQNNRIELLNHPVCKEYLLMKWLAYGFRAHMMNLGSYCLGLIPMTILVVNIKPGMAFNSTGIINETSDHSEILDTTNSYLIKTCMILVFLSSIFGYCKEAGQIFQQKRNYFMDISNVLEWIIYTTGIIFVLPLFVEIPAHLQWQCGAIAVYFYWMNFLLYLQRFENCGIFIVMLEVILKTLLRSTVVFIFLLLAFGLSFYILLNLQDPFSSPLLSIIQTFSMMLGDINYRESFLEPYLRNELAHPVLSFAQLVSFTIFVPIVLMNLLIGLAVGDIAEVQKHASLKRIAMQVELHTSLEKKLPLWFLRKVDQKSTIVYPNKPRSGGMLFHIFCFLFCTGEIRQEIPNADKSLEMEILKQKYRLKDLTFLLEKQHELIKLIIQKMEIISETEDDDSHCSFQDRFKKEQMEQRNSRWNTVLRAVKAKTHHLEP

SEQ ID NO: 878050 - protein, 142 aa, Homo sapiens [sequence omitted]

SEQ ID NO: 878051 - protein, 810 aa, Homo sapiens
RERALGGGHCEAAACGSAGSRAPGARASAMAHRPKRTFRQRAADSSDSDGAEESPAEPGAPRELPVPGSAEEEPPSGGGRAQVAGLPHRVRGPRGRGRVWASSRRATKAAPRADEGSESRTLDVSTDEEDKIHHSSESKDDQGLSSDSSSSLGEKELSSTVKIPDAAFIQAARRKRELARAQDDYISLDVQHTSSISGMKRESEDDPESEPDDHEKRIPFTLRPQTLRQRMAEESISRNEETSEESQEDEKQDTWEQQQMRKAVKIIEERDIDLSCGSGSSKVKKFDTSISFPPVNLEIIKKQLNTRLTLLQETHRSHLREYEKYVQDVKSSKSTIQNLESSSNQALNCKFYKSMKIYVENLIDCLNEKIINIQEIESSMHALLLKQAMTFMKRRQDELKHESTYLQQLSRKDETSTSGNFSVDEKTQWILEEIESRRTKRRQARVLSGNCNHQEGTSSDDELPSAEMIDFQKSQGDILQKQKKVFEEVQDDFCNIQNILLKFQQWREKFPDSYYEAFISLCIPKLLNPLIRVQLIDWNPLKLESTGLKEMPWFKSVEEFMDSSVEDSKKESSSDKKVLSAIINKTIIPRLTDFVEFLWDPLSTSQTTSLITHCRVILEEHSTCENEVSKSRQDLLKSIVSRMKKAVEDDVFIPLYPKSAVENKTSPHSKFQERQFWSGLKLFRNILLWNGLLTDDTLQELGLGKLLNRYLIIALLNATPGPDVVKKCNQVAACLPEKWFENSAMRTSIPQLENFIQFLLQSAHKLSRSEFRDEVEEIILILVKIKALNQAESFIGEHHLDHLKSLIKED

SEQ ID NO: 878052 - protein, 772 aa, Homo sapiens
RERALGGGHCEAAACGSAGSRAPGARASAMAHRPKRTFRQRAADSSDSDGAEESPAEPGAPRELPVPGSAEEEPPSGGGRAQVAGLPHRVRGPRGRGRVWASSRRATKAAPRADEGSESRTLDVSTDEEDKIHHSSESKDDQGLSSDSSSSLGEKELSSTVKIPDAAFIQAARRKRELARAQDDYISLDVQHTSSISVSRNEETSEESQEDEKQDTWEQQQMRKAVKIIEERDIDLSCGSGSSKVKKFDTSISFPPVNLEIIKKQLNTRLTLLQETHRSHLREYEKYVQDVKSSKSTIQNLESSSNQALNCKFYKSMKIYVENLIDCLNEKIINIQEIESSMHALLLKQAMTFMKRRQDELKHESTYLQQLSRKDETSTSGNFSVDEKTQWILEEIESRRTKRRQARVLSGNCNHQEGTSSDDELPSAEMIDFQKSQGDILQKQKKVFEEVQDDFCNIQNILLKFQQWREKFPDSYYEAFISLCIPKLLNPLIRVQLIDWNPLKLESTGLKEMPWFKSVEEFMDSSVEDSKKESSSDKKVLSAIINKTIIPRLTDFVEFLWDPLSTSQTTSLITHCRVILEEHSTCENEVSKSRQDLLKSIVSRMKKAVEDDVFIPLYPKSAVENKTSPHSKFQERQFWSGLKLFRNILLWNGLLTDDTLQELGLGKLLNRYLIIALLNATPGPDVVKKCNQVAACLPEKWFENSAMRTSIPQLENFIQFLLQSAHKLSRSEFRDEVEEIILILVKIKALNQAESFIGEHHLDHLKSLIKED

SEQ ID NO: 878053 - protein, 735 aa, Homo sapiens
RERALGGGHCEAAACGSAGSRAPGARASAMAHRPKRTFRQRAADSSDSDGAEESPAEPGAPRELPVPGSAEEEPPSGGGRAQVAGLPHRVRGPRGRGRVWASSRRATKAAPRADEGSESRTLDVSTDEEDKIHHSSESKDDQGLSSDSSSSLGEKELSSTVSRNEETSEESQEDEKQDTWEQQQMRKAVKIIEERDIDLSCGSGSSKVKKFDTSISFPPVNLEIIKKQLNTRLTLLQETHRSHLREYEKYVQDVKSSKSTIQNLESSSNQALNCKFYKSMKIYVENLIDCLNEKIINIQEIESSMHALLLKQAMTFMKRRQDELKHESTYLQQLSRKDETSTSGNFSVDEKTQWILEEIESRRTKRRQARVLSGNCNHQEGTSSDDELPSAEMIDFQKSQGDILQKQKKVFEEVQDDFCNIQNILLKFQQWREKFPDSYYEAFISLCIPKLLNPLIRVQLIDWNPLKLESTGLKEMPWFKSVEEFMDSSVEDSKKESSSDKKVLSAIINKTIIPRLTDFVEFLWDPLSTSQTTSLITHCRVILEEHSTCENEVSKSRQDLLKSIVSRMKKAVEDDVFIPLYPKSAVENKTSPHSKFQERQFWSGLKLFRNILLWNGLLTDDTLQELGLGKLLNRYLIIALLNATPGPDVVKKCNQVAACLPEKWFENSAMRTSIPQLENFIQFLLQSAHKLSRSEFRDEVEEIILILVKIKALNQAESFIGEHHLDHLKSLIKED

SEQ ID NO: 878054 - protein, 594 aa, Homo sapiens
RERALGGGHCEAAACGSAGSRAPGARASAMAHRPKRTFRQRAADSSDSDGAEESPAEPGAPRELPVPGSAEEEPPSGGGRAQVAGLPHRVRGPRGRGRVWASSRRATKAAPRADEGSESRTLDVSTDEEDKIHHSSESKDDQGLSSDSSSSLGEKELSSTVKIPDAAFIQAARRKRELARAQDDYISLDVQHTSSISGMKRESEDDPESEPDDHEKRIPFTLRPQTLRQRMAEESISRNEETSEESQEDEKQDTWEQQQMRKAVKIIEERDIDLSCGSGSSKVKKFDTSISFPPVNLEIIKKQLNTRLTLLQETHRSHLREYEKYVQDVKSSKSTIQNLESSSNQALNCKFYKSMKIYVENLIDCLNEKIINIQEIESSMHALLLKQAMTFMKRRQDELKHESTYLQQLSRKDETSTSGNFSVDEKTQWILEEIESRRTKRRQARVLSGNCNHQEGTSSDDELPSAEMIDFQKSQGDILQKQKKVFEEVQDDFCNIQNILLKFQQWREKFPDSYYEAFISLCIPKLLNPLIRVQLIDWNPLKLESTGLKEMPWFKSVEEFMDSSVKIQRRKVVQIKKSCLQSSTKQLFPDLQTL

SEQ ID NO: 878055 - protein, 678 aa, Homo sapiens
RERALGGGHCEAAACGSAGSRAPGARASAMAHRPKRTFRQRAADSSDSDGAEESPAEPGAPRELPVPGSAEEEPPSGGGRAQVAGLPHRVRGPRGRGRVWASSRRATKAAPRADEGSESRTLDVSTDEEDKIHHSSESKDDQGLSSDSSSSLGEKELSSTVKIPDAAFIQAARRKRELARAQDDYISLDVQHTSSISGMKRESEDDPESEPDDHEKRIPFTLRPQTLRQRMAEESISRNEETSEESQEDEKQDTWEQQQMRKAVKIIEERDIDLSCGSGSSKVKKFDTSISFPPVNLEIIKKQLNTRLTLLQETHRSHLREYEKYVQDVKSSKSTIQNLESSSNQALNCKFYKSMKIYVENLIDCLNEKIINIQEIESSMHALLLKQAMTFMKRRQDELKHESTYLQQLSRKDETSTSGNFSVDEKTQWILEEIESRRTKRRQARVLSGNCNHQEGTSSDDELPSAEMIDFQKSQGDILQKQKKVFEEVQDDFCNIQNILLKFQQWREKFPDSYYEAFISLCIPKLLNPLIRVQLIDWNPLKLESTGLKEMPWFKSVEEFMDSSVEDSKKESSSDKKVLSAIINKTIIPRLTDFVEFLWDPLSTSQTTSLITHCRVILEEHSTCENEVSKSRQDLLKSIVSRMKKAVEDDVFIPLYPKSSSAIFFFGMDSLQMTPCKN

SEQ ID NO: 878056 - protein, 772 aa, Homo sapiens
RERALGGGHCEAAACGSAGSRAPGARASAMAHRPKRTFRQRAADSSDSDGAEESPAEPGAPRELPVPGSAEEEPPSGGGRAQVAGLPHRVRGPRGRGRVWASSRRATKAAPRADEGSESRTLDVSTDEEDKIHHSSESKDDQGLSSDSSSSLGEKELSSTVKIPDAAFIQAARRKRELARAQDDYISLDVQHTSSISGMKRESEDDPESEPDDHEKRIPFTLRPQTLRQRMAEESISRNEETSEESQEDEKQDTWEQQQMRKAVKIIEERDIDLSCGSGSSKVKKFDTSISFPPVNLEIIKKQLNTRLTLLQETHRSHLREYEKYVQDVKSSKSTIQNLESSSNQALNCKFYKSMKIYVENLIDCLNEKIINIQEIESSMHALLLKQAMTFMKRRQDELKHESTYLQQLSRKDETSTSGNFSVDEKTQWILEEIESRRTKRRQARVLSGNCNHQEGTSSDDELPSAEMIDFQKSQGDILQKQKKVFEEVQDDFCNIQNILLKFQQWREKFPDSYYEAFISLCIPKLLNPLIRVQLIDWNPLKLESTGLKEMPWFKSVEEFMDSSVEDSKKESSSDKKVLSAIINKTIIPRLTDFVEFLWDPLSTSQTTSLITHCRVILEEHSTCENEVSKSRQDLLKSIVSRMKKAVEDDVFIPLYPKSAVENKTSPHSKFQERQFWSGLKLFRNILLWNGLLTDDTLQELGLGKLLNRYLIIALLNATPGPDVVKKCNQVAACLPEKWFENSAMRTSIPQLENFIQFLLQSAHKLSRSEFR

SEQ ID NO: 878057 - protein, 343 aa, Homo sapiens
MIDFQKSQGDILQKQKKVFEEVQDDFCNIQNILLKFQQWREKFPDSYYEAFISLCIPKLLNPLIRVQLIDWNPLKLESTGLKEMPWFKSVEEFMDSSVEDSKKESSSDKKVLSAIINKTIIPRLTDFVEFLWDPLSTSQTTSLITHCRVILEEHSTCENEVSKSRQDLLKSIVSRMKKAVEDDVFIPLYPKSAVENKTSPHSKFQERQFWSGLKLFRNILLWNGLLTDDTLQELGLGKLLNRYLIIALLNATPGPDVVKKCNQVAACLPEKWFENSAMRTSIPQLENFIQFLLQSAHKLSRSEFRDEVEEIILILVKIKALNQAESFIGEHHLDHLKSLIKED

SEQ ID NO: 878058 - protein, 381 aa, Homo sapiens
RERALGGGHCEAAACGSAGSRAPGARASAMAHRPKRTFRQRAADSSDSDGAEESPAEPGAPRELPVPGSAEEEPPSGGGRAQVAGLPHRVRGPRGRGRVWASSRRATKAAPRADEGSESRTLDVSTDEEDKIHHSSESKDDQGLSSDSSSSLGEKELSSTVKIPDAAFIQAARRKRELARAQDDYISLDVQHTSSISGMKRESEDDPESEPDDHEKRIPFTLRPQTLRQRMAEESISRNEETSEESQEDEKQDTWEQQQMRKAVKIIEERDIDLSCGSGSSKVKKFDTSISFPPVNLEIIKKQLNTRLTLLQETHRSHLREYEKYVQDVKSSKSTIQNLESSSNQALNCKFYKSMKIYVENLIDCLNEKAKMRHPQVETSQ

SEQ ID NO: 878059 - protein, 445 aa, Homo sapiens
RERALGGGHCEAAACGSAGSRAPGARASAMAHRPKRTFRQRAADSSDSDGAEESPAEPGAPRELPVPGSAEEEPPSGGGRAQVAGLPHRVRGPRGRGRVWASSRRATKAAPRADEGSESRTLDVSTDEEDKIHHSSESKDDQGLSSDSSSSLGEKELSSTVKIPDAAFIQAARRKRELARAQDDYISLDVQHTSSISGMKRESEDDPESEPDDHEKRIPFTLRPQTLRQRMAEESISRNEETSEESQEDEKQDTWEQQQMRKAVKIIEERDIDLSCGSGSSKVKKFDTSISFPPVNLEIIKKQLNTRLTLLQETHRSHLREYEKYVQDVKSSKSTIQNLESSSNQALNCKFYKSMKIYVENLIDCLNEKIINIQEIESSMHALLLKQAMTFMKRRQDELKHESTYLQQLSRKDETSTSGNFSVDEKTQWILEEIESRRYLYKVKI

SEQ ID NO: 878060 - protein, 213 aa, Homo sapiens
RERALGGGHCEAAACGSAGSRAPGARASAMAHRPKRTFRQRAADSSDSDGAEESPAEPGAPRELPVPGSAEEEPPSGGGRAQVAGLQSRTLDVSTDEEDKIHHSSESKDDQGLSSDSSSSLGEKELSSTVKIPDAAFIQAARRKRELARAQDDYISLDVQHTSSISGMKRESEDDPESEPDDHEKRIPFTLRPQTLRQRMAEESSMDLPIYED

SEQ ID NO: 878061 - protein, 810 aa, Homo sapiens; identical to SEQ ID NO: 878051

SEQ ID NO: 878062 - protein, 820 aa, Homo sapiens
RERALGGGHCEAAACGSAGSRAPGARASAMAHRPKRTFRQRAADSSDSDGAEESPAEPGAPRELPVPGSAEEEPPSGGGRAQVAGLPHRVRGPRGRGRVWASSRRATKAAPRADEGSGVQGDAGKRGESRTLDVSTDEEDKIHHSSESKDDQGLSSDSSSSLGEKELSSTVKIPDAAFIQAARRKRELARAQDDYISLDVQHTSSISGMKRESEDDPESEPDDHEKRIPFTLRPQTLRQRMAEESISRNEETSEESQEDEKQDTWEQQQMRKAVKIIEERDIDLSCGSGSSKVKKFDTSISFPPVNLEIIKKQLNTRLTLLQETHRSHLREYEKYVQDVKSSKSTIQNLESSSNQALNCKFYKSMKIYVENLIDCLNEKIINIQEIESSMHALLLKQAMTFMKRRQDELKHESTYLQQLSRKDETSTSGNFSVDEKTQWILEEIESRRTKRRQARVLSGNCNHQEGTSSDDELPSAEMIDFQKSQGDILQKQKKVFEEVQDDFCNIQNILLKFQQWREKFPDSYYEAFISLCIPKLLNPLIRVQLIDWNPLKLESTGLKEMPWFKSVEEFMDSSVEDSKKESSSDKKVLSAIINKTIIPRLTDFVEFLWDPLSTSQTTSLITHCRVILEEHSTCENEVSKSRQDLLKSIVSRMKKAVEDDVFIPLYPKSAVENKTSPHSKFQERQFWSGLKLFRNILLWNGLLTDDTLQELGLGKLLNRYLIIALLNATPGPDVVKKCNQVAACLPEKWFENSAMRTSIPQLENFIQFLLQSAHKLSRSEFRDEVEEIILILVKIKALNQAESFIGEHHLDHLKSLIKED

SEQ ID NO: 878063 - protein, 823 aa, Homo sapiens
RERALGGGHCEAAACGSAGSRAPGARASAMAHRPKRTFRQRAADSSDSDGAEESPAEPGAPRELPVPGSAEEEPPSGGGRAQVAGLPHRVRGPRGRGRVWASSRRATKAAPRADEGSESRTLDVSTDEEDKIHHSSESKDDQGLSSDSSSSLGEKELSSTVKIPDAAFIQAARRKRELARAQDDYISLDVQHTSSISGMKRESEDDPESEPDDHEKRIPFTLRPQTLRQRMAEESISRNEETSEESQEDEKQDTWEQQQMRKAVKIIEERDIDLSCGSGSSKVKKFDTSISFPPVNLEIIKKQLNTRLTLLQETHRSHLREYEKYVQDVKSSKSTIQNLESSSNQALNCKFYKSMKIYVENLIDCLNEKIINIQEIESSMHALLLKQAMTFMKRRQDELKHESTYLQQLSRKDETSTSGNFSVDEKTQWILEEIESRRYLYKDEDLKKASLTKRRQARVLSGNCNHQEGTSSDDELPSAEMIDFQKSQGDILQKQKKVFEEVQDDFCNIQNILLKFQQWREKFPDSYYEAFISLCIPKLLNPLIRVQLIDWNPLKLESTGLKEMPWFKSVEEFMDSSVEDSKKESSSDKKVLSAIINKTIIPRLTDFVEFLWDPLSTSQTTSLITHCRVILEEHSTCENEVSKSRQDLLKSIVSRMKKAVEDDVFIPLYPKSAVENKTSPHSKFQERQFWSGLKLFRNILLWNGLLTDDTLQELGLGKLLNRYLIIALLNATPGPDVVKKCNQVAACLPEKWFENSAMRTSIPQLENFIQFLLQSAHKLSRSEFRDEVEEIILILVKIKALNQAESFIGEHHLDHLKSLIKED

SEQ ID NO: 878064 - protein, 244 aa, Homo sapiens
RERALGGGHCEAAACGSAGSRAPGARASAMAHRPKRTFRQRAADSSDSDGAEESPAEPGAPRELPVPGSAEEEPPSGGGRAQVAGLPHRVRGPRGRGRVWASSRRATKAAPRADEGSESRTLDVSTDEEDKIHHSSESKDDQGLSSDSSSSLGEKELSSTVKIPDAAFIQAARRKRELARAQDDYISLDVQHTSSISGMKRESEDDPESEPDDHEKRIPFTLRPQTLRQRMAEESSMDLPIYED

SEQ ID NO: 878065 - protein, 772 aa, Homo sapiens; identical to SEQ ID NO: 878056

SEQ ID NO: 878066 - protein, 731 aa, Homo sapiens
RERALGGGHCEAAACGSAGSRAPGARASAMAHRPKRTFRQRAADSSDSDGAEESPAEPGAPRELPVPGSAEEEPPSGGGRAQVAGLPHRVRGPRGRGRVWASSRRATKAAPRADEGSESRTLDVSTDEEDKIHHSSESKDDQGLSSDSSSSLGEKELSSTVKIPDAAFIQAARRKRELARAQDDYISLDVQHTSSISGMKRESEDDPESEPDDHEKRIPFTLRPQTLRQRMAEESISRNEETSEESQEDEKQDTWEQQQMRKAVKIIEERDIDLSCGSGSSKVKKFDTSISFPPVNLEIIKKQLNTRLTLLQETHRSHLREYEKYVQDVKSSKSTIQNLESSSNQALNCKFYKSMKIYVENLIDCLNEKIINIQEIESSMHALLLKQAMTFMKRRQDELKHESTYLQQLSRKDETSTSGNFSVDEKTQWILEEIESRRTKRRQARVLSGNCNHQEGTSSDDELPSAEMIDFQKSQGDILQKQKKVFEEVQDDFCNIQNILLKFQQWREKFPDSYYEAFISLCIPKLLNPLIRVQLIDWNPLKLESTGLKEMPWFKSVEEFMDSSVEDSKKESSSDKKVLSAIINKTIIPRLTDFVEFLWDPLSTSQTTSLITHCRVILEEHSTCENEVSKSRQDLLKSIVSRMKKAVEDDVFIPLYPKSAVENKTSPHSKFQERQFWSGLKLFRNILLWNGLLTDDTLQELGLGKLLNRYLIIALLNATPGPDVVKKCNQG

SEQ ID NO: 878067 - protein, 445 aa, Homo sapiens; identical to SEQ ID NO: 878059

SEQ ID NO: 878068 - protein, 208 aa, Homo sapiens
  misc_feature (164)..(164): Xaa can be any naturally occurring amino acid
  misc_feature (170)..(170): Xaa can be any naturally occurring amino acid
  misc_feature (176)..(177): Xaa can be any naturally occurring amino acid
  misc_feature (197)..(197): Xaa can be any naturally occurring amino acid
  misc_feature (203)..(203): Xaa can be any naturally occurring amino acid
RERALGGGHCEAAACGSAGSRAPGARASAMAHRPKRTFRQRAADSSDSDGAEESPAEPGAPRELPVPGSAEEEPPSGGGRAQVAGLPHRVRGPRGRGRVWASSRRATKAAPRADEGSESRTLDVSTDEEDKIHHSSESKDDQGLSSDSSSSLGEKELSSTDSVXSSLVSXQVTDPXXCSILIHVQPRRKTVTLGPGXPQRMHXILSFR

SEQ ID NO: 878069 - protein, 99 aa, Homo sapiens
RGRNWRTAAHFRRGGHGVRLSPRYCLPGMDPGARRGVPEELGTPKAFHRCGPVLSQLEGGSHGILLVSTTSSPFSGAGGASEVLWSVGWDQFVSVKSKL

SEQ ID NO: 878070 - protein, 99 aa, Homo sapiens; identical to SEQ ID NO: 878069

SEQ ID NO: 878071 - protein, 252 aa, Homo sapiens
EAGTGGLRRTSVEVDMACGFRRAIACQLSRVLNLPPENLITSISAVPISQKEEVADFQLSVDSLLEKDNDHSRPDIQVQAKRLAEKLRCDTVVSEISTGQRTVNFKINRELLTKTVLQQVIEDGSKYGLKSELFSGLPQKKIVVEFRETHALYAVCVDCLEGVHKIICIKCKSRWDGSWHQLGTMYTYDILAASPCCQARLNCKHCGKPVIDVRIGMQYFSEYSNVQQCPHCGNLDYHFVKPFSSFKVLEAY

SEQ ID NO: 878072 - protein, 403 aa, Homo sapiens
MQFGLLGTGFQLFGYEEKLQSNPLQHLFEVYVQVNKEAADDKSVAKAAQEFFQRLELGDVQALSLWQKFRDLSIEEYIRVYKRLGVYFDEYSGESFYREKSQEVLKLLESKGLLLKTIKGTAVVDLSGNGDPSSICTVMRSDGTSLYATRDLAAAIDRMDKYNFDTMIYVTDKGQKKHFQQVFQMLKIMGYDWAERCQHVPFGVVQGMKTRRGDVTFLEDVLNEIQLRMLQNMASIKTTKELKNPQETAERVGLAALIIQDFKGLLLSDYKFSWDRVFQSRGDTGVFLQYTHARLHSLEETFGCGYLNDFNTACLQEPQSVSILQHLLRFDEVLYKSSQDFQPRHIVSYLLTLSHLAAVAHKTLQIKDSPPEVAGARLHLFKAVRSVLANGMKLLGITPVCRM

SEQ ID NO: 878073 - protein, 593 aa, Homo sapiens
EAGTGGLRRTSVEVDMACGFRRAIACQLSRVLNLPPENLITSISAVPISQKEEVADFQLSVDSLLEKDNDHSRPDIQVQAKRLAEKLRCDTVVSEISTGQRTVNFKINRELLTKTVLQQVIEDGSKYGLKSELFSGLPQKKIVVEFSSPNVAKKFHVGHLRSTIIGNFIANLKEALGHQVIRINYLGDWGMQFGLLGTGFQLFGYEEKLQSNPLQHLFEVYVQVNKEAADDKSVAKAAQEFFQRLELGDVQALSLWQKFRDLSIEEYIRVYKRLGVYFDEYSGESFYREKSQEVLKLLESKGLLLKTIKGTAVVDLSGNGDPSSICTVMRSDGTSLYATRDLAAAIDRMDKYNFDTMIYVTDKGQKKHFQQVFQMLKIMGYDWAERCQHVPFGVVQGMKTRRGDVTFLEDVLNEIQLRMLQNMASIKTTKELKNPQETAERVGLAALIIQDFKGLLLSDYKFSWDRVFQSRGDTGVFLQYTHARLHSLEETFGCGYLNDFNTACLQEPQSVSILQHLLRFDEVLYKSSQDFQPRHIVSYLLTLSHLAAVAHKTLQIKDSPPEVAGARLHLFKAVRSVLANGMKLLGITPVCRM

SEQ ID NO: 878074 - protein, 543 aa, Homo sapiens
EAGTGGLRRTSVEVDMACGFRRAIACQLSRVLNLPPENLITSISAVPISQKEEVADFQLSVDSLLEKDNDHSRPDIQVQAKRLAEKLRCDTVVSEISTGQRTVNFKINRELLTKTVLQQVIEDGSKYGLKSELFSGLPQKKIVVEFSSPNVAKKFHVGHLRSTIIGNFIANLKEALGHQVIRINYLGDWGMQFGLLGTGFQLFGYEEKLQSNPLQHLFEVYVQVNKEAADDKSVAKAAQEFFQRLELGDVQALSLWQKFRDLSIEEYIRVYKRLGVYFDEYSGESFYREKSQEVLKLLESKGLLLKTIKGTAVVDLSGNGDPSSICTVMRSDGTSLYATRDLAAAIDRMDKYNFDTMIYVTDKGQKKHFQQVFQMLKIMGYDWAERCQHVPFGVVQGMKTRRGDVTFLEDVLNEIQLRMLQNMASIKTTKELKNPQETAERVGLAALIIQDFKGLLLSDYKFSWDRVFQSRGDTGVFLQYTHARLHSLEETFGCGYLNDFNTACLQEPQSVSILQHLLRYDVFQGSSSVLLLIKMAISIFAAQ

SEQ ID NO: 878075 - protein, 631 aa, Homo sapiens
EAGTGGLRRTSVEVDMACGFRRAIACQLSRVLNLPPENLITSISAVPISQKEEVADFQLSVDSLLEKDNDHSRPDIQVQAKRLAEKLRCDTVVSEISTGQRTVNFKINRELLTKTVLQQVIEDGSKYGLKSELFSGLPQKKIVVEFSSPNVAKKFHVGHLRSTIIGNFIANLKEALGHQVIRINYLGDWGMQFGLLGTGFQLFGYEEKLQSNPLQHLFEVYVQVNKEAADDKSVAKAAQEFFQRLELGDVQALSLWQKFRDLSIEEYIRVYKRLGVYFDEYSGESFYREKSQEVLKLLESKGLLLKTIKGTAVVDLSGNGDPSSICTVMRSDGTSLYATRDLAAAIDRMDKYNFDTMIYVTDKGQKKHFQQVFQMLKIMGYDWAERCQHVPFGVVQGMKTRRGDVTFLEDVLNEIQLRMLQNMASIKTTKELKNPQETAERVGLAALIIQDFKGLLLSDYKFSWDRVFQSRGDTGVFLQYTHARLHSLEETFGCGYLNDFNTACLQEPQSVSILQHLLRFDEVLYKSSQDFQPRHIVSYLLTLRWCLALLSRLERDLGSLQPPPAGFKRFSCLSLPSSWDYSHLAAVAHKTLQIKDSPPEVAGARLHLFKAVRSVLANGMKLLGITPVCRM

SEQ ID NO: 878076 - protein, 543 aa, Homo sapiens; identical to SEQ ID NO: 878074

SEQ ID NO: 878077 - protein, 531 aa, Homo sapiens
RGRNWRTAAHFRRGGHGVRLSPRYCLPAFQSVESSTRKLDHINICSSNFPKRTVLQQVIEDGSKYGLKSELFSGLPQKKIVVEFSSPNVAKKFHVGHLRSTIIGNFIANLKEALGHQVIRINYLGDWGMQFGLLGTGFQLFGYEEKLQSNPLQHLFEVYVQVNKEAADDKSVAKAAQEFFQRLELGDVQALSLWQKFRDLSIEEYIRVYKRLGVYFDEYSGESFYREKSQEVLKLLESKGLLLKTIKGTAVVDLSGNGDPSSICTVMRSDGTSLYATRDLAAAIDRMDKYNFDTMIYVTDKGQKKHFQQVFQMLKIMGYDWAERCQHVPFGVVQGMKTRRGDVTFLEDVLNEIQLRMLQNMASIKTTKELKNPQETAERVGLAALIIQDFKGLLLSDYKFSWDRVFQSRGDTGVFLQYTHARLHSLEETFGCGYLNDFNTACLQEPQSVSILQHLLRFDEVLYKSSQDFQPRHIVSYLLTLSHLAAVAHKTLQIKDSPPEVAGARLHLFKAVRSVLANGMKLLGITPVCRM

SEQ ID NO: 878078 - protein, 487 aa, Homo sapiens
EAGTGGLRRTSVEVDMACGFRRAIACQLSRVLNLPPENLITSISAVPISQKEEVADFQLSVDSLLEKDNDHSRPDIQVQAKRLAEKLRCDTVVSEISTGQRTVNFKINRELLTKTVLQQVIEDGSKYGLKSELFSGLPQKKIVVEFSSPNVAKKFHVGHLRSTIIGNFIANLKEALGHQVIRINYLGDWGMQFGLLGTGFQLFGYEEKLQSNPLQHLFEVYVQVNKEAADDKSVAKAAQEFFQRLELGDVQALSLWQKFRDLSIEEYIRVYKRLGVYFDEYSGESFYREKSQEVLKLLESKGLLLKTIKGTAVVDLSGNGDPSSICTVMRSDGTSLYATRDLAAAIDRMDKYNFDTMIYVTDKGQKKHFQQVFQMLKIMGYDWAERCQHVPFGVVQGMKTRRGDVTFLEDVLNEIQLRMLQNMASIKTTKELKNPQETAERVGLAALIIQDFKGLLLSDYKFSWDRVFQSRGDTGVFLQYTHARLHR

SEQ ID NO: 878079 - protein, 437 aa, Homo sapiens
EAGTGGLRRTSVEVDMACGFRRAIACQLSRVLNLPPENLITSISAVPISQKEEVADFQLSVDSLLEKDNDHSRPDIQVQAKRLAEKLRCDTVVSEISTGQRTVNFKINRELLTKTVLQQVIEDGSKYGLKSELFSGLPQKKIVVEFSSPNVAKKFHVGHLRSTIIGNFIANLKEALGHQVIRINYLGDWGMQFGLLGTGFQLFGYEEKLQSNPLQHLFEVYVQVNKEAADDKSVAKAAQEFFQRLELGDVQALSLWQKFRDLSIEEYIRVYKRLGVYFDEYSGESFYREKSQEVLKLLESKGLLLKTIKGTAVVDLSGNGDPSSICTVMRSDGTSLYATRDLAAAIDRMDKYNFDTMIYVTDKGQKKHFQQVFQMLKIMGYDWAERCQHVPFGVVQGMKTRRGDVTFLEDVLNEIQLRMLQNMASIKSEFSFFLLKS

SEQ ID NO: 878080 - protein, 265 aa, Homo sapiens
MRSDGTSLYATRDLAAAIDRMDKYNFDTMIYVTDKGQKKHFQQVFQMLKIMGYDWAERCQHVPFGVVQGMKTRRGDVTFLEDVLNEIQLRMLQNMASIKTTKELKNPQETAERVGLAALIIQDFKGLLLSDYKFSWDRVFQSRGDTGVFLQYTHARLHSLEETFGCGYLNDFNTACLQEPQSVSILQHLLRFDEVLYKSSQDFQPRHIVSYLLTLSHLAAVAHKTLQIKDSPPEVAGARLHLFKAVRSVLANGMKLLGITPVCRM

SEQ ID NO: 878081 - protein, 99 aa, Homo sapiens; identical to SEQ ID NO: 878069

SEQ ID NO: 878082 - protein, 193 aa, Homo sapiens
EAGTGGLRRTSVEVDMACGFRRAIACQLSRVLNLPPENLITSISAVPISQKEEVADFQLSVDSLLEKDNDHSRPDIQVQAKRLAEKLRCDTVVSEISTGQRTVNFKINRELLTKTVLQQVIEDGSKYGLKSELFSGLPQKKIVVEFSSPNVAKKFHVGHLRSTIIGKCLVSHKMLNVPLRKYLIVQFNVLMLK

SEQ ID NO: 878083 - protein, 593 aa, Homo sapiens; identical to SEQ ID NO: 878073

SEQ ID NO: 878084 - protein, 187 aa, Homo sapiens
RGRNWRTAAHFRRGGHGVRLSPRYCLPAFQSVESSTRKLDHINICSSNFPKRAGVQWHNLDSLQSPPPGFKRFPCLSLPSSWDCREVADFQLSVDSLLEKDNDHSRPDIQVQAKRLAEKLRCDTVVSEISTGQRTVNFKINRELLTKTVLQQVIEDGSKYGLKSELFSGLPQKKIVVEFRVARPLYK

SEQ ID NO: 878085 - protein, 593 aa, Homo sapiens; identical to SEQ ID NO: 878073

SEQ ID NO: 878086 - protein, 593 aa, Homo sapiens; identical to SEQ ID NO: 878073

SEQ ID NO: 878087 - protein, 403 aa, Homo sapiens; identical to SEQ ID NO: 878072

SEQ ID NO: 878088 - protein, 540 aa, Homo sapiens
EAGTGGLRRTSVEVDMACGFRRAIACQLSRVLNLPPENLITSISAVPISQKEEVADFQLSVDSLLEKDNDHSRPDIQVQAKRLAEKLRCDTVVSEISTGQRTVNFKINRELLTKTVLQQVIEDGSKYGLKSELFSGLPQKKIVVEFSSPNVAKKFHVGHLRSTIIGNFIANLKEALGHQVIRINYLGDWGMQFGLLGTGFQLFGYEEKLQSNPLQHLFEVYVQVNKEAADDKSVAKAAQEFFQRLELGDVQALSLWQKFRDLSIEEYIRVYKRLGVYFDEYSGESFYREKSQEVLKLLESKGLLLKTIKGTAVVDLSGNGDPSSICTVMRSDGTSLYATRDLAAAIDRMDKYNFDTMIYVTDKGQKKHFQQVFQMLKIMGYDWAERCQHVPFGVVQGMKTRRGDVTFLEDVLNEIQLRMLQNMASIKTTKELKNPQETAERVGLAALIIQDFKGLLLSDYKFSWDRVFQSRGDTGVFLQYTHARLHSLEETFGCGYLNDFNTACLQEPQSVSILQHLLSRRGAVYNHLVSSLVHLSLLDP

SEQ ID NO: 878089 - protein, 403 aa, Homo sapiens; identical to SEQ ID NO: 878072

SEQ ID NO: 878090 - protein, 452 aa, Homo sapiens
EAGTGGLRRTSVEVDMACGFRRAIACQLSRVLNLPPENLITSISAVPISQKEEVADFQLSVDSLLEKDNDHSRPDIQVQAKRLAEKLRCDTVVSEISTGQRTVNFKINRELLTKTVLQQVIEDGSKYGLKSELFSGLPQKKIVVEFSSPNVAKKFHVGHLRSTIIGNFIANLKEALGHQVIRINYLGDWGMQFGLLGTGFQLFGYEEKLQSNPLQHLFEVYVQVNKEAADDKSVAKAAQEFFQRLELGDVQALSLWQKFRDLSIEEYIRVYKRLGVYFDEYSGESFYREKSQEVLKLLESKGLLLKTIKGTAVVDLSGNGDPSSICTVMRSDGTSLYATRDLAAAIDRMDKYNFDTMIYVTDKGQKKHFQQVFQMLKIMGYDWAERCQHVPFGVVQGMKTRRGDVTFLEDVLNEIQLRMLQNMASIKTTKELKNPQETAERVGLAALIIQVC

SEQ ID NO: 878091 - protein, 265 aa, Homo sapiens; identical to SEQ ID NO: 878080

SEQ ID NO: 878092 - protein, 99 aa, Homo sapiens; identical to SEQ ID NO: 878069

SEQ ID NO: 878093 - protein, 1152 aa, Homo sapiens
MSTLLDIKSSVLRQVQVCPSFRRRTEQDPGSASADPQEPATGAWKPGDGVEFFAHMRLMLKKGEGRQGLPCLEVPLRSGSPAPPEPVDPSLGLRALAPEEVEMLYEEALYTVLYRAGTMGPDQVDDEEALLSYLQQVFGTSLEEHTEAIERVRKAKAPTYALKVSVMRAKNLLAKDPNGFSDPYCMLGILPASDATREPRAQKEQRFGFRKGSKRGGPLPAKCIQVTEVKSSTLNPVWKEHFLFEIEDVSTDQLHLDIWDHDDDVSLVEACRKLNEVIGLKGMGRYFKQIVKSARANGTAGPIEDHTDDFLGCLNIPVREVPVAGVDRWFKLEPRSSASRVQGHCHLVLKLITTQRDTAMSQRGRSGFLSHLLLLSHLLRLEHSAEEPNSSSWRGELSTPAATILCLHGAQSNLSPLQLAVLHWQVSSRHHQTCTLDYSYLLGLLEDMQAHWEEAPSLPQEQEESLADSLSAFSEFGLQLLRQLRDYFPATNSTAVHRLELLLKCLGKLQLFQPSFEICPFESELNMDIAAALKRGNREWYDRILNDKSPREQPGPQRLPGLVVLADAVYDDLQFCYSVYASLFHSILNVDVFTLTFRQLERLVAEEAWVLTEELSPKMTLEVASGLFELYLTLADLQRFWDSIPGRDSRSLALAGIHAPFLPAVKLWFQVLRDQAKWRLQGAVDMDTLEPVDASSRHSSSAATAGLCLSHIQELWVRLAWPDPAQAQGLGTQLGQDVCEATLFYTELLRKKVDTQPGAAGEAVSEALCVVLNNVELVRKAAGQALKGLAWPEGATGPEGVLPRPLLSCTQALDDDLQREAHTVTAHLTSKMVGDIRKYVQHISLSPDSIQNDEAVAPLMKYLDEKLALLNASLVKGNLSRVLEALWELLLQAILQALGANRDVSADFYSRFHFTLEALVSFFHAEGQGLPLESLRDGSYKRLKEELRLHKCSTRECIEQFYLDKLKQRTLEQNRFGRLSVRCHYEAAEQRLAVEVLHAADLLPLDANGLSDPFVIVELGPPHLFPLVRSQRTQVKTRTLHPVYDELFYFSVPAEACRRRAACVLFTVMDHDWLSTNDFAGEAALGLGGVTGVARPQVGGGARAGQPVTLHLCRPRAQVRSALRRLEGRTSKEAQEFVKKLKELEKCMEADP

SEQ ID NO: 878094 - protein, 158 aa, Homo sapiens
AWAPLVQLRKRGGPLPAKCIQVTEVKSSTLNPVWKEHFLFEIEDVSTDQLHLDIWDHDDDVSLVEACRKLNEVIGLKGMGRYFKQIVKSARANGTAGPIEDHTDDFLGCLNIPVREVPVAGVDRWFKLEPRSSASRVQGHCHLVLKLITTQVRRGVGV

SEQ ID NO: 878095 - protein, 1179 aa, Homo sapiens
MSTLLDIKSSVLRQVQVCPSFRRRTEQDPGSASADPQEPATGAWKPGDGVEFFAHMRLMLKKGEGRQGLPCLEVPLRSGSPAPPEPVDPSLGLRALAPEEVEMLYEEALYTVLYRAGTMGPDQVDDEEALLSYLQQVFGTSLEEHTEAIERVRKAKAPTYALKVSVMRAKNLLAKDPNGFSDPYCMLGILPASDATREPRAQKEQRFGFRKGSKRGGPLPAKCIQVTEVKSSTLNPVWKEHFLFEIEDVSTDQLHLDIWDHDDDVSLVEACRKLNEVIGLKGMGRYFKQIVKSARANGTAGPIEDHTDDFLGCLNIPVREVPVAGVDRWFKLEPRSSASRVQGHCHLVLKLITTQRDTAMSQRGRSGFLSHLLLLSHLLRLEHSAEEPNSSSWRGELSTPAATILCLHGAQSNLSPLQLAVLHWQVSSRHHQTCTLDYSYLLGLLEDMQAHWEEAPSLPQEQEESLADSLSAFSEFGLQLLRQLRDYFPATNSTAVHRLELLLKWVQRRVSSVGGGGWQGRPHVSVLPPPRCLGKLQLFQPSFEICPFESELNMDIAAALKRGNREWYDRILNDKSPREQPGPQRLPGLVVLADAVYDDLQFCYSVYASLFHSILNVDVFTLTFRQLERLVAEEAWVLTEELSPKMTLEVASGLFELYLTLADLQRFWDSIPGRDSRSLALAGIHAPFLPAVKLWFQVLRDQAKWRLQGAVDMDTLEPVDASSRHSSSAATAGLCLSHIQELWVRLAWPDPAQAQGLGTQLGQDVCEATLFYTELLRKKVDTQPGAAGEAVSEALCVVLNNVELVRKAAGQALKGLAWPEGATGPEGVLPRPLLSCTQALDDDLQREAHTVTAHLTSKMVGDIRKYVQHISLSPDSIQNDEAVAPLMKYLDEKLALLNASLVKGNLSRVLEALWELLLQAILQALGANRDVSADFYSRFHFTLEALVSFFHAEGQGLPLESLRDGSYKRLKEELRLHKCSTRECIEQFYLDKLKQRTLEQNRFGRLSVRCHYEAAEQRLAVEVLHAADLLPLDANGLSDPFVIVELGPPHLFPLVRSQRTQVKTRTLHPVYDELFYFSVPAEACRRRAACVLFTVMDHDWLSTNDFAGEAALGLGGVTGVARPQVGGGARAGQPVTLHLCRPRAQVRSALRRLEGRTSKEAQEFVKKLKELEKCMEADP

SEQ ID NO: 878096 - protein, 975 aa, Homo sapiens
AWAPLVQLRKRGGPLPAKCIQVTEVKSSTLNPVWKEHFLFEIEDVSTDQLHLDIWDHDDDVSLVEACRKLNEVIGLKGMGRYFKQIVKSARANGTAGPIEDHTDDFLGCLNIPVREVPVAGVDRWFKLEPRSSASRVQGHCHLVLKLITTQRDTAMSQRGRSGFLSHLLLLSHLLRLEHSAEEPNSSSWRGELSTPAATILCLHGAQSNLSPLQLAVLHWQVSSRHHQTCTLDYSYLLGLLEDMQAHWEEAPSLPQEQEESLADSLSAFSEFGLQLLRQLRDYFPATNSTAVHRLELLLKWVQRRVSSVGGGGWQGRPHVSVLPPPRCLGKLQLFQPSFEICPFESELNMDIAAALKRGNREWYDRILNDKSPREQPGPQRLPGLVVLADAVYDDLQFCYSVYASLFHSILNVDVFTLTFRQLERLVAEEAWVLTEELSPKMTLEVASGLFELYLTLADLQRFWDSIPGRDSRSLALAGIHAPFLPAVKLWFQVLRDQAKWRLQGAVDMDTLEPVDASSRHSSSAATAGLCLSHIQELWVRLAWPDPAQAQGLGTQLGQDVCEATLFYTELLRKKVDTQPGAAGEAVSEALCVVLNNVELVRKAAGQALKGLAWPEGATGPEGVLPRPLLSCTQALDDDLQREAHTVTAHLTSKMVGDIRKYVQHISLSPDSIQNDEAVAPLMKYLDEKLALLNASLVKGNLSRVLEALWELLLQAILQALGANRDVSADFYSRFHFTLEALVSFFHAEGQGLPLESLRDGSYKRLKEELRLHKCSTRECIEQFYLDKLKQRTLEQNRFGRLSVRCHYEAAEQRLAVEVLHAADLLPLDANGLSDPFVIVELGPPHLFPLVRSQRTQVKTRTLHPVYDELFYFSVPAEACRRRAACVLFTVMDHDWLSTNDFAGEAALGLGGVTGVARPQVGGGARAGQPVTLHLCRPRAQVRSALRRLEGRTSKEAQEFVKKLKELEKCMEADP

SEQ ID NO: 878097 - protein, 1237 aa, Homo sapiens
MSTLLDIKSSVLRQVQVCPSFRRRTEQDPGSASADPQEPATGAWKPGDGVEFFAHMRLMLKKGEGRQGLPCLEVPLRSGSPAPPEPVDPSLGLRALAPEEVEMLYEEALYTVLYRAGTMGPDQVDDEEALLSYLQQVFGTSLEEHTEAIERVRKAKAPTYALKVSVMRAKNLLAKDPNGFSDPYCMLGILPASDATREPRAQKEQRFGFRKGSKRGGPLPAKCIQVTEVKSSTLNPVWKEHFLFEIEDVSTDQLHLDIWDHDDDVSLVEACRKLNEVIGLKGMGRYFKQIVKSARANGTAGPIEDHTDDFLGCLNIPVREVPVAGVDRWFKLEPRSSASRVQGHCHLVLKLITTQRDTAMSQRGRSGFLSHLLLLSHLLRLEHSAEEPNSSSWRGELSTPAATILCLHGAQSNLSPLQLAVLHWQVSSRHHQTCTLDYSYLLGLLEDMQAHWEEAPSLPQEQEESLADSLSAFSEFGLQLLRQLRDYFPATNSTAVHRLELLLKWVQRRVSSVGGGGWQGRPHVSVLPPPRCLGKLQLFQPSFEICPFESELNMDIAAALKRGNREWYDRILNDKSPREQPGPQRLPGLVVLADAVYDDLQFCYSVYASLFHSILNVDVFTLTFRQLERLVAEEAWVLTEELSPKMTLEVASGLFELYLTLADLQRFWDSIPGRDSRSLALAGIHAPFLPAVKLWFQVLRDQAKWRLQGAVDMDTLEPVDASSRHSSSAATAGLCLSHIQELWVRLAWPDPAQAQGLGTQLGQDVCEATLFYTELLRKKVDTQPGAAGEAVSEALCVVLNNVELVRKAAGQALKGLAWPEGATGPEGVLPRPLLSCTQALDDDLQREAHTVTAHLTSKMVGDIRKYVQHISLSPDSIQNDEAVAPLMKYLDEKLALLNASLVKGNLSRVLEALWELLLQAILQALGANRDVSADFYSRFHFTLEALVSFFHAEGQGLPLESLRDGSYKVRWDPLWGGGVDEGTEFKLQPHTGCVLEHEVAHGQSGLQVPALTTSTQGPLLMRFPLQRLKEELRLHKCSTRECIEQFYLDKLKQRTLEQNRFGRLSVRCHYEAAEQRLAVEVLHAADLLPLDANGLSDPFVIVELGPPHLFPLVRSQRTQVKTRTLHPVYDELFYFSVPAEACRRRAACVLFTVMDHDWLSTNDFAGEAALGLGGVTGVARPQVGGGARAGQPVTLHLCRPRAQVRSALRRLEGRTSKEAQEFVKKLKELEKCMEADP

SEQ ID NO: 878098 - protein, 1187 aa, Homo sapiens
MRPRGAAFAAGPPGDLHLGTAIGFAGAIWRSRSPAMSTLLDIKSSVLRQVQVCPSFRRRTEQDPGSASADPQEPATGAWKPGDGVEFFAHMRLMLKKGEGRQGLPCLEVPLRSGSPAPPEPVDPSLGLRALAPEEVEMLYEEALYTVLYRAGTMGPDQVDDEEALLSYLQQVFGTSLEEHTEAIERVRKAKAPTYALKVSVMRAKNLLAKDPNGFSDPYCMLGILPASDATREPRAQKEQRFGFRKGSKRGGPLPAKCIQVTEVKSSTLNPVWKEHFLFEIEDVSTDQLHLDIWDHDDDVSLVEACRKLNEVIGLKGMGRYFKQIVKSARANGTAGPIEDHTDDFLGCLNIPVREVPVAGVDRWFKLEPRSSASRVQGHCHLVLKLITTQRDTAMSQRGRSGFLSHLLLLSHLLRLEHSAEEPNSSSWRGELSTPAATILCLHGAQSNLSPLQLAVLHWQVSSRHHQTCTLDYSYLLGLLEDMQAHWEEAPSLPQEQEESLADSLSAFSEFGLQLLRQLRDYFPATNSTAVHRLELLLKCLGKLQLFQPSFEICPFESELNMDIAAALKRGNREWYDRILNDKSPREQPGPQRLPGLVVLADAVYDDLQFCYSVYASLFHSILNVDVFTLTFRQLERLVAEEAWVLTEELSPKMTLEVASGLFELYLTLADLQRFWDSIPGRDSRSLALAGIHAPFLPAVKLWFQVLRDQAKWRLQGAVDMDTLEPVDASSRHSSSAATAGLCLSHIQELWVRLAWPDPAQAQGLGTQLGQDVCEATLFYTELLRKKVDTQPGAAGEAVSEALCVVLNNVELVRKAAGQALKGLAWPEGATGPEGVLPRPLLSCTQALDDDLQREAHTVTAHLTSKMVGDIRKYVQHISLSPDSIQNDEAVAPLMKYLDEKLALLNASLVKGNLSRVLEALWELLLQAILQALGANRDVSADFYSRFHFTLEALVSFFHAEGQGLPLESLRDGSYKRLKEELRLHKCSTRECIEQFYLDKLKQRTLEQNRFGRLSVRCHYEAAEQRLAVEVLHAADLLPLDANGLSDPFVIVELGPPHLFPLVRSQRTQVKTRTLHPVYDELFYFSVPAEACRRRAACVLFTVMDHDWLSTNDFAGEAALGLGGVTGVARPQVGGGARAGQPVTLHLCRPRAQVRSALRRLEGRTSKEAQEFVKKLKELEKCMEADP

SEQ ID NO: 878099 - protein, 1196 aa, Homo sapiens
MSTLLDIKSSVLRQVQVCPSFRRRTEQDPGSASADPQEPATGAWKPGDGVEFFAHMRLMLKKGEGRQGLPCLEAWGSPCRQSPHPGPHTQVPLRSGSPAPPEPVDPSLGLRALAPEEVEMLYEEALYTVLYRAGTMGPDQVDDEEALLSYLQQVFGTSLEEHTEAIERVRKAKAPTYALKVSVMRAKNLLAKDPNGFSDPYCMLGILPASDATREPRAQKEQRFGFRKGSKRGGPLPAKCIQVTEVKSSTLNPVWKEHFLFEIEDVSTDQLHLDIWDHDDDVSLVEACRKLNEVIGLKGMGRYFKQIVKSARANGTAGPIEDHTDDFLGCLNIPVREVPVAGVDRWFKLEPRSSASRVQGHCHLVLKLITTQRDTAMSQRGRSGFLSHLLLLSHLLRLEHSAEEPNSSSWRGELSTPAATILCLHGAQSNLSPLQLAVLHWQVSSRHHQTCTLDYSYLLGLLEDMQAHWEEAPSLPQEQEESLADSLSAFSEFGLQLLRQLRDYFPATNSTAVHRLELLLKWVQRRVSSVGGGGWQGRPHVSVLPPPRCLGKLQLFQPSFEICPFESELNMDIAAALKRGNREWYDRILNDKSPREQPGPQRLPGLVVLADAVYDDLQFCYSVYASLFHSILNVDVFTLTFRQLERLVAEEAWVLTEELSPKMTLEVASGLFELYLTLADLQRFWDSIPGRDSRSLALAGIHAPFLPAVKLWFQVLRDQAKWRLQGAVDMDTLEPVDASSRHSSSAATAGLCLSHIQELWVRLAWPDPAQAQGLGTQLGQDVCEATLFYTELLRKKVDTQPGAAGEAVSEALCVVLNNVELVRKAAGQALKGLAWPEGATGPEGVLPRPLLSCTQALDDDLQREAHTVTAHLTSKMVGDIRKYVQHISLSPDSIQNDEAVAPLMKYLDEKLALLNASLVKGNLSRVLEALWELLLQAILQALGANRDVSADFYSRFHFTLEALVSFFHAEGQGLPLESLRDGSYKRLKEELRLHKCSTRECIEQFYLDKLKQRTLEQNRFGRLSVRCHYEAAEQRLAVEVLHAADLLPLDANGLSDPFVIVELGPPHLFPLVRSQRTQVKTRTLHPVYDELFYFSVPAEACRRRAACVLFTVMDHDWLSTNDFAGEAALGLGGVTGVARPQVGGGARAGQPVTLHLCRPRAQVRSALRRLEGRTSKEAQEFVKKLKELEKCMEADP

SEQ ID NO: 878100 - protein, 1179 aa, Homo sapiens; identical to SEQ ID NO: 878095

SEQ ID NO: 878101 - protein, 1179 aa, Homo sapiens; identical to SEQ ID NO: 878095

SEQ ID NO: 878102 - protein, 2843 aa, Homo sapiens
MAAASYDQLLKQVEALKMENSNLRQELEDNSNHLTKLETEASNMKEVLKQLQGSIEDEAMASSGQIDLLERLKELNLDSSNFPGVKLRSKMSLRSYGSREGSVSSRSGECSPVPMGSFPRRGFVNGSRESTGYLEELEKERSLLLADLDKEEKEKDWYYAQLQNLTKRIDSLPLTENFSLQTDMTRRQLEYEARQIRVAMEEQLGTCQDMEKRAQRRIARIQQIEKDILRIRQLLQSQATEAERSSQNKHETGSHDAERQNEGQGVGEINMATSGNGQGSTTRMDHETASVLSSSSTHSAPRRLTSHLGTKVEMVYSLLSMLGTHDKDDMSRTLLAMSSSQDSCISMRQSGCLPLLIQLLHGNDKDSVLLGNSRGSKEARARASAALHNIIHSQPDDKRGRREIRVLHLLEQIRAYCETCWEWQEAHEPGMDQDKNPMPAPVEHQICPAVCVLMKLSFDEEHRHAMNELGGLQAIAELLQVDCEMYGLTNDHYSITLRRYAGMALTNLTFGDVANKATLCSMKGCMRALVAQLKSESEDLQQVIASVLRNLSWRADVNSKKTLREVGSVKALMECALEVKKESTLKSVLSALWNLSAHCTENKADICAVDGALAFLVGTLTYRSQTNTLAIIESGGGILRNVSSLIATNEDHRQILRENNCLQTLLQHLKSHSLTIVSNACGTLWNLSARNPKDQEALWDMGAVSMLKNLIHSKHKMIAMGSAAALRNLMANRPAKYKDANIMSPGSSLPSLHVRKQKALEAELDAQHLSETFDNIDNLSPKASHRSKQRHKQSLYGDYVFDTNRHDDNRSDNFNTGNMTVLSPYLNTTVLPSSSSSRGSLDSSRSEKDRSLERERGIGLGNYHPATENPGTSSKRGLQISTTAAQIAKVMEEVSAIHTSQEDRSSGSTTELHCVTDERNALRRSSAAHTHSNTYNFTKSENSNRTCSMPYAKLEYKRSSNDSLNSVSSSDGYGKRGQMKPSIESYSEDDESKFCSYGQYPADLAHKIHSANHMDDNDGELDTPINYSLKYSDEQLNSGRQSPSQNERWARPKHIIEDEIKQSEQRQSRNQSTTYPVYTESTDDKHLKFQPHFGQQECVSPYRSRGANGSETNRVGSNHGINQNVSQSLCQEDDYEDDKPTNYSERYSEEEQHEEEERPTNYSIKYNEEKRHVDQPIDYSLKYATDIPSSQKQSFSFSKSSSGQSSKTEHMSSSSENTSTPSSNAKRQNQLHPSSAQSRSGQPQKAATCKVSSINQETIQTYCVEDTPICFSRCSSLSSLSSAEDEIGCNQTTQEADSANTLQIAEIKEKIGTRSAEDPVSEVPAVSQHPRTKSSRLQGSSLSSESARHKAVEFSSGAKSPSKSGAQTPKSPPEHYVQETPLMFSRCTSVSSLDSFESRSIASSVQSEPCSGMVSGIISPSDLPDSPGQTMPPSRSKTPPPPPQTAQTKREVPKNKAPTAEKRESGPKQAAVNAAVQRVQVLPDADTLLHFATESTPDGFSCSSSLSALSLDEPFIQKDVELRIMPPVQENDNGNETESEQPKESNENQEKEAEKTIDSEKDLLDDSDDDDIEILEECIISAMPTKSSRKAKKPAQTASKLPPPVARKPSQLPVYKLLPSQNRLQPQKHVSFTPGDDMPRVYCVEGTPINFSTATSLSDLTIESPPNELAAGEGVRGGAQSGEFEKRDTIPTEGRSTDEAQGGKTSSVTIPELDDNKAEEGDILAECINSAMPKGKSHKPFRVKKIMDQVQQASASSSAPNKNQLDGKKKKPTSPVKPIPQNTEYRTRVRKNADSKNNLNAERVFSDNKDSKKQNLKNNSKDFNDKLPNNEDRVRGSFAFDSPHHYTPIEGTPYCFSRNDSLSSLDFDDDDVDLSREKAELRKAKENKESEAKVTSHTELTSNQQSANKTQAIAKQPINRGQPKPILQKQSTFPQSSKDIPDRGAATDEKLQNFAIENTPVCFSHNSSLSSLSDIDQENNNKENEPIKETEPPDSQGEPSKPQASGYAPKSFHVEDTPVCFSRNSSLSSLSIDSEDDLLQECISSAMPKKKKPSRLKGDNEKHSPRNMGGILGEDLTLDLKDIQRPDSEHGLSPDSENFDWKAIQEGANSIVSSLHQAAAAACLSRQASSDSDSILSLKSGISLGSPFHLTPDQEEKPFTSNKGPRILKPGEKSTLETKKIESESKGIKGGKKVYKSLITGKVRSNSEISGQMKQPLQANMPSISRGRTMIHIPGVRNSSSSTSPVSKKGPPLKTPASKSPSEGQTATTSPRGAKPSVKSELSPVARQTSQIGGSSKAPSRSGSRDSTPSRPAQQPLSRPIQSPGRNSISPGRNGISPPNKLSQLPRTSSPSTASTKSSGSGKMSYTSPGRQMSQQNLTKQTGLSKNASSIPRSESASKGLNQMNNGNGANKKVELSRMSSTKSSGSESDRSERPVLVRQSTFIKEAPSPTLRRKLEESASFESLSPSSRPASPTRSQAQTPVLSPSLPDMSLSTHSSVQAGGWRKLPPNLSPTIEYNDGRPAKRHDIARSHSESPSRLPINRSGTWKREHSKHSSSLPRVSTWRRTGSSSSILSASSESSEKAKSEDEKHVNSISGTKQSKENQVSAKGTWRKIKENEFSPTNSTSQTVSSGATNGAESKTLIYQMAPAVSKTEDVWVRIEDCPINNPRSGRSPTGNTPPVIDSVSEKANPNIKDSKDNQAKQNVGNGSVPMRTVGLENRLNSFIQVDAPDQKGTEIKPGQNNPVPVSETNESSIVERTPFSSSSSSKHSSPSGTVAARVTPFNYNPSPRKSSADSTSARPSQIPTPVNNNTKKRDSKTDSTESSGTQSPKRHSGSYLVTSV

SEQ ID NO: 878103 - protein, 2843 aa, Homo sapiens; identical to SEQ ID NO: 878102

SEQ ID NO: 878104 - protein, 2893 aa, Homo sapiens
AGSGPGAADRGWLDAVPRYCCWLLVRKVKHSVAFSGLGAPYVRLPGLGSGRPFARFCTTLSSRVLEHRRHRSCVRQETKSPGGARTSGHWASVWQEVLKQLQGSIEDEAMASSGQIDLLERLKELNLDSSNFPGVKLRSKMSLRSYGSREGSVSSRSGECSPVPMGSFPRRGFVNGSRESTGYLEELEKERSLLLADLDKEEKEKDWYYAQLQNLTKRIDSLPLTENFSLQTDMTRRQLEYEARQIRVAMEEQLGTCQDMEKRAQRRIARIQQIEKDILRIRQLLQSQATEAERSSQNKHETGSHDAERQNEGQGVGEINMATSGNGQGSTTRMDHETASVLSSSSTHSAPRRLTSHLGTKVEMVYSLLSMLGTHDKDDMSRTLLAMSSSQDSCISMRQSGCLPLLIQLLHGNDKDSVLLGNSRGSKEARARASAALHNIIHSQPDDKRGRREIRVLHLLEQIRAYCETCWEWQEAHEPGMDQDKNPMPAPVEHQICPAVCVLMKLSFDEEHRHAMNELGGLQAIAELLQVDCEMYGLTNDHYSITLRRYAGMALTNLTFGDVANKATLCSMKGCMRALVAQLKSESEDLQQVIASVLRNLSWRADVNSKKTLREVGSVKALMECALEVKKESTLKSVLSALWNLSAHCTENKADICAVDGALAFLVGTLTYRSQTNTLAIIESGGGILRNVSSLIATNEDHRQILRENNCLQTLLQHLKSHSLTIVSNACGTLWNLSARNPKDQEALWDMGAVSMLKNLIHSKHKMIAMGSAAALRNLMANRPAKYKDANIMSPGSSLPSLHVRKQKALEAELDAQHLSETFDNIDNLSPKASHRSKQRHKQSLYGDYVFDTNRHDDNRSDNFNTGNMTVLSPYLNTTVLPSSSSSRGSLDSSRSEKDRSLERERGIGLGNYHPATENPGTSSKRGLQISTTAAQIAKVMEEVSAIHTSQEDRSSGSTTELHCVTDERNALRRSSAAHTHSNTYNFTKSENSNRTCSMPYAKLEYKRSSNDSLNSVSSSDGYGKRGQMKPSIESYSEDDESKFCSYGQYPADLAHKIHSANHMDDNDGELDTPINYSLKYSDEQLNSGRQSPSQNERWARPKHIIEDEIKQSEQRQSRNQSTTYPVYTESTDDKHLKFQPHFGQQECVSPYRSRGANGSETNRVGSNHGINQNVSQSLCQEDDYEDDKPTNYSERYSEEEQHEEEERPTNYSIKYNEEKRHVDQPIDYSLKYATDIPSSQKQSFSFSKSSSGQSSKTEHMSSSSENTSTPSSNAKRQNQLHPSSAQSRSGQPQKAATCKVSSINQETIQTYCVEDTPICFSRCSSLSSLSSAEDEIGCNQTTQEADSANTLQIAEIKEKIGTRSAEDPVSEVPAVSQHPRTKSSRLQGSSLSSESARHKAVEFSSGAKSPSKSGAQTPKSPPEHYVQETPLMFSRCTSVSSLDSFESRSIASSVQSEPCSGMVSGIISPSDLPDSPGQTMPPSRSKTPPPPPQTAQTKREVPKNKAPTAEKRESGPKQAAVNAAVQRVQVLPDADTLLHFATESTPDGFSCSSSLSALSLDEPFIQKDVELRIMPPVQENDNGNETESEQPKESNENQEKEAEKTIDSEKDLLDDSDDDDIEILEECIISAMPTKSSRKAKKPAQTASKLPPPVARKPSQLPVYKLLPSQNRLQPQKHVSFTPGDDMPRVYCVEGTPINFSTATSLSDLTIESPPNELAAGEGVRGGAQSGEFEKRDTIPTEGRSTDEAQGGKTSSVTIPELDDNKAEEGDILAECINSAMPKGKSHKPFRVKKIMDQVQQASASSSAPNKNQLDGKKKKPTSPVKPIPQNTEYRTRVRKNADSKNNLNAERVFSDNKDSKKQNLKNNSKDFNDKLPNNEDRVRGSFAFDSPHHYTPIEGTPYCFSRNDSLSSLDFDDDDVDLSREKAELRKAKENKESEAKVTSHTELTSNQQSANKTQAIAKQPINRGQPKPILQKQSTFPQSSKDIPDRGAATDEKLQNFAIENTPVCFSHNSSLSSLSDIDQENNNKENEPIKETEPPDSQGEPSKPQASGYAPKSFHVEDTPVCFSRNSSLSSLSIDSEDDLLQECISSAMPKKKKPSRLKGDNEKHSPRNMGGILGEDLTLDLKDIQRPDSEHGLSPDSENFDWKAIQEGANSIVSSLHQAAAAACLSRQASSDSDSILSLKSGISLGSPFHLTPDQEEKPFTSNKGPRILKPGEKSTLETKKIESESKGIKGGKKVYKSLITGKVRSNSEISGQMKQPLQANMPSISRGRTMIHIPGVRNSSSSTSPVSKKGPPLKTPASKSPSEGQTATTSPRGAKPSVKSELSPVARQTSQIGGSSKAPSRSGSRDSTPSRPAQQPLSRPIQSPGRNSISPGRNGISPPNKLSQLPRTSSPSTASTKSSGSGKMSYTSPGRQMSQQNLTKQTGLSKNASSIPRSESASKGLNQMNNGNGANKKVELSRMSSTKSSGSESDRSERPVLVRQSTFIKEAPSPTLRRKLEESASFESLSPSSRPASPTRSQAQTPVLSPSLPDMSLSTHSSVQAGGWRKLPPNLSPTIEYNDGRPAKRHDIARSHSESPSRLPINRSGTWKREHSKHSSSLPRVSTWRRTGSSSSILSASSESSEKAKSEDEKHVNSISGTKQSKENQVSAKGTWRKIKENEFSPTNSTSQTVSSGATNGAESKTLIYQMAPAVSKTEDVWVRIEDCPINNPRSGRSPTGNTPPVIDSVSEKANPNIKDSKDNQAKQNVGNGSVPMRTVGLENRLNSFIQVDAPDQKGTEIKPGQNNPVPVSETNESSIVERTPFSSSSSSKHSSPSGTVAARVTPFNYNPSPRKSSADSTSARPSQIPTPVNNNTKKRDSKTDSTESSGTQSPKRHSGSYLVTSV

SEQ ID NO: 878105 - protein, 2843 aa, Homo sapiens; identical to SEQ ID NO: 878102

SEQ ID NO: 878106 - protein, 591 aa, Homo sapiens
MAAASYDQLLKQVEALKMENSNLRQELEDNSNHLTKLETEASNMKEVLKQLQGSIEDEAMASSGQIDLLERLKELNLDSSNFPGVKLRSKMSLRSYGSREGSVSSRSGECSPVPMGSFPRRGFVNGSRESTGYLEELEKERSLLLADLDKEEKEKDWYYAQLQNLTKRIDSLPLTENFSLQTDMTRRQLEYEARQIRVAMEEQLGTCQDMEKRAQRRIARIQQIEKDILRIRQLLQSQATEAERSSQNKHETGSHDAERQNEGQGVGEINMATSGNGQGSTTRMDHETASVLSSSSTHSAPRRLTSHLGTKVEMVYSLLSMLGTHDKDDMSRTLLAMSSSQDSCISMRQSGCLPLLIQLLHGNDKDSVLLGNSRGSKEARARASAALHNIIHSQPDDKRGRREIRVLHLLEQIRAYCETCWEWQEAHEPGMDQDKNPMPAPVEHQICPAVCVLMKLSFDEEHRHAMNELGGLQAIAELLQVDCEMYGLTNDHYSITLRRYAGMALTNLTFGDVANKATLCSMKGCMRALVAQLKSESEDLQQVIASVLRNLSWRADVNSKKTLREVGSVKALMECALEVKKVPLKTFSTII

SEQ ID NO: 878107 - protein, 2843 aa, Homo sapiens; identical to SEQ ID NO: 878102

SEQ ID NO: 878108 - protein, 2771 aa, Homo sapiens
MAAASYDQLLKQVEALKMENSNLRQELEDNSNHLTKLETEASNMKEVLKQLQGSIEDEAMASSGQIDLLERLKELNLDSSNFPGVKLRSKMSLRSYGSREGSVSSRSGECSPVPMGSFPRRGFVNGSRESTGYLEELEKERSLLLADLDKEEKEKDWYYAQLQNLTKRIDSLPLTENFSLQTDMTRRQLEYEARQIRVAMEEQLGTCQDMEKRAQRRIARIQQIEKDILRIRQLLQSQATEAERSSQNKHETGSHDAERQNEGQGVGEINMATSGNGQGSTTRMDHETASVLSSSSTHSAPRRLTSHLGTKVEMVYSLLSMLGTHDKDDMSRTLLAMSSSQDSCISMRQSGCLPLLIQLLHGNDKDSVLLGNSRGSKEARARASAALHNIIHSQPDDKRGRREIRVLHLLEQIRAYCETCWEWQEAHEPGMDQDKNPMPAPVEHQICPAVCVLMKLSFDEEHRHAMNELGGLQAIAELLQVDCEMYGLTNDHYSITLRRYAGMALTNLTFGDVANKATLCSMKGCMRALVAQLKSESEDLQQVIASVLRNLSWRADVNSKKTLREVGSVKALMECALEVKKESTLKSVLSALWNLSAHCTENKADICAVDGALAFLVGTLTYRSQTNTLAIIESGGGILRNVSSLIATNEDHRQILRENNCLQTLLQHLKSHSLTIVSNACGTLWNLSARNPKDQEALWDMGAVSMLKNLIHSKHKMIAMGSAAALRNLMANRPAKYKDANIMSPGSSLPSLHVRKQKALEAELDAQHLSETFDNIDNLSPKASHRSKQRHKQSLYGDYVFDTNRHDDNRSDNFNTGNMTVLSPYLNTTVLPSSSSSRGSLDSSRSEKDRKEALLPIHIQTLTISLSRKIQIGHVLMPYAKLEYKRSSNDSLNSVSSSDGYGKRGQMKPSIESYSEDDESKFCSYGQYPADLAHKIHSANHMDDNDGELDTPINYSLKYSDEQLNSGRQSPSQNERWARPKHIIEDEIKQSEQRQSRNQSTTYPVYTESTDDKHLKFQPHFGQQECVSPYRSRGANGSETNRVGSNHGINQNVSQSLCQEDDYEDDKPTNYSERYSEEEQHEEEERPTNYSIKYNEEKRHVDQPIDYSLKYATDIPSSQKQSFSFSKSSSGQSSKTEHMSSSSENTSTPSSNAKRQNQLHPSSAQSRSGQPQKAATCKVSSINQETIQTYCVEDTPICFSRCSSLSSLSSAEDEIGCNQTTQEADSANTLQIAEIKEKIGTRSAEDPVSEVPAVSQHPRTKSSRLQGSSLSSESARHKAVEFSSGAKSPSKSGAQTPKSPPEHYVQETPLMFSRCTSVSSLDSFESRSIASSVQSEPCSGMVSGIISPSDLPDSPGQTMPPSRSKTPPPPPQTAQTKREVPKNKAPTAEKRESGPKQAAVNAAVQRVQVLPDADTLLHFATESTPDGFSCSSSLSALSLDEPFIQKDVELRIMPPVQENDNGNETESEQPKESNENQEKEAEKTIDSEKDLLDDSDDDDIEILEECIISAMPTKSSRKAKKPAQTASKLPPPVARKPSQLPVYKLLPSQNRLQPQKHVSFTPGDDMPRVYCVEGTPINFSTATSLSDLTIESPPNELAAGEGVRGGAQSGEFEKRDTIPTEGRSTDEAQGGKTSSVTIPELDDNKAEEGDILAECINSAMPKGKSHKPFRVKKIMDQVQQASASSSAPNKNQLDGKKKKPTSPVKPIPQNTEYRTRVRKNADSKNNLNAERVFSDNKDSKKQNLKNNSKDFNDKLPNNEDRVRGSFAFDSPHHYTPIEGTPYCFSRNDSLSSLDFDDDDVDLSREKAELRKAKENKESEAKVTSHTELTSNQQSANKTQAIAKQPINRGQPKPILQKQSTFPQSSKDIPDRGAATDEKLQNFAIENTPVCFSHNSSLSSLSDIDQENNNKENEPIKETEPPDSQGEPSKPQASGYAPKSFHVEDTPVCFSRNSSLSSLSIDSEDDLLQECISSAMPKKKKPSRLKGDNEKHSPRNMGGILGEDLTLDLKDIQRPDSEHGLSPDSENFDWKAIQEGANSIVSSLHQAAAAACLSRQASSDSDSILSLKSGISLGSPFHLTPDQEEKPFTSNKGPRILKPGEKSTLETKKIESESKGIKGGKKVYKSLITGKVRSNSEISGQMKQPLQANMPSISRGRTMIHIPGVRNSSSSTSPVSKKGPPLKTPASKSPSEGQTATTSPRGAKPSVKSELSPVARQTSQIGGSSKAPSRSGSRDSTPSRPAQQPLSRPIQSPGRNSISPGRNGISPPNKLSQLPRTSSPSTASTKSSGSGKMSYTSPGRQMSQQNLTKQTGLSKNASSIPRSESASKGLNQMNNGNGANKKVELSRMSSTKSSGSESDRSERPVLVRQSTFIKEAPSPTLRRKLEESASFESLSPSSRPASPTRSQAQTPVLSPSLPDMSLSTHSSVQAGGWRKLPPNLSPTIEYNDGRPAKRHDIARSHSESPSRLPINRSGTWKREHSKHSSSLPRVSTWRRTGSSSSILSASSESSEKAKSEDEKHVNSISGTKQSKENQVSAKGTWRKIKENEFSPTNSTSQTVSSGATNGAESKTLIYQMAPAVSKTEDVWVRIEDCPINNPRSGRSPTGNTPPVIDSVSEKANPNIKDSKDNQAKQNVGNGSVPMRTVGLENRLNSFIQVDAPDQKGTEIKPGQNNPVPVSETNESSIVERTPFSSSSSSKHSSPSGTVAARVTPFNYNPSPRKSSADSTSARPSQIPTPVNNNTKKRDSKTDSTESSGTQSPKRHSGSYLVTSV

SEQ ID NO: 878109 - protein, 788 aa, Homo sapiens
MAAASYDQLLKQVEALKMENSNLRQELEDNSNHLTKLETEASNMKEVLKQLQGSIEDEAMASSGQIDLLERLKASDSDSILSLKSGISLGSPFHLTPDQEEKPFTSNKGPRILKPGEKSTLETKKIESESKGIKGGKKVYKSLITGKVRSNSEISGQMKQPLQANMPSISRGRTMIHIPGVRNSSSSTSPVSKKGPPLKTPASKSPSEGQTATTSPRGAKPSVKSELSPVARQTSQIGGSSKAPSRSGSRDSTPSRPAQQPLSRPIQSPGRNSISPGRNGISPPNKLSQLPRTSSPSTASTKSSGSGKMSYTSPGRQMSQQNLTKQTGLSKNASSIPRSESASKGLNQMNNGNGANKKVELSRMSSTKSSGSESDRSERPVLVRQSTFIKEAPSPTLRRKLEESASFESLSPSSRPASPTRSQAQTPVLSPSLPDMSLSTHSSVQAGGWRKLPPNLSPTIEYNDGRPAKRHDIARSHSESPSRLPINRSGTWKREHSKHSSSLPRVSTWRRTGSSSSILSASSESSEKAKSEDEKHVNSISGTKQSKENQVSAKGTWRKIKENEFSPTNSTSQTVSSGATNGAESKTLIYQMAPAVSKTEDVWVRIEDCPINNPRSGRSPTGNTPPVIDSVSEKANPNIKDSKDNQAKQNVGNGSVPMRTVGLENRLNSFIQVDAPDQKGTEIKPGQNNPVPVSETNESSIVERTPFSSSSSSKHSSPSGTVAARVTPFNYNPSPRKSSADSTSARPSQIPTPVNNNTKKRDSKTDSTESSGTQSPKRHSGSYLVTSV

SEQ ID NO: 878110 - protein, 617 aa, Homo sapiens
MAAASYDQLLKQVEALKMENSNLRQELEDNSNHLTKLETEASNMKEVLKQLQGSIEDEAMASSGQIDLLERLKELNLDSSNFPGVKLRSKMSLRSYGSREGSVSSRSGECSPVPMGSFPRRGFVNGSRESTGYLEELEKERSLLLADLDKEEKEKDWYYAQLQNLTKRIDSLPLTENFSLQTDMTRRQLEYEARQIRVAMEEQLGTCQDMEKRAQRRIARIQQIEKDILRIRQLLQSQATEAERSSQNKHETGSHDAERQNEGQGVGEINMATSGNGQGSTTRMDHETASVLSSSSTHSAPRRLTSHLGTKVEMVYSLLSMLGTHDKDDMSRTLLAMSSSQDSCISMRQSGCLPLLIQLLHGNDKDSVLLGNSRGSKEARARASAALHNIIHSQPDDKRGRREIRVLHLLEQIRAYCETCWEWQEAHEPGMDQDKNPMPAPVEHQICPAVCVLMKLSFDEEHRHAMNELGGLQAIAELLQVDCEMYGLTNDHYSITLRRYAGMALTNLTFGDVANKATLCSMKGCMRALVAQLKSESEDLQQVIASVLRNLSWRADVNSKKTLREVGSVKALMECALEVKKRWSLALLPGWSAVAGSRLTATSNSLVQAIILPQPPK

SEQ ID NO: 878111 - protein, 256 aa, Homo sapiens
MSTRRVRGGGGAREEEKQERPESNARRQEEGGRRQHKQKQEEEGERRRGAKNTTQGGGRTRARRGGHNNGGSTEQQGRGSKDSRAARGEAGESKRERREGTSQGVEEARAQQKTGSRREQAQESRARPERTRRGKRREGETKSREASSGRGKKAQSSNNRRGRTKKIERREGKRRRTEGEKTREREEEEGRRRRGRRKGAGREEEEGGRERRRERRGRPGARDERRARETTKSSRQSTTTHTTEEAPSHKKTPHSQ

SEQ ID NO: 878112 - protein, 301 aa, Homo sapiens
EPGNCCCPGKRLRAEGGRTAQLTAVLRKFLDPRLISTEENTQAAETMGPLSAPPCTEHIKWKGLLVTASLLNFWNLPTTAQVTIEAQPPKVSEGKDVLLLVHNLPQNLTGYIWYKGQIRDLYHYITSYVVDGQIIIYGPAYSGRETAYSNASLLIQNVTREDAGSYTLHIIKRGDGTRGVTGYFTFTLYLETPKPSISSSNLNPREAMETVILTCDPETPDTSYQWWMNGQSLPMTHRFQLSETNRTLFLFGVTKYTAGPYECEIRNSGSASRSDPVTLNLLHGPDLPRIHPSVHQLPFRR

SEQ ID NO: 878113 - protein, 301 aa, Homo sapiens; identical to SEQ ID NO: 878112

SEQ ID NO: 878114 - protein, 301 aa, Homo sapiens; identical to SEQ ID NO: 878112

SEQ ID NO: 878115 - protein, 301 aa, Homo sapiens; identical to SEQ ID NO: 878112

SEQ ID NO: 878116 - protein, 156 aa, Homo sapiens
GLQANITMYSCPQLSNLVFLLPQKLKKDEASPCSAPFTLNLLPKLETPKPSISSSNLNPREAMETVILTCDPETPDTSYQWWMNGQSLPMTHRFQLSETNRTLFLFGVTKYTAGPYECEIRNSGSASRSDPVTLNLLHGPDLPRIHPSVHQLPFRR

SEQ ID NO: 878117 - protein, 132 aa, Homo sapiens
VTRGRSDYAVTDYAARSDYSVETPKPSISSSNLNPREAMETVILTCDPETPDTSYQWWMNGQSLPMTHRFQLSETNRTLFLFGVTKYTAGPYECEIRNSGSASRSDPVTLNLLHGPDLPRIHPSVHQLPFRR

SEQ ID NO: 878118 - protein, 301 aa, Homo sapiens; identical to SEQ ID NO: 878112

SEQ ID NO: 878119 - protein, 248 aa, Homo sapiens
EPGNCCCPGKRLRAEGGRTAQLTAVLRKFLDPRLISTEENTQAAETMGPLSAPPCTEHIKWKGLLVTASLLNFWNLPTTAQVTIEAQPPKVSEGKDVLLLVHNLPQNLTGYIWYKGQIRDLYHYITSYVVDGQIIIYGPAYSGRETAYSNASLLIQNVTREDAGSYTLHIIKRGDGTRGVTGYFTFTLYLETPKPSISSSNLNPREAMETVILTCDPETPDTSYQWWMNDGPDLPRIHPSVHQLPFRR

SEQ ID NO: 878120 - protein, 289 aa, Homo sapiens
EPGNCCCPGKRLRAEGGRTAQLTAVLRKFLDPRLISTEENTQAAETMGPLSAPPCTEHIKWKGLLVTASLLNFWNLPTTAQVTIEAQPPKVSEGKDVLLLVHNLPQNLTGYIWYKGQIRDLYHYITSYVVDGQIIIYGPAYSGRETAYSNASLLIQNVTREDAGSYTLHIIKRGDGTRGVTGYFTFTLYLETPKPSISSSNLNPREAMETVILTCDPETPDTSYQWWMNGQSLPMTHRFQLSETNRTLFLFGVTKYTAGPYECEIRNSGSASRSDPVTLNLLREYLLFL

SEQ ID NO: 878121 - protein, 197 aa, Homo sapiens
EPGNCCCPGKRLRAEGGRTAQLTAVLRKFLDPRLISTEENTQAAETMGPLSAPPCTEHIKWKGLLVTVETPKPSISSSNLNPREAMETVILTCDPETPDTSYQWWMNGQSLPMTHRFQLSETNRTLFLFGVTKYTAGPYECEIRNSGSASRSDPVTLNLLHGPDLPKNSPSLHQLPSEIPTCERPYHVRDLHGETYM

SEQ ID NO: 878122 - protein, 246 aa, Homo sapiens
AEGGRTAQLTAVLWKLLDPRLISTEENMHAAEIMGPLSAPPCTEHIKWKGLLLTVETPKPSISSSNLNPREAMETVILTCNPETPDASYLWWMNGQSLPMTHRMQLSETNRTLFLFGVTKYTAGPYECEIWNSGSASRSDPVTLNLLHGPDLPRIFPSVTSYYSGENLDLSCFADSNPPAQYSWTINGKFQLSGQKLFIPQITPKHNGLYACSARNSATGEESSTSLTIRVIAPPGLGTFAFNNPT

SEQ ID NO: 878123 - protein, 109 aa, Homo sapiens
LRGSLCPFKRPGASPSLRWHHLWLYSLCSRWSRPPQNSPFSTPITVQEITSTCLASRTLTHRHSILGQLMGSFSNQDKICLSPKLLQSIAGSMFALFVTQPLARKAPHR

SEQ ID NO: 878124 - protein, 135 aa, Homo sapiens
RLGTRLTTRLGYFTFTLHLETPKPSISSSNLNPREAMETVILTCDPETPDTSYQWWMNGQSLPMTHRFQLSETNRTLFLFGVTKYTAGPYECEIRNSGSASRSDPVTLNLLHGSDLPRIHPSYLNHHQYLSGTSR

SEQ ID NO: 878125 - protein, 301 aa, Homo sapiens; identical to SEQ ID NO: 878112

SEQ ID NO: 878126 - protein, 301 aa, Homo sapiens; identical to SEQ ID NO: 878112

SEQ ID NO: 878127 - protein, 301 aa, Homo sapiens; identical to SEQ ID NO: 878112

SEQ ID NO: 878128 - protein, 130 aa, Homo sapiens
RLGTRLTTRLGYFTFTLHLETPKPSISSSNLNPREAMETVILTCDPETPDTSYQWWMNGQSLPMTHRFQLSETNRTLFLFGVTKYTAGPYECEIRNSGSASRSDPVTLNLLHGPDLPRIHPSVHQLPFRR

SEQ ID NO: 878129 - protein, 271 aa, Homo sapiens
EPGNCCCPGKRLRAEGGRTAQLTAVLRKFLDPRLISTEENTQAAETMGPLSAPPCTEHIKWKGLLVTASLLNFWNLPTTAQVTIEAQPPKVSEGKDVLLLVHNLPQNLTGYIWYKGQIRDLYHYITSYVVDGQIIIYGPAYSGRETAYSNASLLIQNVTREDAGSYTLHIIKRGDGTRGVTGYFTFTLYLETPKPSISSSNLNPREAMETVILTCDPETPDTSYQWWMNGQSLPMTHRGPSFYLVSQSILQDPMNVKYGTQGVPAAVTQSP

SEQ ID NO: 878130 - protein, 91 aa, Homo sapiens
LAFTCEPKSESYTYIWWLNGQSLPVSPRVKRPIENRILILPSVTRNETGPYECEIRDRYGGIHSDPVTLNVLYGPDLPRIHPSVHQLPFRR

SEQ ID NO: 878131 - protein, 131 aa, Homo sapiens
EPGNCCCPGKRLRAEGGRTAQLTAVLRKFLDPRLISTEENTQAAETMGPLSAPPCTEHIKWKGLLVTATQEAAAGESREPRRQKLQRAEIAPLHTSLGDSTRLRLKKKKKKKKKKKEKKEIKGKKALLEPG

SEQ ID NO: 878132 - protein, 123 aa, Homo sapiens
SLLNFWNLPTTAQVTIEAQPPKVSEGKDVLLLVHNLPQNLTGYIWYKGQIRDLYHYITSYVVDGQIIIYGPAYSGRETAYSNASLLIQNVTREDAGSYTLHIIKRGDGTRGVTGYFTFTLYRK

SEQ ID NO: 878133 - protein, 80 aa, Homo sapiens
NGLVRGRSTPTGRHQRECGHNHHVTAHRHQRECSRNRHVTAHRRPGAPLRPKLASGAANEKGACLAPAGLQSSRSAPARG

SEQ ID NO: 878134 - protein, 164 aa, Homo sapiens
MKPKLMYQELKVPAEEPANELPMNEIEAWKAAEKKARWVLLVLILAVVGFGALMTQLFLWEYGDLHLFGPNQRPAPCYDPCEAVLVESIPEGLDFPNAPGEPSPNKAGGLRRAQGWTSLCNEHPNDHTRACGGRGPQDTETGRDEARDSHRRGSVAHTAKTRQA

SEQ ID NO: 878135 - protein, 490 aa, Homo sapiens
MKPKLMYQELKVPAEEPANELPMNEIEAWKAAEKKARWVLLVLILAVVGFGALMTQLFLWEYGDLHLFGPNQRPAPCYDPCEAVLVESIPEGLDFPNASTGNPSTSQAWLGLLAGAHSSLDIASFYWTLTNNDTHTQEPSAQQGEEVLRQLQTLAPKGVNVRIAVSKPSGPQPQADLQALLQSGAQVRMVDMQKLTHGVLHTKFWVVDQTHFYLGSANMDWRSLTQVKELGVVMYNCSCLARDLTKIFEAYWFLGQAGSSIPSTWPRFYDTRYNQETPMEICLNGTPALAYLASAPPPLCPSGRTPDLKALLNVVDNARSFIYVAVMNYLPTLEFSHPHRFWPAIDDGLRRATYERGVKVRLLISCWGHSEPSMRAFLLSLAALRDNHTHSDIQVKLFVVPADEAQARIPYARVNHNKYMVTERATYIGTSNWSGNYFTETAGTSLLVTQNGRGGLRSQLEAIFLRDWDSPYSHDLDTSADSVGNACRLL

SEQ ID NO: 878136 - protein, 490 aa, Homo sapiens; identical to SEQ ID NO: 878135

SEQ ID NO: 878137 - protein, 490 aa, Homo sapiens; identical to SEQ ID NO: 878135

SEQ ID NO: 878138 - protein, 490 aa, Homo sapiens; identical to SEQ ID NO: 878135

SEQ ID NO: 878139 - protein, 439 aa, Homo sapiens
PVSLVWVQQDPAELSFPQPSTPQSPCYDPCEAVLVESIPEGLDFPNASTGNPSTSQAWLGLLAGAHSSLDIASFYWTLTNNDTHTQEPSAQQGEEVLRQLQTLAPKGVNVRIAVSKPSGPQPQADLQALLQSGAQVRMVDMQKLTHGVLHTKFWVVDQTHFYLGSANMDWRSLTQVKELGVVMYNCSCLARDLTKIFEAYWFLGQAGSSIPSTWPRFYDTRYNQETPMEICLNGTPALAYLASAPPPLCPSGRTPDLKALLNVVDNARSFIYVAVMNYLPTLEFSHPHRFWPAIDDGLRRATYERGVKVRLLISCWGHSEPSMRAFLLSLAALRDNHTHSDIQVKLFVVPADEAQARIPYARVNHNKYMVTERATYIGTSNWSGNYFTETAGTSLLVTQNGRGGLRSQLEAIFLRDWDSPYSHDLDTSADSVGNACRLL

SEQ ID NO: 878140 - protein, 517 aa, Homo sapiens
MKPKLMYQELKVPAEEPANELPMNEIEAWKAAEKKARWVLLVLILAVVGFGALMTQLFLWEYGDLHLFGPNQRPAPCYDPCEAVLVESIPEGLDFPNASTGNPSTSQAWLGLLAGAHSSLDIASFYWTLTNNDTHTQEPSAQQGEEVLRQLQTLAPKGVNVRIAVSKPSGPQPQADLQALLQSGELGPNWGWSGPGGTQPGPWSLPLLVTGAQVRMVDMQKLTHGVLHTKFWVVDQTHFYLGSANMDWRSLTQVKELGVVMYNCSCLARDLTKIFEAYWFLGQAGSSIPSTWPRFYDTRYNQETPMEICLNGTPALAYLASAPPPLCPSGRTPDLKALLNVVDNARSFIYVAVMNYLPTLEFSHPHRFWPAIDDGLRRATYERGVKVRLLISCWGHSEPSMRAFLLSLAALRDNHTHSDIQVKLFVVPADEAQARIPYARVNHNKYMVTERATYIGTSNWSGNYFTETAGTSLLVTQNGRGGLRSQLEAIFLRDWDSPYSHDLDTSADSVGNACRLL

SEQ ID NO: 878141 - protein, 477 aa, Homo sapiens
MKPKLMYQELKVPAEEPANELPMNEIEAWKAAEKKARWVLLVLILAVVGFGALMTQLFLWEYGDLHLFGPNQRPAPCYDPCEAVLVESIPEGLDFPNASTGNPSTSQAWLGLLAGAHSSLDIASFYWTLTNNDTHTQEPSAQQGEEVLRQLQTLAPKGVNVRIAVSKPSGPQPQADLQALLQSGAQVRMVDMQKLTHGVLHTKFWVVDQTHFYLGSANMDWRSLTQVKELGVVMYNCSCLARDLTKIFEAYWFLGQAGSSIPSTWPRFYDTRYNQETPMEICLNGTPALAYLASAPPPLCPSGRTPDLKALLNVVDNARSFIYVAVMNYLPTLEFSHPHSYERGVKVRLLISCWGHSEPSMRAFLLSLAALRDNHTHSDIQVKLFVVPADEAQARIPYARVNHNKYMVTERATYIGTSNWSGNYFTETAGTSLLVTQNGRGGLRSQLEAIFLRDWDSPYSHDLDTSADSVGNACRLL

SEQ ID NO: 878142 - protein, 490 aa, Homo sapiens; identical to SEQ ID NO: 878135

SEQ ID NO: 878143 - protein, 302 aa, Homo sapiens [sequence omitted]

SEQ ID NO: 878144 - protein, 490 aa, Homo sapiens; identical to SEQ ID NO: 878135

SEQ ID NO: 878145 - protein, 413 aa, Homo sapiens
MKPKLMYQELKVPAEEPANELPMNEIEAWKAAEKKARWVLLVLILAVVGFGALMTQLFLWEYGDLHLFGPNQRPAPCYDPCEAVLVESIPEGLDFPNASTGNPSTSQAWLGLLAGAHSSLDIASFYWTLTNNDTHTQEPSAQQGEEVLRQLQTLAPKGVNVRIAVSKPSGPQPQADLQALLQSGAQVRMVDMQKLTHGVLHTKFWVVDQTHFYLGSANMDWRSLTQVKELGVVMYNCSCLARDLTKIFEAYWFLGQAGSSIPSTWPRFYDTRYNQETPMEICLNGTPALAYLASAPPPLCPSGRTPDLKALLNVVDNARSFIYVAVMNYLPTLEFSHPHRFWPAIDDGLRRATYERGVKVRLLISCWGHSEPSMRAFGLRSQLEAIFLRDWDSPYSHDLDTSADSVGNACRLL

SEQ ID NO: 878146 - protein, 503 aa, Homo sapiens
MKPKLMYQELKVPAEEPANELPMNEIEAWKAAEKKARWVLLVLILAVVGFGALMTQLFLWEYGDLHLFGPNQRPAPCYDPCEAVLVESIPEGLDFPNASTGNPSTSQAWLGLLAGAHSSLDIASFYWTLTNNDTHTQEPSAQQGEEVLRQLQTLAPKGVNVRIAVSKPSGPQPQADLQALLQSGAQVRMVDMQKLTHGVLHTKFWVVDQTHFYLGSANMDWRSLTQVKELGVVMYNCSCLARDLTKIFEAYWFLGQAGSSIPSTWPRFYDTRYNQETPMEICLNGTPALAYLASAPPPLCPSGRTPDLKALLNVVDNARSFIYVAVMNYLPTLEFSHPHRFWPAIDDGLRRATYERGVKVRLLISCWGHSEPSMRAFLLSLAALRDNHTHSDIQVKLFVVPADEAQARIPYARVNHNKYMVTERATYIGTSNWSGNYFTETAGTSLLVTQNGRGGLRSQLEAIFLRTQARIPYARVNHNKYMVTERATYIDLPLSGNLLSGTA

SEQ ID NO: 878147 - protein, 400 aa, Homo sapiens
MKPKLMYQELKVPAEEPANELPMNEIEAWKAAEKKARWVLLVLILAVVGFGALMTQLFLWEYGDLHLFGPNQRPAPCYDPCEAVLVESIPEGLDFPNASTGNPSTSQAWLGLLAGAHSSLDIASFYWTLTNNDTHTQEPSAQQGEEVLRQLQTLAPKGVNVRIAVSKPSGPQPQADLQALLQSGAQVRMVDMQKLTHGVLHTKFWVVDQTHFYLGSANMDWRSLTQVKELGVVMYNCSCLARDLTKIFEAYWFLGQAGSSIPSTWPRFYDTRYNQETPMEICLNGTPALAYLASAPPPLCPSGRTPDLKALLNVVDNARSFIYVAVMNYLPTLEFSHPHSYERGVKVRLLISCWGHSEPSMRAFGLRSQLEAIFLRDWDSPYSHDLDTSADSVGNACRLL

SEQ ID NO: 878148 - protein, 177 aa, Homo sapiens
GCGGPQPIVNGRPEPVRVGELQSGQELFWPAIDDGLRRATYERGVKVRLLISCWGHSEPSMRAFLLSLAALRDNHTHSDIQVKLFVVPADEAQARIPYARVNHNKYMVTERATYIGTSNWSGNYFTETAGTSLLVTQNGRGGLRSQLEAIFLRDWDSPYSHDLDTSADSVGNACRLL

SEQ ID NO: 878149 - protein, 172 aa, Homo sapiens
MRVTNYDDEAFGKGFDDPSIGVFWPAIDDGLRRATYERGVKVRLLISCWGHSEPSMRAFLLSLAALRDNHTHSDIQVKLFVVPADEAQARIPYARVNHNKYMVTERATYIGTSNWSGNYFTETAGTSLLVTQNGRGGLRSQLEAIFLRDWDSPYSHDLDTSADSVGNACRLL

SEQ ID NO: 878150 - protein, 409 aa, Homo sapiens
MKPKLMYQELKVPAEEPANELPMNEIEAWKAAEKKARWVLLVLILAVVGFGALMTQLFLWEYGDLHLFGPNQRPAPCYDPCEAVLVESIPEGLDFPNASTGNPSTSQAWLGLLAGAHSSLDIASFYWTLTNNDTHTQEPSAQQGEEVLRQLQTLAPKGVNVRIAVSKPSGPQPQADLQALLQSGAQVRMVDMQKLTHGVLHTKFWVVDQTHFYLGSANMDWRSLTQVKELGVVMYNCSCLARDLTKIFEAYWFLGQAGSSIPSTWPRFYDTRYNQETPMEICLNGTPALAYLASAPPPLCPSGRTPDLKALLNVVDNARSFIYVAVMNYLPTLEFSHPHRFWPAIDDGLRRATYERGVKVRLLISCWAPADPGALGHGPCPRTPASVCPIVAPQALSPALPPLPPPPPA

SEQ ID NO: 878151 - protein, 225 aa, Homo sapiens
MKPKLMYQELKVPAEEPANELPMNEIEAWKAAEKKARWVLLVLILAVVGFGALMTQLFLWEYGDLHLFGPNQRPAPCYDPCEAVLVESIPEGLDFPNASTGNPSTSQAWLGLLAGAHSSLDIASFYWTLTNNDTHTQEPSAQQGEEVLRQLQTLAPKGVNVRIAVSKPSGPQPQADLQALLQSGAQVRMVDMQKLTHQPPKKWGCMLGLAPWPTPTFQGKKGPGL

SEQ ID NO: 878152 - protein, 275 aa, Homo sapiens
MKPKLMYQELKVPAEEPANELPMNEIEAWKAAEKKARWVLLVLILAVVGFGALMTQLFLWEYGDLHLFGPNQRPAPCYDPCEAVLVESIPEGLDFPNASTGNPSTSQAWLGLLAGAHSSLDIASFYWTLTNNDTHTQEPSAQQGEEVLRQLQTLAPKGVNVRIAVSKPSELGPNWGWSGPGGTQPGPWSLPLLVTGAQVRMVDMQKLTHGVLHTKFWVVDQTHFYLGSANMDWRSLTQVCLHPVYLPSRPLPAPQGTQPPTASLTQSRVLSTHSL

SEQ ID NO: 878153 - protein, 159 aa, Homo sapiens
MKPKLMYQELKVPAEEPANELPMNEIEAWKAAEKKARWVLLVLILAVVGFGALMTQLFLWEYGDLHLFGPNQRPAPCYDPCEAVLVESIPEGLDFPNASTGNPSTSQAWLGLLAGAHSSLDIASFYWTLTNNDTHTQEPSAQQGEEVLRQLVPELAARP

SEQ ID NO: 878154 - protein, 490 aa, Homo sapiens; identical to SEQ ID NO: 878135

SEQ ID NO: 878155 - protein, 490 aa, Homo sapiens; identical to SEQ ID NO: 878135

SEQ ID NO: 878156 - protein, 490 aa, Homo sapiens; identical to SEQ ID NO: 878135

SEQ ID NO: 878157 - protein, 472 aa, Homo sapiens
MKPKLMYQELKVPAEEPANELPMNEIEAWKAAEKKARWVLLVLILAVVGFGALMTQLFLWEYGDLHLFGPNQRPAPCYDPCEAVLVESIPEGLDFPNAHSSLDIASFYWTLTNNDTHTQEPSAQQGEEVLRQLQTLAPKGVNVRIAVSKPSGPQPQADLQALLQSGAQVRMVDMQKLTHGVLHTKFWVVDQTHFYLGSANMDWRSLTQVKELGVVMYNCSCLARDLTKIFEAYWFLGQAGSSIPSTWPRFYDTRYNQETPMEICLNGTPALAYLASAPPPLCPSGRTPDLKALLNVVDNARSFIYVAVMNYLPTLEFSHPHRFWPAIDDGLRRATYERGVKVRLLISCWGHSEPSMRAFLLSLAALRDNHTHSDIQVKLFVVPADEAQARIPYARVNHNKYMVTERATYIGTSNWSGNYFTETAGTSLLVTQNGRGGLRSQLEAIFLRDWDSPYSHDLDTSADSVGNACRLL

SEQ ID NO: 878158 - protein, 490 aa, Homo sapiens; identical to SEQ ID NO: 878135

SEQ ID NO: 878159 - protein, 490 aa, Homo sapiens; identical to SEQ ID NO: 878135

SEQ ID NO: 878160 - protein, 502 aa, Homo sapiens
MKPKLMYQELKVPAEEPANELPMNEIEAWKAAEKKARWVLLVLILAVVGFGALMTQLFLWEYGDLHLFGPNQRPAPCYDPCEAVLVESIPEGLDFPNASTGNPSTSQAWLGLLAGAHSSLDIASFYWTLTNNDTHTQEPSAQQGEEVLRQLQTLAPKGVNVRIAVSKPSELGPNWGWSGPGGTQPGPWSLPLLVTGAQVRMVDMQKLTHGVLHTKFWVVDQTHFYLGSANMDWRSLTQVKELGVVMYNCSCLARDLTKIFEAYWFLGQAGSSIPSTWPRFYDTRYNQETPMEICLNGTPALAYLASAPPPLCPSGRTPDLKALLNVVDNARSFIYVAVMNYLPTLEFSHPHRFWPAIDDGLRRATYERGVKVRLLISCWGHSEPSMRAFLLSLAALRDNHTHSDIQVKLFVVPADEAQARIPYARVNHNKYMVTERATYIGTSNWSGNYFTETAGTSLLVTQNGRGGLRSQLEAIFLRDWDSPYSHDLDTSADSVGNACRLL

SEQ ID NO: 878161 - protein, 290 aa, Homo sapiens
MNEIEAWKAAEKKARWVLLVLILAVVGFGALMTQLFLWEYGDLHLFGPNQRPAPCYDPCEEVLVEGIPWGPEYNQETPMEICLNGTPALAYLASAPPPLCPSGRTPDLKALLNVVDNARSFIYVAVMNYLPTLEFSHPHRFWPAIDDGLRRATYERGVKVRLLISCWGHSEPSMRAFLLSLAALRDNHTHSDIQVKLFVVPADEAQARIPYARVNHNKYMVTERATYIGTSNWSGNYFTETAGTSLLVTQNGRGGLRSQLEAIFLRDWDSPYSHDLDTSADSVGNACRLL

SEQ ID NO: 878162 - protein, 129 aa, Homo sapiens
MRKAHAWPPPACSLAVVRLRAARRGRQAGIQPGRCVWGWVSEWETWSAGWNVAKPIHQPCTTPQPGQAGATVSGEPSPASRCGEPGLGHALRRLPAAVGGAPTGPAPSSHPRSACPDRSWGPAEVAADA

SEQ ID NO: 878163 - protein, 129 aa, Homo sapiens; identical to SEQ ID NO: 878162

SEQ ID NO: 878164 - protein, 476 aa, Homo sapiens
MKPKLMYQELKVPAEEPANELPMNEIEAWKAAEKKARWVLLVLILAVVGFGALMTQLFLWEYGDLHLFGPNQRPAPCYDPCEAVLVESIPEGLDFPNASTGNPSTSQAWLGLLAGAHSSLDIASFYWTLTNNDTHTQEPSAQQGEEVLRQLQTLAPKGVNVRIAVSKPSGPQPQADLQALLQSGAQVRMVDMQKLTHGVLHTKFWVVDQTHFYLGSANMDWRSLTQVKELGVVMYNCSCLARDLTKIFEAYWFLGQAGSSIPSTWPRFYDTRYNQETPMEICLNGTPALAYLASAPPPLCPSGRTPDLKALLNVVDNARSFIYVAVMNYLPTLEFSHPHRFWPAIDDGLRRATYERGVKVRLLISCWGHSEPSMRAFLLSLAALRDNHTHSDIQVKLFVVPADEAQARIPYARVNHNKYMVTERATYIGAIRVARCVALRGARGVLTCSVSDLGHCLHGAPSLRHPRCHTKSRYRA

SEQ ID NO: 878165 - protein, 175 aa, Homo sapiens
MVHKFTRFVNEKRREVPFVLYLWPPFWPAIDDGLRRATYERGVKVRLLISCWGHSEPSMRAFLLSLAALRDNHTHSDIQVKLFVVPADEAQARIPYARVNHNKYMVTERATYIGTSNWSGNYFTETAGTSLLVTQNGRGGLRSQLEAIFLRDWDSPYSHDLDTSADSVGNACRLL

SEQ ID NO: 878166 - protein, 129 aa, Homo sapiens
MLGLLLQNNKQRTQNAPNIRRVLRDNHTHSDIQVKLFVVPADEAQARIPYARVNHNKYMVTERATYIGTSNWSGNYFTETAGTSLLVTQNGRGGLRSQLEAIFLRDWDSPYSHDLDTSADSVGNACRLL

SEQ ID NO: 878167 - protein, 140 aa, Homo sapiens
MKPKLMYQELKVPAEEPANELPMNEIEAWKAAEKKARWVLLVLILAVVGFGALMTQLFLWEYGDLHLFGPNQRPAPCYDPCEAVLVESIPEGLDFPNASTGNPSTSQAWLGLLAGAHSSLDIASFYWTPALPPLPPPPPA

SEQ ID NO: 878168 - protein, 129 aa, Homo sapiens; identical to SEQ ID NO: 878162

SEQ ID NO: 878169 - protein, 321 aa, Homo sapiens
MATRRLTDAFLLLRNNSIQNRQLLAEQVSSHITSSPLHSRSIAALADDRMALVSGISLDPEAAIGVTKRPPPKWVDGVDEIQYDVGRIKQKMKELASLHDKHLNRPTLDDSSEEEHAIEITTQEITQLFHRCQRAVQALPSRARACSEQEGRLLGNVVASLAQALQELSTSFRHAQSGYLKRMKNREERSQHFFDTSVPLMDDGDDNTLYHRGFTEDQLVLVEQNTLMVEEREREIRQMVQSISDLNEIFRDLGAMIVEQGTVLDRIDYNVEQSCIKTEDGLKQLHKAEQYQKKNRKMLVILILFVIIIVLIVVLVGVKSR

SEQ ID NO: 878170 - protein, 274 aa, Homo sapiens
MALVSGISLDPEAAIGVTKRPPPKWVDGVDEIQYDVGRIKQKMKELASLHDKHLNRPTLDDSSEEEHAIEITTQEITQLFHRCQRAVQALPSRARACSEQEGRLLGNVVASLAQALQELSTSFRHAQSGYLKRMKNREERSQHFFDTSVPLMDDGDDNTLYHRGFTEDQLVLVEQNTLMVEEREREIRQMVQSISDLNEIFRDLGAMIVEQGTVLDRIDYNVEQSCIKTEDGLKQLHKAGYEEETQNNRSGLWNYMEVTEEGTNQRPLSNQDVG

SEQ ID NO: 878171 - protein, 117 aa, Homo sapiens
QIRGWREPEKRSEKAGEAGPAVFLQAGSLLAVEDQAVQERKGSGGRAGPQQVQTSPQKGAAGALESRPQAWLRLSKEGLGQASGAETESQPDLRARPRRLRAKVRGREQRPPGGLRE

SEQ ID NO: 878172 - protein, 272 aa, Homo sapiens
MALVSGISLDPEAAIGVTKRPPPKWVDGVDEIQYDVGRIKQKMKELASLHDKHLNRPTLDDSSEEEHAIEITTQEITQLFHRCQRAVQALPSRARACSEQEGRLLGNVVASLAQALQELSTSFRHAQSGYLKRMKNREERSQHFFDTSVPLMDDGDDNTLYHRGFTEDQLVLVEQNTLMVEEREREIRQMVQSISDLNEIFRDLGAMIVEQGTVLDRIDYNVEQSCIKTEDGLKQLHKAEQYQKKNRKMLVILILFVIIIVLIVVLVGVKSR

SEQ ID NO: 878173 - protein, 139 aa, Homo sapiens
MKNREERSQHFFDTSVPLMDDGDDNTLYHRGFTEDQLVLVEQNTLMVEEREREIRQMVQSISDLNEIFRDLGAMIVEQGTVLDRIDYNVEQSCIKTEDGLKQLHKAEQYQKKNRKMLVILILFVIIIVLIVVLVGVKSR

SEQ ID NO: 878174 - protein, 166 aa, Homo sapiens
MAAIPPDSWQPPNVYLETSMGIIVLELYWKHAPKTCKNFAELARRGYYNGTKFHRIIKDFMIQGGDPTGTGRGGASIYGKQFEDELHPDLKFTGAGILAMANAGPDTNGSQFFVTLAPTQWLDGKHTIFGRVCQGIGMVNRVGMVETNSQDRPVDDVKIIKAYPSG

SEQ ID NO: 878175 - protein, 119 aa, Homo sapiens
ENSVFFRKRNGGCDRLPVVKRLKGRGGASIYGKQFEDELHPDLKFTGAGILAMANAGPDTNGSQFFVTLAPTQWLDGKHTIFGRVCQGIGMVNRVGMVETNSQDRPVDDVKIIKAYPSG

SEQ ID NO: 878176 - protein, 166 aa, Homo sapiens; identical to SEQ ID NO: 878174

SEQ ID NO: 878177 - protein, 166 aa, Homo sapiens; identical to SEQ ID NO: 878174

SEQ ID NO: 878178 - protein, 479 aa, Homo sapiens
PSDHRTGLGRDVGAGARRAARCRAEAAAAVGTARSPALGMALLVLGLVSCTFFLAVNGLYSSSDDVIELTPSNFNREVIQSDSLWLVEFYAPWCGHCQRLTPEWKKAATALKDVVKVGAVDADKHHSLGGQYGVQGFPTIKIFGSNKNRPEDYQGGRTGEAIVDAALSALRQLVKDRLGGRSGGYSSGKQGRSDSSSKKDVIELTDDSFDKNVLDSEDVWMVEFYAPWCGHCKNLEPEWAAAASEVKEQTKGKVKLAAVDATVNQVLASRYGIRGFPTIKIFQKGESPVDYDGGRTRSDIVSRALDLFSDNAPPPELLEIINEDIAKRTCEEHQLCVVAVLPHILDTGAAGRNSYLEVLLKLADKYKKKMWGWLWTEAGAQSELETALGIGGFGYPAMAAINARKMKFALLKGSFSEQGINEFLRELSFGRGSTAPVGGGAFPTIVEREPWDGRDGELPVEDDIDLSDVELDDLGKDEL

SEQ ID NO: 878179 - protein, 488 aa, Homo sapiens
PSDHRTGLGRDVGAGARRAARCRAEAAAAVGTARSPALGMALLVLGLVSCTFFLAVNGLYSSSDDVIELTPSNFNREVADTFIPAVHQYLWALSAHSHSSHRCWVHLSTSIQPPSTWDSTSQHTAHLNTAYIVPQRFGAKLAMPSINKPIHFRISARVQVIGEVSSGHIHITHISTAFSGGIPTPHTHQQRSTGISPHRVGPGKLGWTGTIEVKNSVAAMAVGSCRPSHPSHRESQHRSGGNRTGRQGITKAMSRHNEPRGHSKVGIHGSTHVPPHAHSSPSASPATQARAPGIPAIQRTWLPWGNTTCTRPTHPGHSALARYLHGLPHGVAGNQLRADKTPYEHAHTQLGSTATPHTPHHRYNTRSQHTKQRDTPRSNTFATQILGLSLQPHTAPTHSRDVIMGSRLTPKHTRDPTEPSTSPQPNTRRRKQTHNQGAQINSDASSTPAGATHQLQATTNPAATTPTIRVAPRHVAQPNQHDGTHLHP

SEQ ID NO: 878180 - protein, 474 aa, Homo sapiens
PFICSRPCTNCTVTGPGILLRLPILYGLQYSALGMALLVLGLVSCTFFLAVNGLYSSSDDVIELTPSNFNREVIQSDSLWLVEFYAPWCGHCQRLTPEWKKAATALKDVVKVGAVDADKHHSLGGQYGVQGFPTIKIFGSNKNRPEDYQGGRTGEAIVDAALSALRQLVKDRLGGRSGGYSSGKQGRSDSSSKKDVIELTDDSFDKNVLDSEDVWMVEFYAPWCGHCKNLEPEWAAAASEVKEQTKGKVKLAAVDATVNQVLASRYGIRGFPTIKIFQKGESPVDYDGGRTRSDIVSRALDLFSDNAPPPELLEIINEDIAKRTCEEHQLCVVAVLPHILDTGAAGRNSYLEVLLKLADKYKKKMWGWLWTEAGAQSELETALGIGGFGYPAMAAINARKMKFALLKGSFSEQGINEFLRELSFGRGSTAPVGGGAFPTIVEREPWDGRDGELPVEDDIDLSDVELDDLGKDEL

SEQ ID NO: 878181 - protein, 259 aa, Homo sapiens
MVEFYAPWCGHCKNLEPEWAAAASEVKEQTKGKVKLAAVDATVNQVLASRYGIRGFPTIKIFQKGESPVDYDGGRTRSDIVSRALDLFSDNAPPPELLEIINEDIAKRTCEEHQLCVVAVLPHILDTGAAGRNSYLEVLLKLADKYKKKMWGWLWTEAGAQSELETALGIGGFGYPAMAAINARKMKFALLKGSFSEQGINEFLRELSFGRGSTAPVGGGAFPTIVEREPWDGRDGELPVEDDIDLSDVELDDLGKDEL

SEQ ID NO: 878182 - protein, 388 aa, Homo sapiens
FNAVAALKDYTTSFNAVAALKDVVKVGAVDADKHHSLGGQYGVQGFPTIKIFGSNKNRPEDYQGGRTGEAIVDAALSALRQLVKDRLGGRSGGYSSGKQGRSDSSSKKDVIELTDDSFDKNVLDSEDVWMVEFYAPWCGHCKNLEPEWAAAASEVKEQTKGKVKLAAVDATVNQVLASRYGIRGFPTIKIFQKGESPVDYDGGRTRSDIVSRALDLFSDNAPPPELLEIINEDIAKRTCEEHQLCVVAVLPHILDTGAAGRNSYLEVLLKLADKYKKKMWGWLWTEAGAQSELETALGIGGFGYPAMAAINARKMKFALLKGSFSEQGINEFLRELSFGRGSTAPVGGGAFPTIVEREPWDGRDGELPVEDDIDLSDVELDDLGKDEL

SEQ ID NO: 878183 - protein, 343 aa, Homo sapiens
MRHLLKAGLRTAYLPSPVGGRTGEAIVDAALSALRQLVKDRLGGRSGGYSSGKQGRSDSSSKKDVIELTDDSFDKNVLDSEDVWMVEFYAPWCGHCKNLEPEWAAAASEVKEQTKGKVKLAAVDATVNQVLASRYGIRGFPTIKIFQKGESPVDYDGGRTRSDIVSRALDLFSDNAPPPELLEIINEDIAKRTCEEHQLCVVAVLPHILDTGAAGRNSYLEVLLKLADKYKKKMWGWLWTEAGAQSELETALGIGGFGYPAMAAINARKMKFALLKGSFSEQGINEFLRELSFGRGSTAPVGGGAFPTIVEREPWDGRDGELPVEDDIDLSDVELDDLGKDEL

SEQ ID NO: 878184 - protein, 461 aa, Homo sapiens
PSDHRTGLGRDVGAGARRAARCRAEAAAAVGTARSPALGMALLVLGLVSCTFFLAVNGLYSSSDDVIELTPSNFNREVIQSDSLWLVEFYAPWCGHCQRLTPEWKKAATALKDVVKVGAVDADKHHSLGGQYGVQGFPTIKIFGSNKNRPEDYQGGRTGEAIVDAALSALRQLVKDRLGGRSGGYSSGKQGRSDSSSKKDVIELTDDSFDKNVLDSEDVWMVEFYAPWCGHCKNLEPEWAAAASEVKEQTKGKVIRGFPTIKIFQKGESPVDYDGGRTRSDIVSRALDLFSDNAPPPELLEIINEDIAKRTCEEHQLCVVAVLPHILDTGAAGRNSYLEVLLKLADKYKKKMWGWLWTEAGAQSELETALGIGGFGYPAMAAINARKMKFALLKGSFSEQGINEFLRELSFGRGSTAPVGGGAFPTIVEREPWDGRDGELPVEDDIDLSDVELDDLGKDEL

SEQ ID NO: 878185 - protein, 479 aa, Homo sapiens; identical to SEQ ID NO: 878178

SEQ ID NO: 878186 - protein, 479 aa, Homo sapiens; identical to SEQ ID NO: 878178

SEQ ID NO: 878187 - protein, 479 aa, Homo sapiens; identical to SEQ ID NO: 878178

SEQ ID NO: 878188 - protein, 479 aa, Homo sapiens; identical to SEQ ID NO: 878178

SEQ ID NO: 878189 - protein, 474 aa, Homo sapiens
PSDHRTGLGRDVGAGARRAARCRAEAAAAVGTARSPALGMALLVLGLVSCTFFLAVNGLYSSSDDVIELTPSNFNREVIQSDSLWLVEFYAPWCGHCQRLTPEWKKAATALKDVVKVGAVDADKHHSLGGQYGVQGFPTIKIFGSNKNRPEDYQGGRTGEAIVDAALSALRQLVKDRLGGRSGGYSSGKQGRSDSSSKKDVIELTDDSFDKNVLDSEDVWMVEFYAPWCGHCKNLEPEWAAAASEVKEQTKGKVKLAAVDATVNQVLASRYGIRGFPTIKIFQKGESPVDYDGGRTRSDIVSRALDLFSDNAPPPELLEIINEDIAKRTCEEHQLCVVAVLPHILDTGAAGRNSYLEVLLKLADKYKKKMWGWLWTEAGAQSELETALGIGGFGYPAMAAINARKMKFALLKGSFSEQGINEFLRELSFGRGSTAPVGGGAFPTIVEREPWDGRDGEVSAREGSCAGSSPGLLS

SEQ ID NO: 878190 - protein, 471 aa, Homo sapiens
PSDHRTGLGRDVGAGARRAARCRAEAAAAVGTARSPALGMALLVLGLVSCTFFLAVNGLYSSSDDVIELTPSNFNREVIQSDSLWLVEFYAPWCGHCQRLTPEWKKAATALKDVVKVGAVDADKHHSLGGQYGVQGFPTIKIFGSNKNRPEDYQGGRTGEAIVDAALSALRQLVKDRLGGRSGGYSSGKQGRSDSSSKKDVIELTDDSFDKNVLDSEDVWMVEFYAPWCGHCKNLEPEWAAAASEVKEQTKGKVKLAAVDATVNQVLASRYGIRGFPTIKIFQKGESPVDYDGGRTRSDIVSRALDLFSDNAPPPELLEIINEDIAKRTCEEHQLCVVAVLPHILDTGAAGRNSYLEVLLKLADKYKKKMWGWLWTEAGAQSELETALGIGGFGYPAMAAINARKMKFALLKGSFSEQGINEFLRELSFGRGSTAPVGGGAFPTIVDTESWHRPRLRLPLEYNLTPVIRIP

SEQ ID NO: 878191 - protein, 78 aa, Homo sapiens
PSDHRTGLGRDVGAGARRAARCRAEAAAAVGTARSPALGMALLVLGLVSCTFFLAVNGLYSSSDDVIELTPSNFNREV

SEQ ID NO: 878192 - protein, 334 aa, Homo sapiens
PSDHRTGLGRDVGAGARRAARCRAEAAAAVGTARSPALGMALLVLGLVSCTFFLAVNGLYSSSDDVIELTPSNFNREVIQSDSLWLVEFYAPWCGHCQRLTPEWKKAATALKDVVKVGAVDADKHHSLGGQYGVQGFPTIKIFGSNKNRPEDYQGGRTGEAIVDAALSALRQLVKDRLGGRSGGYSSGKQGRSDSSSKKDVIELTDDSFDKNVLDSEDVWMVEFYAPWCGHCKNLEPEWAAAASEVKEQTKGKVKLAAVDATVNQVLASRYGIRGFPTIKIFQKGESPVDYDGGRTRSDIVSRALDLRESLGTAGMASFPWRMTLTSVMWSLMT

SEQ ID NO: 878193 - protein, 397 aa, Homo sapiens
PSDHRTGLGRDVGAGARRAARCRAEAAAAVGTARSPALGMALLVLGLVSCTFFLAVNGLYSSSDDVIELTPSNFNREVIQSDSLWLVEFYAPWCGHCQRLTPEWKKAATALKDVVKVGAVDADKHHSLGGQYGVQGFPTIKIFGSNKNRPEDYQGGRTGEAIVDAALSALRQLVKDRLGGRSGGYSSGKQGRSDSSSKKDVIELTDDSFDKNVLDSEDVWMVEFYAPWCGHCKNLEPEWAAAASEVKEQTKGKVKLAAVDATVNQVLASRYGIRGFPTIKIFQKGESPVDYDGGRTRSDIVSRALDLFSDNAPPPELLEIINEDIAKRTCEEHQLCVVAVLPHILDTDPTSFDNQPRQEHLHHGHPQMLQASTRLLMGESQESTDEENGCSIECQQL

SEQ ID NO: 878194 - protein, 84 aa, Homo sapiens
CQRYTCQNCVTPGEADSEVKTQSWAGQMRHLLKAGLRTAYLPSPVGGRTGEAIVDAALSALRQLVKDRLGGRSGGYSSGKQVRP

SEQ ID NO: 878195 - protein, 105 aa, Homo sapiens
  misc_feature (34)..(34): Xaa can be any naturally occurring amino acid
WRAAQADPQSLLPGVPDMAWPSQMPMSPGSAVPXLPLMGWQGQGGAVDRNKTGLGSSHALLLSGRLASGFPICSTAGIMPVLRADCARLLHIPSSQPHVVTPHQL

SEQ ID NO: 878196 - protein, 77 aa, Homo sapiens
QEDSWPSDPQKWIAEVGVPPRFHSGDNASAESRLCQAPSHSLLAAPRGDTPPALTTSHGRSIYTTAIHKCYRPAHGC

SEQ ID NO: 878197 - protein, 479 aa, Homo sapiens; identical to SEQ ID NO: 878178

SEQ ID NO: 878198 - protein, 403 aa, Homo sapiens
LRIKGFNGCFVLSSPKRCGHCQRLTPEWKKAATALKDVVKVGAVDADKHHSLGGQYGVQGFPTIKIFGSNKNRPEDYQGGRTGEAIVDAALSALRQLVKDRLGGRSGGYSSGKQGRSDSSSKKDVIELTDDSFDKNVLDSEDVWMVEFYAPWCGHCKNLEPEWAAAASEVKEQTKGKVKLAAVDATVNQVLASRYGIRGFPTIKIFQKGESPVDYDGGRTRSDIVSRALDLFSDNAPPPELLEIINEDIAKRTCEEHQLCVVAVLPHILDTGAAGRNSYLEVLLKLADKYKKKMWGWLWTEAGAQSELETALGIGGFGYPAMAAINARKMKFALLKGSFSEQGINEFLRELSFGRGSTAPVGGGAFPTIVEREPWDGRDGELPVEDDIDLSDVELDDLGKDEL

SEQ ID NO: 878199 - protein, 388 aa, Homo sapiens
MSSCGVCFTEGKIVISFTFPQDVVKVGAVDADKHHSLGGQYGVQGFPTIKIFGSNKNRPEDYQGGRTGEAIVDAALSALRQLVKDRLGGRSGGYSSGKQGRSDSSSKKDVIELTDDSFDKNVLDSEDVWMVEFYAPWCGHCKNLEPEWAAAASEVKEQTKGKVKLAAVDATVNQVLASRYGIRGFPTIKIFQKGESPVDYDGGRTRSDIVSRALDLFSDNAPPPELLEIINEDIAKRTCEEHQLCVVAVLPHILDTGAAGRNSYLEVLLKLADKYKKKMWGWLWTEAGAQSELETALGIGGFGYPAMAAINARKMKFALLKGSFSEQGINEFLRELSFGRGSTAPVGGGAFPTIVEREPWDGRDGELPVEDDIDLSDVELDDLGKDEL

SEQ ID NO: 878200 - protein, 303 aa, Homo sapiens
MHDKRAEDTVLGKQGRSDSSSKKDVIELTDDSFDKNVLDSEDVWMVEFYAPWCGHCKNLEPEWAAAASEVKEQTKGKVKLAAVDATVNQVLASRYGIRGFPTIKIFQKGESPVDYDGGRTRSDIVSRALDLFSDNAPPPELLEIINEDIAKRTCEEHQLCVVAVLPHILDTGAAGRNSYLEVLLKLADKYKKKMWGWLWTEAGAQSELETALGIGGFGYPAMAAINARKMKFALLKGSFSEQGINEFLRELSFGRGSTAPVGGGAFPTIVEREPWDGRDGELPVEDDIDLSDVELDDLGKDEL

SEQ ID NO: 878201 - protein, 431 aa, Homo sapiens
PSDHRTGLGRDVGAGARRAARCRAEAAAAVGTARSPALGMALLVLGLVSCTFFLAVNGLYSSSDDVIELTPSNFNREVIQSDSLWLVEFYAPWCGHCQRLTPEWKKAATALKDVVKVGAVDADKHHSLGGQYGVQGFPTIKIFGSNKNRPEDYQGGRTGEAIVDAALSALRQLVKDRLGGRSGGYSSGKQGRSDSSSKKDVIELTDDSFDKNVLDSEDVWMVEFYAPWCGHCKNLEPEWAAAASEVKEQTKGKVKLAAVDATVNQVLASRYGIRGFPTIKIFQKGESPVDYDGGRTRSDIVSRALDLFSDNAPPPELLEIINEDIAKRTCEEHQLCVVAVLPHILDTGAAGRNSYLEVLLKLADKYKKKMWGWLWTEAGAQSELETALGIGGFGYPAMAAINARKMKFALGALFWAWLHGTCRRRGFPYHR

SEQ ID NO: 878202 - protein, 474 aa, Homo sapiens; identical to SEQ ID NO: 878189

SEQ ID NO: 878203 - protein, 479 aa, Homo sapiens; identical to SEQ ID NO: 878178

SEQ ID NO: 878204 - protein, 425 aa, Homo sapiens
PSDHRTGLGRDVGAGARRAARCRAEAAAAVGTARSPALGMALLVLGLVSCTFFLAVNGLYSSSDDVIELTPSNFNREVIQSDSLWLVEFYAPWCGHCQRLTPEWKKAATALKDVVKVGAVDADKHHSLGGQYGVQGFPTIKIFGSNKNRPEDYQGGRTGEAIVDAALSALRQLVKDRLGGRSGGYSSGKQGRSDSSSKKDVIELTDDSFDKNVLDSEDVWMVEFYAPWCGHCKNLEPEWAAAASEVKEQTKGKVKLAAVDATVNQVLASRYGIRGFPTIKIFQKGESPVDYDGGRTRSDIVSRALDLFSDNAPPPELLEIINEDIAKRTCEEHQLCVVAVLPHILDTGAAGRNSYLEVLLKLADKYKKKMWGWLWTEAGAQSELETALGIGGFGYPAMAAINARKMKFALLKGSFSEQGINEFLR

SEQ ID NO: 878205 - protein, 373 aa, Homo sapiens
PSDHRTGLGRDVGAGARRAARCRAEAAAAVGTARSPALGMALLVLGLVSCTFFLAVNGLYSSSDDVIELTPSNFNREVIQSDSLWLVEFYAPWCGHCQRLTPEWKKAATALKDVVKVGAVDADKHHSLGGQYGVQGFPTIKIFGSNKNRPEDYQGGRTGEAIVDAALSALRQLVKDRLGGRSGGYSSGKQGRSDSSSKKDVIELTDDSFDKNVLDSEDVWMVEFYAPWCGHCKNLEPEWAAAASEVKEQTKGKVKLAAVDATVNQVLASRYGIRGFPTIKIFQKGESPVDYDGGRTRSDIVSRALDLFSDNAPPPELLEIINEDIAKRTCEEHQLCVVAVLPHILDTGAAGRNSYLEVLLKLADKYKKKMWGF

SEQ ID NO: 878206 - protein, 159 aa, Homo sapiens
PSDHRTGLGRDVGAGARRAARCRAEAAAAVGTARSPALGMALLVLGLVSCTFFLAVNGLYSSSDDVIELTPSNFNREVIQSDSLWLVEFYAPWCGHCQRLTPEWKKAATALKDVVKVGAVDADKHHSLGGQYGVQGFPTIKIFGSNKNRPEDYQGKDFS

SEQ ID NO: 878207 - protein, 508 aa, Homo sapiens
MWELVALLLLTLAYLFWPKRRCPGAKYPKSLLSLPLVGSLPFLPRHGHMHNNFFKLQKKYGPIYSVRMGTKTTVIVGHHQLAKEVLIKKGKDFSGRPQMATLDIASNNRKGIAFADSGAHWQLHRRLAMATFALFKDGDQKLEKIICQEISTLCDMLATHNGQSIDISFPVFVAVTNVISLICFNTSYKNGDPELNVIQNYNEGIIDNLSKDSLVDLVPWLKIFPNKTLEKLKSHVKIRNDLLNKILENYKEKFRSDSITNMLDTLMQAKMNSDNGNAGPDQDSELLSDNHILTTIGDIFGAGVETTTSVVKWTLAFLLHNPQVKKKLYEEIDQNVGFSRTPTISDRNRLLLLEATIREVLRLRPVAPMLIPHKANVDSSIGEFAVDKGTEVIINLWALHHNEKEWHQPDQFMPERFLNPAGTQLISPSVSYLPFGAGPRSCIGEILARQELFLIMAWLLQRFDLEVPDDGQLPSLEGIPKVVFLIDSFKVKIKVRQAWREAQAEGST

SEQ ID NO: 878208 - protein, 89 aa, Homo sapiens
RHETVLRFDTTNDYCHIVGPRSCIGEILARQELFLIMAWLLQRFDLEVPDDGQLPSLEGIPKVVFLIDSFKVKIKVRQAWREAQAEGST

SEQ ID NO: 878209 - protein, 508 aa, Homo sapiens; identical to SEQ ID NO: 878207

SEQ ID NO: 878210 - protein, 493 aa, Homo sapiens
MWELVALLLLTLAYLFWPKRRCPGAKYPKSLLSLPLVGSLPFLPRHGHMHNNFFKLQKKYGPIYSVRMGTKTTVIVGHHQLAKEVLIKKGKDFSGRPQMATLDIASNNRKGIAFADSGAHWQLHRRLAMATFALFKDGDQKLEKIICQEISTLCDMLATHNGQSIDISFPVFVAVTNVISLICFNTSYKNGDPELNVIQNYNEGIIDNLSKDSLVDLVPWLKIFPNKTLEKLKSHVKIRNDLLNKILENSVMQAKMNSDNGNAGPDQDSELLSDNHILTTIGDIFGAGVETTTSVVKWTLAFLLHNPQVKKKLYEEIDQNVGFSRTPTISDRNRLLLLEATIREVLRLRPVAPMLIPHKANVDSSIGEFAVDKGTEVIINLWALHHNEKEWHQPDQFMPERFLNPAGTQLISPSVSYLPFGAGPRSCIGEILARQELFLIMAWLLQRFDLEVPDDGQLPSLEGIPKVVFLIDSFKVKIKVRQAWREAQAEGST

SEQ ID NO: 878211 - protein, 479 aa, Homo sapiens
MWELVALLLLTLAYLFWPKRRCPGAKYPKSLLSLPLVGSLPFLPRHGHMHNNFFKLQKKYGPIYSVRMGTKTTVIVGHHQLAKEVLIKKGKDFSGRPQMATLDIASNNRKGIAFADSGAHWQLHRRLAMATFALFKDGDQKLEKIICQEISTLCDMLATHNGQSIDISFPVFVAVTNVISLICFNTSYKNGDPELNVIQNYNEGIIDNLSKDSLVDLVPWLKEKFRSDSITNMLDTLMQAKMNSDNGNAGPDQDSELLSDNHILTTIGDIFGAGVETTTSVVKWTLAFLLHNPQVKKKLYEEIDQNVGFSRTPTISDRNRLLLLEATIREVLRLRPVAPMLIPHKANVDSSIGEFAVDKGTEVIINLWALHHNEKEWHQPDQFMPERFLNPAGTQLISPSVSYLPFGAGPRSCIGEILARQELFLIMAWLLQRFDLEVPDDGQLPSLEGIPKVVFLIDSFKVKIKVRQAWREAQAEGST

SEQ ID NO: 878212 - protein, 508 aa, Homo sapiens; identical to SEQ ID NO: 878207

SEQ ID NO: 878213 - protein, 508 aa, Homo sapiens; identical to SEQ ID NO: 878207

SEQ ID NO: 878214 - protein, 508 aa, Homo sapiens; identical to SEQ ID NO: 878207

SEQ ID NO: 878215 - protein, 508 aa, Homo sapiens; identical to SEQ ID NO: 878207

SEQ ID NO: 878216 - protein, 224 aa, Homo sapiens
RHVVWDERLGAPCSNQLQHAHNMRCSSKRTPTYTARHQSPQTQVFRQKRLLGGKGWRRAGFRFDLAEAEEMRGHEAEQGREYEVPDPLFLFHSGGSIGEFAVDKGTEVIINLWALHHNEKEWHQPDQFMPERFLNPAGTQLISPSVSYLPFGAGPRSCIGEILARQELFLIMAWLLQRFDLEVPDDGQLPSLEGIPKVVFLIDSFKVKIKVRQAWREAQAEGST

SEQ ID NO: 878217 - protein, 508 aa, Homo sapiens
MWELVALLLLTLAYLFWPKRRCPGAKYPKSLLSLPLVGSLPFLPRHGHMHNNFFKLQKKYGPIYSVRMGTKTTVIVGHHQLAKEVLIKKGKDFSGRPQMATLDIASNNRKGIAFADSGAHWQLHRRLAMATFALFKDGDQKLEKIICQEISTLCDMLATHNGQSIDISFPVFVAVTNVISLICFNTSYKNGDPELNVIQNYNEGIIDNLSKDSLVDLVPWLKIFPNKTLEKLKSHVKIRNDLLNKILENYKEKFRSDSITNMLDTLMQAKMNSDNGNAGPDQDSELLSDNHILTTIGDIFGAGVETTTSVVKWTLAFLLHNPQVKKKLYEEIDQNVGFSRTPTISDRNRLLLLEATIREVLRLRPVAPMLIPHKANVDSSIGEFAVDKGTEVIINLWALHHNEKEWHQPDQFMPERFLNPAGTQLISPSVSYLPFGAGPRSCIGEILARQELFLIMAWLLQRFDLEVPDDGQLPSLEGIPKVVFLIDSFKVNCNSQPLSTLCGPTTQI

SEQ ID NO: 878218 - protein, 542 aa, Homo sapiens
MWELVALLLLTLAYLFWPKRRCPGAKYPKSLLSLPLVGSLPFLPRHGHMHNNFFKLQKKYGPIYSVRMGTKTTVIVGHHQLAKEVLIKKGKDFSGRPQMATLDIASNNRKGIAFADSGAHWQLHRRLAMATFALFKDGDQKLEKIICQEISTLCDMLATHNGQSIDISFPVFVAVTNVISLICFNTSYKNGDPELNVIQNYNEGIIDNLSKDSLVDLVPWLKIFPNKTLEKLKSHVKIRNDLLNKILENYKEKFRSDSITNMLDTLMQAKMNSDNGNAGPDQDSELLSDNHILTTIGDIFGAGVETTTSVVKWTLAFLLHNPQVKKKLYEEIDQNVGFSRTPTISDRNRLLLLEATIREVLRLRPVAPMLIPHKANVDSSIGEFAVDKGTEVIINLWALHHNEKEWHQPDQFMPERFLNPAGTQLISPSVSYLPFGAGPRSCIGEILARQELFLIMAWLLQRFDLEVPDDGQLPSLEGIPKVVFLIDSFKVNPKAVLNSPGHPMVAHNTELEFKPPTLFRNLFLFSTQSSFLFNFVEWQRWA

SEQ ID NO: 878219 - protein, 479 aa, Homo sapiens
MWELVALLLLTLAYLFWPKRRCPGAKYPKSLLSLPLVGSLPFLPRHGHMHNNFFKLQKKYGPIYSVRMGTKTTVIVGHHQLAKEVLIKKGKDFSGRPQMATLDIASNNRKGIAFADSGAHWQLHRRLAMATFALFKDGDQKLEKIICQEISTLCDMLATHNGQSIDISFPVFVAVTNVISLICFNTSYKNGDPELNVIQNYNEGIIDNLSKDSLVDLVPWLKIFPNKTLEKLKSHVKIRNDLLNKILENYKEKFRSDSITNMLDTLMQAKMNSDNGNAGPDQDSELLSDNHILTTIGDIFGAGVETTTSVVKWTLAFLLHNPQVKKKLYEEIDQNVGFSRTPTISDRNRLLLLEATIREVLRLRPVAPMLIPHKANVDSSIGEFAVDKGTEVIINLWALHHNEKEWHQPDQFMPERFLNPAGTQLISPSVSYLPFGAGPRSCIGEILAPRDLSIMPAVERSTPGPNKGTCLLEASKGGF

SEQ ID NO: 878220 - protein, 430 aa, Homo sapiens
MWELVALLLLTLAYLFWPKRRCPGAKYPKSLLSLPLVGSLPFLPRHGHMHNNFFKLQKKYGPIYSVRMGTKTTVIVGHHQLAKEVLIKKGKDFSGRPQMATLDIASNNRKGIAFADSGAHWQLHRRLAMATFALFKDGDQKLEKIICQEISTLCDMLATHNGQSIDISFPVFVAVTNVISLICFNTSYKNGDPELNVIQNYNEGIIDNLSKDSLVDLVPWLKIFPNKTLEKLKSHVKIRNDLLNKILENYKEKFRSDSITNMLDTLMQAKMNSDNGNAGPDQDSELLSDNHILTTIGDIFGAGVETTTSVVKWTLAFLLHNPQVKKKLYEEIDQNVGFSRTPTISDRNRLLLLEATIREVLRLRPVAPMLIPHKANVDSSIGEFAVDKGTEVIINLWAEGIPKVVFLIDSFKVKIKVRQAWREAQAEGST

SEQ ID NO: 878221 - protein, 265 aa, Homo sapiens
MWELVALLLLTLAYLFWPKRRCPGAKYPKSLLSLPLVGSLPFLPRHGHMHNNFFKLQKKYGPIYSVRMGTKTTVIVGHHQLAKEVLIKKGKDFSGRPQMATLDIASNNRKGIAFADSGAHWQLHRRLAMATFALFKDGDQKLEKIICQEISTLCDMLATHNGQSIDISFPVFVAVTNVISLICFNTSYKNGDPELNVIQNYNEGIIDNLSKDSLVDLVPWLKIFPNKTLEKLKSHVKIRNDLLNKILENYRRNSGVTLSPTCWTH

SEQ ID NO: 878222 - protein, 262 aa, Homo sapiens
MWELVALLLLTLAYLFWPKRRCPGAKYPKSLLSLPLVGSLPFLPRHGHMHNNFFKLQKKYGPIYSVRMGTKTTVIVGHHQLAKEVLIKKGKDFSGRPQMATLDIASNNRKGIAFADSGAHWQLHRRLAMATFALFKDGDQKLEKIICQEISTLCDMLATHNGQSIDISFPVFVAVTNVISLICFNTSYKNGDPELNVIQNYNEGIIDNLSKDSLVDLVPWLKTFPNITLQTLKSHVPQPSGGEAHTLPGRFNFALFPGWIQE

SEQ ID NO: 878223 - protein, 92 aa, Homo sapiens
  misc_feature (1)..(1): Xaa can be any naturally occurring amino acid
  misc_feature (5)..(5): Xaa can be any naturally occurring amino acid
  misc_feature (7)..(7): Xaa can be any naturally occurring amino acid
  misc_feature (9)..(9): Xaa can be any naturally occurring amino acid
XETFXEXSXTQLFYSTAVYLACRHPATMWELVALLLLTLAYLFWPKRRCPGAKYPKSLLSEGIPKVVFLIDSFKVKIKVRQAWREAQAEGST

SEQ ID NO: 878224 - protein, 118 aa, Homo sapiens
IGGKGLALQIWGCGEWHQPDQFMPERFLNPAGTQLISPSVSYLPFGAGPRSCIGEILARQELFLIMAWLLQRFDLEVPDDGQLPSLEGIPKVVFLIDSFKVKIKVRQAWREAQAEGST

SEQ ID NO: 878225 - protein, 508 aa, Homo sapiens; identical to SEQ ID NO: 878207

SEQ ID NO: 878226 - protein, 490 aa, Homo sapiens
MWELVALLLLTLAYLFWPKRRCPGAKYPKSLLSLPLVGSLPFLPRHGHMHNNFFKLQNGHHQLAKEVLIKKGKDFSGRPQMATLDIASNNRKGIAFADSGAHWQLHRRLAMATFALFKDGDQKLEKIICQEISTLCDMLATHNGQSIDISFPVFVAVTNVISLICFNTSYKNGDPELNVIQNYNEGIIDNLSKDSLVDLVPWLKIFPNKTLEKLKSHVKIRNDLLNKILENYKEKFRSDSITNMLDTLMQAKMNSDNGNAGPDQDSELLSDNHILTTIGDIFGAGVETTTSVVKWTLAFLLHNPQVKKKLYEEIDQNVGFSRTPTISDRNRLLLLEATIREVLRLRPVAPMLIPHKANVDSSIGEFAVDKGTEVIINLWALHHNEKEWHQPDQFMPERFLNPAGTQLISPSVSYLPFGAGPRSCIGEILARQELFLIMAWLLQRFDLEVPDDGQLPSLEGIPKVVFLIDSFKVKIKVRQAWREAQAEGST

SEQ ID NO: 878227 - protein, 461 aa, Homo sapiens
MWELVALLLLTLAYLFWPKRRCPGAKYPKSLLSLPLVGSLPFLPRHGHMHNNFFKLQNGHHQLAKEVLIKKGKDFSGRPQMATLDIASNNRKGIAFADSGAHWQLHRRLAMATFALFKDGDQKLEKIICQEISTLCDMLATHNGQSIDISFPVFVAVTNVISLICFNTSYKNGDPELNVIQNYNEGIIDNLSKDSLVDLVPWLKEKFRSDSITNMLDTLMQAKMNSDNGNAGPDQDSELLSDNHILTTIGDIFGAGVETTTSVVKWTLAFLLHNPQVKKKLYEEIDQNVGFSRTPTISDRNRLLLLEATIREVLRLRPVAPMLIPHKANVDSSIGEFAVDKGTEVIINLWALHHNEKEWHQPDQFMPERFLNPAGTQLISPSVSYLPFGAGPRSCIGEILARQELFLIMAWLLQRFDLEVPDDGQLPSLEGIPKVVFLIDSFKVKIKVRQAWREAQAEGST

SEQ ID NO: 878228 - protein, 508 aa, Homo sapiens; identical to SEQ ID NO: 878207

SEQ ID NO: 878229 - protein, 508 aa, Homo sapiens; identical to SEQ ID NO: 878207

SEQ ID NO: 878230 - protein, 508 aa, Homo sapiens; identical to SEQ ID NO: 878207

SEQ ID NO: 878231 - protein, 140 aa, Homo sapiens
WAVGIRHYVDSSIGEFAVDKGTEVIINLWALHHNEKEWHQPDQFMPERFLNPAGTQLISPSVSYLPFGAGPRSCIGEILARQELFLIMAWLLQRFDLEVPDDGQLPSLEGIPKVVFLIDSFKVKIKVRQAWREAQAEGST

SEQ ID NO: 878232 - protein, 219 aa, Homo sapiens
MESQEPTESSQNGKQYIISEELISEGKWVKLEKTTYMDPTGKTRTWESVKRTTRKEQTADGVAVIPVLQRTLHYECIVLVKQFRPPMGGYCIEFPAGLIDDGETPEAAALRELEEETGYKGDIAECSPAVCMDPGLSNCTIHIVTVTINGDDAENARPKPKPGDGEFVEVISLPKNDLLQRLDALVAEEHLTVDARVYSYALALKHANAKPFEVPFLKF

SEQ ID NO: 878233 - protein, 219 aa, Homo sapiens; identical to SEQ ID NO: 878232

SEQ ID NO: 878234 - protein, 219 aa, Homo sapiens; identical to SEQ ID NO: 878232

SEQ ID NO: 878235 - protein, 189 aa, Homo sapiens
MESQEPTESSQNGKQYIISEELISEGKWVKLEKTTYMDPTGKTRTWESVKRTTRKEQTADGVAVIPVLQRTLHYECIVLVKQFRPPMGGYCIEFPAGLIDDGETPEAAALRELEEETGYKGDIAECSPAVCMDPGLSNCTIHIVTVTINGDDAENARPKPKPGDGEFVEVISLPKNDLLQRLDGPPAAP

SEQ ID NO: 878236 - protein, 201 aa, Homo sapiens
MESQEPTESSQNGKQYIISEELISEGKWVKLEKTTYMDPTGKTRTWESVKRTTRKEQTADGVAVIPVLQRTLHYECIVLVKQFRPPMGGYCIEFPAGLIDDGETPEAAALRELEEETGYKGDIAECSPAVCMDPGLSNCTIHIVTVTINGDDAALPKNDLLQRLDALVAEEHLTVDARVYSYALALKHANAKPFEVPFLKF

SEQ ID NO: 878237 - protein, 219 aa, Homo sapiens; identical to SEQ ID NO: 878232

SEQ ID NO: 878238 - protein, 219 aa, Homo sapiens; identical to SEQ ID NO: 878232

SEQ ID NO: 878239 - protein, 238 aa, Homo sapiens
MESQEPTESSQNGKQYIISEELISEGKWVKLEKTTYMDPTGKTRTWESVKRTTRKEQTADGRSANLFQPFRKEVSTCDLGVAVIPVLQRTLHYECIVLVKQFRPPMGGYCIEFPAGLIDDGETPEAAALRELEEETGYKGDIAECSPAVCMDPGLSNCTIHIVTVTINGDDAENARPKPKPGDGEFVEVISLPKNDLLQRLDALVAEEHLTVDARVYSYALALKHANAKPFEVPFLKF

SEQ ID NO: 878240 - protein, 234 aa, Homo sapiens [sequence omitted]

SEQ ID NO: 878241 - protein, 234 aa, Homo sapiens [sequence omitted]

SEQ ID NO: 878242 - protein, 135 aa, Homo sapiens
GQVSWATWLSPAGLIDDGETPEAAALRELEEETGYKGDIAECSPAVCMDPGLSNCTIHIVTVTINGDDAENARPKPKPGDGEFVEVISLPKNDLLQRLDALVAEEHLTVDARVYSYALALKHANAKPFEVPFLKF

SEQ ID NO: 878243 - protein, 182 aa, Homo sapiens
MESQEPTESSQNGKQYIISEELISEGKWVKLEKTTYMDPTGKTRTWESVKRTTRKEQTADGVAVIPVLQRTLHYECIVLVKQFRPPMGGYCIEFPAGLIDDGETPEAAALRELEEETGYKGDIAECSPAVCMDPGLSNCTIHIVTVTINGDDAENARPKPKPGDGQGMEVCSATPGGRACMT

SEQ ID NO: 878244 - protein, 182 aa, Homo sapiens; identical to SEQ ID NO: 878243

SEQ ID NO: 878245 - protein, 245 aa, Homo sapiens
  misc_feature (123)..(126): Xaa can be any naturally occurring amino acid
  misc_feature (128)..(128): Xaa can be any naturally occurring amino acid
  misc_feature (143)..(143): Xaa can be any naturally occurring amino acid
  misc_feature (147)..(147): Xaa can be any naturally occurring amino acid
  misc_feature (149)..(149): Xaa can be any naturally occurring amino acid
  misc_feature (151)..(151): Xaa can be any naturally occurring amino acid
  misc_feature (153)..(153): Xaa can be any naturally occurring amino acid
  misc_feature (158)..(158): Xaa can be any naturally occurring amino acid
  misc_feature (160)..(160): Xaa can be any naturally occurring amino acid
  misc_feature (162)..(163): Xaa can be any naturally occurring amino acid
  misc_feature (166)..(166): Xaa can be any naturally occurring amino acid
  misc_feature (170)..(172): Xaa can be any naturally occurring amino acid
  misc_feature (177)..(178): Xaa can be any naturally occurring amino acid
  misc_feature (181)..(181): Xaa can be any naturally occurring amino acid
  misc_feature (184)..(184): Xaa can be any naturally occurring amino acid
  misc_feature (187)..(188): Xaa can be any naturally occurring amino acid
  misc_feature (190)..(191): Xaa can be any naturally occurring amino acid
  misc_feature (195)..(195): Xaa can be any naturally occurring amino acid
  misc_feature (197)..(199): Xaa can be any naturally occurring amino acid
  misc_feature (201)..(201): Xaa can be any naturally occurring amino acid
  misc_feature (204)..(205): Xaa can be any naturally occurring amino acid
  misc_feature (207)..(207): Xaa can be any naturally occurring amino acid
  misc_feature (209)..(210): Xaa can be any naturally occurring amino acid
  misc_feature (215)..(217): Xaa can be any naturally occurring amino acid
  misc_feature (222)..(222): Xaa can be any naturally occurring amino acid
MESQEPTESSQNGKQYIISEELISEGKWVKLEKTTYMDPTGKTRTWESVKRTTRKEQTADGVAVIPVLQRTLHYECIVLVKQFRPPMGGYCIEFPAGLIDDGETPEAAALRELEEETGYKGDXXXXKXKIKKKKKKKKKKKKXIKNXKXGXEXKKKKXKXKXXKGXFVEXXXPPPTXXPQXPDXLGXXGXXPVDXRXXXPXPPXXPXNXXPFGVXXXFFYVXLFFTGHFCKRDHQAFFTKTLYST

SEQ ID NO: 878246 - protein, 219 aa, Homo sapiens
MESQEPTESSQNGKQYIISEELISEGKWVKLEKTTYMDPTGKTSVWDGTFSAFPSTVFFSLYGLTLGGSRESYAKRTWESVKRTTRKEQTADGVAVIPVLQRTLHYECIVLVKQFRPPMGGYCIEFPAGLIDDGETPEAAALRELEEETGYKGDIAECSPAVCMDPGLSNCTIHIVTVTINGDDAENARPKPKPGDGMCVSAVMKVVWLHYVSWNLLLV

SEQ ID NO: 878247 - protein, 219 aa, Homo sapiens; identical to SEQ ID NO: 878232

SEQ ID NO: 878248 - protein, 216 aa, Homo sapiens
MESQEPTESSQNGKQYIISEELISEGKWVKLEKTTYMDPTGKTRTWESVKRTTRKEQTADGVAVIPVLQRTLHYECIVLVKQFRPPMGGYCIEFPAGLIDDGETPEAAALRELEEETGYKGDIAECSPAVCMDPGLSNCTIHIVTVTINGDDAENARPKPKPGDGEFVEVISLPKNDLLQRLDALVAEEHLTVDARVYSYALALKHANAKPFEVPF

SEQ ID NO: 878249 - protein, 219 aa, Homo sapiens; identical to SEQ ID NO: 878232

SEQ ID NO: 878250 - protein, 216 aa, Homo sapiens; identical to SEQ ID NO: 878248

SEQ ID NO: 878251 - protein, 133 aa, Homo sapiens
MGGYCIEFPAGLIDDGETPEAAALRELEEETGYKGDIAECSPAVCMDPGLSNCTIHIVTVTINGDDAENARPKPKPGDGEFVEVISLPKNDLLQRLDALVAEEHLTVDARVYSYALALKHANAKPFEVPFLKF

SEQ ID NO: 878252 - protein, 232 aa, Homo sapiens
MESQEPTESSQNGKQYIISEELISEGKWVKLEKTTYMDPTGKTRRNKEKTTTLLILRTWESVKRTTRKEQTADGVAVIPVLQRTLHYECIVLVKQFRPPMGGYCIEFPAGLIDDGETPEAAALRELEEETGYKGDIAECSPAVCMDPGLSNCTIHIVTVTINGDDAENARPKPKPGDGEFVEVISLPKNDLLQRLDALVAEEHLTVDARVYSYALALKHANAKPFEVPFLKF

SEQ ID NO: 878253 - protein, 186 aa, Homo sapiens
MESQEPTESSQNGKQYIISEELISEGKWVKLEKTTYMDPTGKTRTWESVKRTTRKEQTADGVAVIPVLQRTLHYECIVLVKQFRPPMGGYCIEFPAGLIDDGETPEAAALRELEEETGYKGDIAECSPAVCMDPGLSNCTIHIVTVTINGDDAENARPKPKPGDGEFVEVISLPKNDLLQRLDETL

SEQ ID NO: 878254 - protein, 232 aa, Homo sapiens; identical to SEQ ID NO: 878252

SEQ ID NO: 878255 - protein, 187 aa, Homo sapiens
MESQEPTESSQNGKQYIISEELISEGKWVKLEKTTYMDPTGKTRTWESVKRTTRKEQTADGVAVIPVLQRTLHYECIVLVKQFRPPMGGYCIEFPAGLIDDGETPEAAALRELEEETGYKGDIAECSPAVCMDPGLSNCTIHIVTVTINGDDAENARPKPKPGDGMCVSAVMKVVWLHYVSWNLLLV

SEQ ID NO: 878256 - protein, 216 aa, Homo sapiens; identical to SEQ ID NO: 878248

SEQ ID NO: 878257 - protein, 80 aa, Homo sapiens
GVSNRGKPVTAQNLFGEEKKKGKGTTSAWCVQPRGVSQAAAGHASRRPRGKLGIGGKLWIGEEEPGLLRVKKAGNTTAKC

SEQ ID NO: 878258 - protein, 113 aa, Homo sapiens
KLPARETRRFGAAAVSSGAPTGLCAGVPPPAVSFILLSHPTIYLNGYKVHVISLSTLSILAHCILDFKISDAKYADTFVEEIWALSICKIFVGRFCLVLLTDVLLFFMARENY

SEQ ID NO: 878259 - protein, 160 aa, Homo sapiens [sequence omitted]

SEQ ID NO: 878260 - protein, 113 aa, Homo sapiens; identical to SEQ ID NO: 878258

SEQ ID NO: 878261 - protein, 430 aa, Homo sapiens
MCGSALAFFTAAFVCLQNDRRGPASFLWAAWVFSLVLGLGQGEDNRCASSNAASCARCLALGPECGWCVQEDFISGGSRSERCDIVSNLISKGCSVDSIEYPSVHVIIPTENEINTQVTPGEVSIQLRPGAEANFMLKVHPLKKYPVDLYYLVDVSASMHNNIEKLNSVGNDLSRKMAFFSRDFRLGFGSYVDKTVSPYISIHPERIHNQCSDYNLDCMPPHGYIHVLSLTENITEFEKAVHRQKISGNIDTPEGGFDAMLQAAVCESHIGWRKEAKRLLLVMTDQTSHLALDSKLAGIVVPNDGNCHLKNNVYVKSTTMEHPSLGQLSEKLIDNNINVIFAVQGKQFHWYKDLLPLLPGTIAGEIESKAANLNNLVVEAYQKLISEVKVQVENQVQGIYFNITAICPDGSRKPGMEGCRNVTSNDEVCG

SEQ ID NO: 878262 - protein, 769 aa, Homo sapiens
MCGSALAFFTAAFVCLQNDRRGPASFLWAAWVFSLVLGLGQGEDNRCASSNAASCARCLALGPECGWCVQEDFISGGSRSERCDIVSNLISKGCSVDSIEYPSVHVIIPTENEINTQVTPGEVSIQLRPGAEANFMLKVHPLKKYPVDLYYLVDVSASMHNNIEKLNSVGNDLSRKMAFFSRDFRLGFGSYVDKTVSPYISIHPERIHNQCSDYNLDCMPPHGYIHVLSLTENITEFEKAVHRQKISGNIDTPEGGFDAMLQAAVCESHIGWRKEAKRLLLVMTDQTSHLALDSKLAGIVVPNDGNCHLKNNVYVKSTTMEHPSLGQLSEKLIDNNINVIFAVQGKQFHWYKDLLPLLPGTIAGEIESKAANLNNLVVEAYQKLISEVKVQVENQVQGIYFNITAICPDGSRKPGMEGCRNVTSNDEVLFNVTVTMKKCDVTGGKNYAIIKPIGFNETAKIHIHRNCSCQCEDNRGPKGKCVDETFLDSKCFQCDENKCHFDEDQFSSESCKSHKDQPVCSGRGVCVCGKCSCHKIKLGKVYGKYCEKDDFSCPYHHGNLCAGHGECEAGRCQCFSGWEGDRCQCPSAAAQHCVNSKGQVCSGRGTCVCGRCECTDPRSIGRFCEHCPTCYTACKENWNCMQCLHPHNLSQAILDQCKTSCALMEQQHYVDQTSECFSSPSYLRIFFIIFIVTFLIGLLKVLIIRQVILQWNSNKIKSSSDYRVSASKKDKLILQSVCTRAVTYRREKPEEIKMDISKLNAHETFRCNF

SEQ ID NO: 878263 - protein, 2234 aa, Homo sapiens
MCGSALAFFTAAFVCLQNDRRGPASFLWAAWVFSLVLGLGQGEDNRCASSNAASCARCLALGPECGWCVQEDFISGGSRSERCDIVSNLISKGCSVDSIEYPSVHVIIPTENEINTQVTPGEVSIQLRPGAEANFMLKVHPLKKYPVDLYYLVDVSASMHNNIEKLNSVGNDLSRKMAFFSRDFRLGFGSYVDKTVSPYISIHPERIHNQCSDYNLDCMPPHGYIHVLSLTENITEFEKAVHRQKISGNIDTPEGGFDAMLQAAVCESHIGWRKEAKRLLLVMTDQTSHLALDSKLAGIVVPNDGNCHLKNNVYVKSTTMEHPSLGQLSEKLIDNNINVIFAVQGKQFHWYKDLLPLLPGTIAGEIESKAANLNNLVVEAYQKLISEVKVQVENQVQGIYFNITAICPDGSRKPGMEGCRNVTSNDEVLFNVTVTMKKCDVTGGKNYAIIKPIGFNETAKIHIHRNCSCQCEDNRGPKGKCVDETFLDSKCFQCDENKCHFDEDQFSSESCKSHKDQPVCSGRGVCVCGKCSCHKIKLGKVYGKYCEKDDFSCPYHHGNLCAGHGECEAGRCQCFSGWEGDRCQCPSAAAQHCVNSKGQVCSGRGTCVCGRCECTDPRSIGRFCEHCPTCYTACKENWNCMQCLHPHNLSQAILDQCKTSCALMEQQHYVDQTSECFSSPSYLRIFFIIFIVTFLIGLLKVLIIRQVILQWNSNKIKSSSDYRVSASKKDKLILQSVCTRAVTYRREKPEEIKMDISKLNAHETFRCNFYKKIFKHFNGKLELLIIAPKDYNFKSHRRRQIAHGHASCWLYTRTKTDKYPHHDVTHIAADFFREKCVLLLFETSVVVALYCNDITYLDQHENVDPLKSTDYTLQVPVIPTLPRENNAVREFSIVSLQGYSNPCTGHVRKKIIWQVYSKVAKHFNSWWLNRQEQLDEEMIRVSLFQEVNRYNLNLKRLLLFKVCSFMHVCLWFAYFCKMDTNSSISLLFAFMFCFLFYRISLCMSQMTGLIKCYSYYCHKKLIIQCHFIRILVLKAEMLIGDTVKYHQNLNSFIVHKCGVLYPLPGKLKGLFGHFIYLIINSQDELEILPQAKYHILNVFLDFDCSRYQHFLNEKLYYLLPSRQPKDVLSQNHSNTFLPEFIKVQNWRIDDILEISFFFFFFFFGDGVSLLSPRLKCNGAIRVHCNLCLPGSSSSPASASWVAGITGIHHRAQLIFVFLVETGFCHVGQVDLKLLTSGDLPSSASQSVGITGMSHHARLLILLFSEFRELSLRKLKRFLRKHSSDKVATLERSFYLLIVRPVFIAQYHATSGIFKIFNWQMFFNVIYSCLKCMRKVQSKIERNNSNWIVHNQLPVFHANQLLKRLKYGIPTGEFLRTISLYEQCSLEFSSAQLETLIHGPCALSSPMEIYLHLPYPYGLSLILLARSLTVLCGYTVLPMTTKESIQKYLFFYNKLPRFAVFQHLSESTRYCILMKTNPISYSTLKRTEKPIISCSGANKHSSSVRCPLQPSNFNANLNCISFLKGEIDIIQYCESLDKKPLITKNNVKIGFSSLIHITFFLKRKMDGCLTTLQKKKVKIAIKMMTIFEMNIMIFMNNKQISVWNELSKNEYNKMKSLKIQSLYFFYTLTCCTNFIVDQGCYHRKGQTSLYGNSVLDDDCGYACKVLCLSFLFLLKKLIFKDCRACILLEYLISSCVMICEMRINICLVRIELNGKGTQGTLRLNNVCKESLFSTNMATGAFGDSLILNTINEILNLLTELRTCTTLLVLQHFCALKYVMIYKCAIHTLQHNICFVMHFISLGTPLHCSAHVFINICYIFGNLLIFIEVIDFSGGLNIKIKKKSKIKHSRYLWRQFSKTQHENLWMHEMQILQRMNLKYIFNIYLISTEDIFMQDKSQPSDTEIYYDEIMKNFLCRIIFFLEPGRVIRLKGFFFLFLLLFFPLTLPKRFPKASSLISLIGKITEFNGIMKFFIFQTSLIDLKAHLSLCPRTKTDPLKSKNSKFSQLFELLFILKDLEYICFHKSIKWNIVTWELNHVQIAFCYVDSIFNLQLSLFILTSRTPFYAMQTTEIIANILSNNFPFLLKFLYSKFLCITDYTYPYLYFIDSKTSLFQFNISEIVTFLATVGTSDAVFKIMLESNITLIQLYLNVYASRQILFSYKGFESPFMTKYEGENLRTIESRTTQHGAKLIISSDPAYLEFTKALSGPHLYFTCVRMISANPNLTNKKWVGMSTFH

SEQ ID NO: 878264 - protein, 2243 aa, Homo sapiens
MCGSALAFFTAAFVCLQNDRRGPASFLWAAWVFSLVLGLGQGEDNRCASSNAASCARCLALGPECGWCVQEDFISGGSRSERCDIVSNLISKGCSVDSIEYPSVHVIIPTENEINTQVTPGEVSIQLRPGAEANFMLKVHPLKKYPVDLYYLVDVSASMHNNIEKLNSVGNDLSRKMAFFSRDFRLGFGSYVDKTVSPYISIHPERIHNQCSDYNLDCMPPHGYIHVLSLTENITEFEKAVHRQKISGNIDTPEGGFDAMLQAAVCESHIGWRKEAKRLLLVMTDQTSHLALDSKLAGIVVPNDGNCHLKNNVYVKSTTMEHPSLGQLSEKLIDNNINVIFAVQGKQFHWYKDLLPLLPGTIAGEIESKAANLNNLVVEAYQKLISEVKVQVENQVQGIYFNITAICPDGSRKPGMEGCRNVTSNDEVLFNVTVTMKKCDVTGGKNYAIIKPIGFNETAKIHIHRNCSCQCEDNRGPKGKCVDETFLDSKCFQCDENKCHFDEDQFSSESCKSHKDQPVCSGRGVCVCGKCSCHKIKLGKVYGKYCEKDDFSCPYHHGNLCAGHGECEAGRCQCFSGWEGDRCQCPSAAAQHCVNSKGQVCSGRGTCVCGRCECTDPRSIGRFCEHCPTCYTACKENWNCMQCLHPHNLSQAILDQCKTSCALMEQQHYVDQTSECFSSPSYLRIFFIIFIVTFLIGLLKVLIIRQVILQWNSNKIKSSSDYRVSASKKDKLILQSVCTRAVTYRREKPEEIKMDISKLNAHETFRCNFYKKIFKHFNGKLELLIIAPKDYNFKSHRRRQIAHGHASCWLYTRTKTDKYPHHDVTHIAADFFREKCVLLLFETSVVVALYCNDITYLDQHENVDPLKSTDYTLQVPVIPTLPRENNAVREFSIVSLQGYSNPCTGHVRKKIIWQVYSKVAKHFNSWWLNRQEQLDEEMIRVSLFQEVNRYNLNLKRLLLFKVCSFMHVCLWFAYFCKMDTNSSISLLFAFMFCFLFYRISLCMSQMTGLIKCYSYYCHKKLIIQCHFIRILVLKAEMLIGDTVKYHQNLNSFIVHKCGVLYPLPGKLKGLFGHFIYLIINSQDELEILPQAKYHILNVFLDFDCSRYQHFLNEKLYYLLPSRQPKDVLSQNHSNTFLPEFIKVQNWRIDDILEISFFFFFFFFGDGVSLLSPRLKCNGAIRVHCNLCLPGSSSSPASASWVAGITGIHHRAQLIFVFLVETGFCHVGQVDLKLLTSGDLPSSASQSVGITGMSHHARLLILLFSEFRELSLRKLKRFLRKHSSDKVATLERSFYLLIVRPVFIAQYHATSGIFKIFNWQMFFNVIYSCLKCMRKVQSKIERNNSNWIVHNQLPVFHANQLLKRLKYGIPTGEFLRTISLYEQCSLEFSSAQLETLIHGPCALSSPMEIYLHLPYPYGLSLILLARSLTVLCGYTVLPMTTKESIQKYLFFYNKLPRFAVFQHLSESTRYCILMKTNPISYSTLKRTEKPIISCSGANKHSSSVRCPLQPSNFNANLNCISFLKGEIDIIQYCESLDKKPLITKNNVKIGFSSLIHITFFLKRKMDGCLTTLQKKKVKIAIKMMTIFEMNIMIFMNNKQISVWNELSKNEYNKMKSLKIQSLYFFYTLTCCTNFIVDQGCYHRKGQTSLYGNSVLDDDCGYACKVLCLSFLFLLKKLIFKDCRACILLEYLISSCVMICEMRINICLVRIELNGKGTQGTLRLNNVCKESLFSTNMATGAFGDSLILNTINEILNLLTELRTCTTLLVLQHFCALKYVMIYKCAIHTLQHNICFVMHFISLGTPLHCSAHVFINICYIFGNLLIFIEVIDFSGGLKNSLKICLCLKCSVYLWFIKIKKKSKIKHSRYLWSNFPKLNIKICGCMRCNPSKKNLKYIFNIYLISTEDIFMQDKSQPSDTEIYYDEIMKNFLCRIIFFLEPGRVIRLKGFFFLFLLLFFPLTLPKRFPKASSLISLIVKNNEFNGINEVLHFQTSLIDLKAHLSLCPWTKTDPLKSKNSKFSQLFELLFILKDLEYICFHKSIKGNIVTWELNHVQIAFCYVDSIFNLQLSLFILTSRTPFYAMQTTEIIANILSNNFPFLLKFLYSKFLCITDYTYPYLYFIDSKTSLFQFNISEIVTFLATVGTSDAVFKIMLESNITLIQLYLNVYASRQILFSYKGFESPFMTKYEGENLRTIESRTTQHGAKLIISSDPAYLEFTKALSGPHLYFTGVRMISANPNLTNKNG

SEQ ID NO: 878265 - protein, 1090 aa, Homo sapiens
MSPRLKCNGAIRVHCNLCLPGSSSSPASASWVAGITGIHHRAQLIFVFLVETGFCHVGQVDLKLLTSGDLPSSASQSVGITGMSHHARLLILLFSEFRELSLRKLKRFLRKHSSDKVATLERSFYLLIVRPVFIAQYHATSGIFKIFNWQMFFNVIYSCLKCMRKVQSKIERNNSNWIVHNQLPVFHANQLLKRLKYGIPTGEFLRTISLYEQCSLEFSSAQLETLIHGPCALSSPMEIYLHLPYPYGLSLILLARSLTVLCGYTVLPMTTKESIRNIFFFIINFQDLLSSSTSVKVLDDCILMKTNPISYSTLKRTEKPIISCSGANKHSSSVRCPLQPSNFNANLNCISFLKGEIDIIQYCESLDKKPLITKNNVKIGFSSLIHITFFLKRKMDGCLTTLQKKKVKIAIKMMTIFEMNIMIFMNNKQISVWNELSKKEYNKMKSLKIQSLYFFYTLTCCTNFIVDQGCYHRKGQTSLYGNSVLDDDCGYACKVLCLSFLFLLKKLIFKDCRACILLEYLISSCVMICEMRINICLVRIELNGKGTQGTLRLNNVCKESLFSTNMATGAFGDSLILNTINEILNCYRIENLNNTFSTAAFLCPKVCNDFINVPYIHYNITFALLCILFLWGHHCTAVHTIYKHLLYFWKLANIYKVIDFSGGLKNSLKICLCLKCSVYLWFIKIKKKSKIKHSRYLWSNFPKLNIKICGCMRCNPSKKNLKYIFNIYLISTEDIFMQDKSQPSDTEIYYDEIMKNFLCRIIFFLEPGRVIRLKGFFFLFLLLFFPLTLPKRFPKASSLISLIVKNNEFNGIMKVLHFQTSLIDLKAHLSLCPWTKTDPLKSKNSKFSQLFELLFILKDLEYICFHKSIKWNIVTWELNHVQIAFCYVDSIFNLQLSLFILTSRTPFYAMQTTEIIANILSNNFPFLLKFLYSKFLCITDYTYPYLYFIDSKTSLFQFNISEIVTFLATVGTSDAVFKIMLESNITLIQLYLNVYASRQILFSYKGFESPFMTKYEGEIYGQLSHAQLNMEPNCLSAQIPHILSLQKLFQVPIYTLRECEVISANPNLLTRMGRYVYVSLTNFYYFYSII

SEQ ID NO: 878266 - protein, 324 aa, Homo sapiens
MCGSALAFFTAAFVCLQNDRRGPASFLWAAWVFSLVLGLGQGEDNRCASSNAASCARCLALGPECGWCVQEDFISGGSRSERCDIVSNLISKGCSVDSIEYPSVHVIIPTENEINTQVTPGEVSIQLRPGAEANFMLKVHPLKKYPVDLYYLVDVSASMHNNIEKLNSVGNDLSRKMAFFSRDFRLGFGSYVDKTVSPYISIHPERIHNQCSDYNLDCMPPHGYIHVLSLTENITEFEKAVHRQKISGNIDTPEGGFDAMLQAAVCESHIGWRKEAKRLLLVMTDQTSHLALDSKLAGIVVPNDGNCHLKNNVYVKSTTMVMQQ

SEQ ID NO: 878267 - protein, 222 aa, Homo sapiens
MCGSALAFFTAAFVCLQNDRRGPASFLWAAWVFSLVLGLGQGEDNRCASSNAASCARCLALGPECGWCVQEDFISGGSRSERCDIVSNLISKGCSVDSIEYPSVHVIIPTENEINTQVTPGEVSIQLRPGAEANFMLKVHPLKKYPVDLYYLVDVSASMHNNIEKLNSVGNDLSRKMAFFSRDFRLGFGSYVDKTVSPYISIHPERIHNQCRYLGFDVDMLN

SEQ ID NO: 878268 - protein, 2243 aa, Homo sapiens; identical to SEQ ID NO: 878264

SEQ ID NO: 878269 - protein, 2243 aa, Homo sapiens; identical to SEQ ID NO: 878264

SEQ ID NO: 878270 - protein, 1080 aa, Homo sapiens
MFHSCHPGWSAMAQLGFTATSASRVQAVLLPQPPEVAGITGIHHRAQLIFVFLVETGFCHVGQVDLKLLTSGDLPSSASQSVGITGMSHHARLLILLFSEFRELSLRKLKRFLRKHSSDKVATLERSFYLLIVRPVFIAQYHATSGIFKIFNWQMFFNVIYSCLKCMRKVQSKIERNNSNWIVHNQLPVFHANQLLKRLKYGIPTGEFLRTISLYEQCSLEFSSAQLETLIHGPCALSSPMEIYLHLPYPYGLSLILLARSLTVLCGYTVLPMTTKESIRNIFFFIINFQDLLSSSTSVKVLDDCILMKTNPISYSTLKRTEKPIISCSGANKHSSSVRCPLQPSNFNANLNCISFLKGEIDIIQYCESLVIKKPLITKNNVKIGFSSLIHITFFLKRKMDGCLTTLQKKKVKIAIKMMTIFEMNIMIFMNNKQISVWNELSKKEYNKMKSLKIQSLYFFIPSLVCTNFIVDQGCYHEEGTNFLVGNSVLDDDCGYACKVLCLSFLFLLKKLIFKDCRACILLEYLISSCVMICEMRINICLVRIELNGKGTQGTLRLNNVCKESLFSTNMATGAFGDSLILNTINEILNCYRIENLNNTFSTAAFLCPKVCNDFINVPYIHYNITFALLCILFLWGHHCTAVQHVFINICYIFGNLLIFIEVIDFSGGLKNVTKNLIMSYNVQFIFGLLKLKKNLRLNTVDISGGNFPKLNIKICGCMRCNPSKNESEIYFNIYLISTEDIFMQDKSQPSDTEIYYDEIMKNFLCRIIFFLEPGRVDRLKGFFFLFLLLFFPLTLPKRFPKASSLISLIVKNNEFNGINEVLHFQTSLIDLKAHLSLCPWTKTDPLKSKNSKFSQLFELLFILKDLEYICFHKSIKGNIVTWELNHVQIAFCYVDSIFNLQLSLFILTSRTPFYAMQTTEIIANILSNNFPFLLKFLYSKFLCITDYTYPYLYFIDSKTSLFQFNISEIVTFLATVGTSDAVFKIMLESNITLIQLYLNVYASRQILFSYKGFESPFMTKYEGENLRTIESRTTQHGAKLIISSDPAYLEFTKALSGPHLYFTCVRMISANPNLTNKNG

SEQ ID NO: 878271 - protein, 769 aa, Homo sapiens; identical to SEQ ID NO: 878262

SEQ ID NO: 878272 - protein, 224 aa, Homo sapiens
MPRPGSAQRWAAVAGRWGCRLLALLLLVPGPGGASEITFELPDNAKQCFYEDIAQGTKCTLEFQVITGGHYDVDCRLEDPDGKVLYKEMKKQYDSFTFTASKNGTYKFCFSNEFSTFTHKTVYFDFQVGEDPPLFPSENRVSALTQMESACVSIHEALKSVIDYQTHFRLREAQGRSRAEDLNTRVAYWSVGEALILLVVSIGQVFLLKSFFSDKRTTTTRVGS

SEQ ID NO: 878273 - protein, 224 aa, Homo sapiens; identical to SEQ ID NO: 878272

SEQ ID NO: 878274 - protein, 225 aa, Homo sapiens
MPRPGSAQRWAAVAGRWGCRLLALLLLVPGPGGASEITFELPDNAKQCFYEDIAQGTKCTLEFQVITGGHYDVDCRLEDPDGKVLYKEMKKQYDSFTFTASKNGTYKFCFSNEFSTFTHKTVYFDFQVGEDPPLFPSENRVSALTQMESACVSIHEALKSVIDYQTHFRLREAQGRSRAEDLNTRVAYWSVGEALILLVVSIGQVFLLKSFFSDTIATVILLSSN

SEQ ID NO: 878275 - protein, 123 aa, Homo sapiens
MCLPAAAVLMSCCMHLHPAVYACSVLMCLPACASLCDCLLGLVLSCCMLLVCCDLYCCVPCCVCVACACICTLTMLLVMPCDPVLAAYLRSLFWMAFLDKLANACCYLQSDHTGSCGQPKMQP

SEQ ID NO: 878276 - protein, 136 aa, Homo sapiens
MPRPGSAQRWAAVAGRWGCRLLALLLLVPGPGGASEITFELPDNAKQCFYEDIAQGTKCTLEFQVITGGHYDVDCRLEDPDGKVLYKEMKKQYDSFTIQDDSKLYRYLKLFCCFFFFLIATAFLPCLSSLPKSDEF

SEQ ID NO: 878277 - protein, 267 aa, Homo sapiens
ALSRRRFRKRRPAGATFIPLHPPRTRSVVVAPARRGQAPRSAALETGTESIMGSTVPRSASVLLLLLLLRRAEQPCGAEITFELPDNAKQCFYEDIAQGTKCTLEFQVITGGHYDVDCRLEDPDGKVLYKEMKKQYDSFTFTASKNGTYKFCFSNEFSTFTHKTVYFDFQVGEDPPLFPSENRVSALTQMESACVSIHEALKSVIDYQTHFRLREAQGRSRAEDLNTRVAYWSVGEALILLVVSIGQVFLLKSFFSDKRTTTTRVGS

SEQ ID NO: 878278 - protein, 172 aa, Homo sapiens
MPRPGSAQRWAAVAGRWGCRLLALLLLVPGPGGASEITFELPDNAKQCFYEDIAQGTKCTLEFQVITGGHYDVDCRLEDPDGKVLYKEMKKQYDSFTFTASKNGTYKFCFSNEFSTFTHKTVYFDFQVGEDPPLFPSENRVSALTQVNKKISNIMLVYLKGGKKHNLISCTN

SEQ ID NO: 878279 - protein, 224 aa, Homo sapiens; identical to SEQ ID NO: 878272

SEQ ID NO: 878280 - protein, 136 aa, Homo sapiens
MKKQYDSFTFTASKNGTYKFCFSNEFSTFTHKTVYFDFQVGEDPPLFPSENRVSALTQMESACVSIHEALKSVIDYQTHFRLREAQGRSRAEDLNTRVAYWSVGEALILLVVSIGQVFLLKSFFSDKRTTTTRVGS

SEQ ID NO: 878281 - protein, 224 aa, Homo sapiens; identical to SEQ ID NO: 878272

SEQ ID NO: 878282 - protein, 224 aa, Homo sapiens; identical to SEQ ID NO: 878272

SEQ ID NO: 878283 - protein, 404 aa, Homo sapiens
  misc_feature (235)..(237): Xaa can be any naturally occurring amino acid
  misc_feature (240)..(247): Xaa can be any naturally occurring amino acid
  misc_feature (249)..(250): Xaa can be any naturally occurring amino acid
  misc_feature (256)..(257): Xaa can be any naturally occurring amino acid
  misc_feature (259)..(262): Xaa can be any naturally occurring amino acid
  misc_feature (264)..(264): Xaa can be any naturally occurring amino acid
  misc_feature (267)..(267): Xaa can be any naturally occurring amino acid
  misc_feature (270)..(270): Xaa can be any naturally occurring amino acid
  misc_feature (275)..(276): Xaa can be any naturally occurring amino acid
  misc_feature (280)..(280): Xaa can be any naturally occurring amino acid
  misc_feature (282)..(284): Xaa can be any naturally occurring amino acid
  misc_feature (288)..(289): Xaa can be any naturally occurring amino acid
MPRPGSAQRWAAVAGRWGCRLLALLLLVPGPGGASEITFELPDNAKQCFYEDIAQGTKCTLEFQVITGGHYDVDCRLEDPDGKVLYKEMKKQYDSFTFTASKNGTYKFCFSNEFSTFTHKTVYFDFQVGEDPPLFPSENRVSALTQMESACVSIHEALKSVIDYQTHFRLREAQGRSRAEDLNTRVAYWHSVDTSPGYHESDSKKSEDLSLCNVAEHSNTTEGPTGKQEGAQSAXXXVPXXXXXXXXPXXPHTPPXXPXXXXPXTPXPPXRPPPXXPPNXPXXXPTSXXPFTELDDAVNGSAWTILLLTENFLRDTWCNFQFYTSLMNSVNRQHKYNSVIPMRPLNNPLPRERTPFALQTINALEEESRGFPTQVERIFQESVYKTQQTIWKETRNMVQRQFIA

SEQ ID NO: 878284 - protein, 518 aa, Homo sapiens
MAFWAGGSPSVVDYFPSEDFYRCGYCKNESGSRSNGMWAHSMTVQDYQDLIDRGWRRSGKYVYKPVMNQTCCPQYTIRCRPLQFQPSKSHKKVLKKMLKFLAKGEVPKGSCEDEPMDSTMDDAVAGDFALINKLDIQCDLKTLSDDIKESLESEGKNSKKEEPQELLQSQDFVGEKLGSGEPSHSVKVHTVPKPGKGADLSKPPCRKAKEIRKERKRLKLMQQNPAGELEGFQAQGHPPSLFPPKAKSNQPKSLEDLIFESLPENASHKLEVRVVRSSPPSSQFKATLLESYQVYKRYQMVIHKNPPDTPTESQFTRFLCSSPLEAETPPNGPDCGYGSFHQQYWLDGKIIAVGVIDILPNCVSSVYLYYDPDYSFLSLGVYSALREIAFTRQLHEKTSQLSYYYMGFYIHSCPKMKYKGQYRPSDLLCPETYVWVPIEQCLPSLENSKYCRFNQDPEAVDEDRSTEPDRLQVFHKRAIMPYGVYKKQQKDPSEEAAVLQYASLVGQKCSERMLLFRN

SEQ ID NO: 878285 - protein, 482 aa, Homo sapiens
MWAHSMTVQDYQDLIDRGWRRSGKYVYKPVMNQTCCPQYTIRCRPLQFQPSKSHKKVLKKMLKFLAKGEVPKGSCEDEPMDSTMDDAVAGDFALINKLDIQCDLKTLSDDIKESLESEGKNSKKEEPQELLQSQDFVGEKLGSGEPSHSVKVHTVPKPGKGADLSKPPCRKAKEIRKERKRLKLMQQNPAGELEGFQAQGHPPSLFPPKAKSNQPKSLEDLIFESLPENASHKLEVRVVRSSPPSSQFKATLLESYQVYKRYQMVIHKNPPDTPTESQFTRFLCSSPLEAETPPNGPDCGYGSFHQQYWLDGKIIAVGVIDILPNCVSSVYLYYDPDYSFLSLGVYSALREIAFTRQLHEKTSQLSYYYMGFYIHSCPKMKYKGQYRPSDLLCPETYVWVPIEQCLPSLENSKYCRFNQDPEAVDEDRSTEPDRLQVFHKRAIMPYGVYKKQQKDPSEEAAVLQYASLVGQKCSERMLLFRN

SEQ ID NO: 878286 - protein, 113 aa, Homo sapiens
MGFYIHSCPKMKYKGQYRPSDLLCPETYVWVPIEQCLPSLENSKYCRFNQDPEAVDEDRSTEPDRLQVFHKRAIMPYGVYKKQQKDPSEEAAVLQYASLVGQKCSERMLLFRN

SEQ ID NO: 878287 - protein, 518 aa, Homo sapiens; identical to SEQ ID NO: 878284

SEQ ID NO: 878288 - protein, 482 aa, Homo sapiens
MAFWAGGSPSVVDYFPSEDFYRCGYCKNESGSRSNGMWAHSMTVQDYQDLIDRGWRRSGKYVYKPVMNQTCCPQYTIRCRPLQFQPSKSHKKVLKKMLKFLAKGEVPKGSCEDEPMDSTMDDAVAGDFALINKLDIQCDLKTLSDDIKESLESEGKNSKKEEPQELLQSQDFVGEKLGSGEPSHSVKVHTVPKPGKGADLSKPPCRKAKEIRKERKRLKLMQQNPAGELEGFQAQGHPPSLFPPKAKSNQPKSLEDLIFESLPENASHKLEVRVVRSSPPSSQFKATLLESYQVYKRYQMVIHKNPPDTPTESQFTRFLCSSPLEAETPPNGPDCGYGSFHQQYWLDGKIIAVGVIDILPNCVSSVYLYYDPDYSFLSLGVYSALREIAFTRQLHEKTSQLSYYYMGFYIHSCPKMKYKGQYRPSDLLCPETYVWVPIEQCLPSLENSKYCRFNQDPEAAPSQTHRGSVLCILQSNQVDTQY

SEQ ID NO: 878289 - protein, 128 aa, Homo sapiens [sequence omitted]

SEQ ID NO: 878290 - protein, 517 aa, Homo sapiens
MAFWAGGSPSVVDYFPSEDFYRCGYCKNESGSRSNGMWAHSMTVQDYQDLIDRGWRRSGKYVYKPVMNQTCCPQYTIRCRPLQFQPSKSHKKVLKKMLKFLAKGEVPKGSCEDEPMDSTMDDAVAGDFALINKLDIQCDLKTLSDDIKESLESEGKNSKKEEPQELLQSQDFVGEKLGSGEPSHSVKVHTVPKPGKGADLSKPPCRKAKEIRKERKRLKLMQQNPAGELEGFQAQGHPPSLFPPKAKSNQPKSLEDLIFESLPENASHKLEVRLVPVSFEDPEFKSSFSQSFSLYVKYQVAIHQDPPDECGKTEQDSFAVHPVEAETPPNGPDCGYGSFHQQYWLDGKIIAVGVIDILPNCVSSVYLYYDPDYSFLSLGVYSALREIAFTRQLHEKTSQLSYYYMGFYIHSCPKMKYKGQYRPSDLLCPETYVWVPIEQCLPSLENSKYCRFNQDPEAVDEDRSTEPDRLQVFHKRAIMPYGVYKKQQKDPSEEAAVLQYASLVGQKCSERMLLFRN

SEQ ID NO: 878291 - protein, 521 aa, Homo sapiens
VGPSGPSRRPWRRWWNTRASGPATTAATCDSKEGKASCGMWAHSMTVQDYQDLIDRGWRRSGKYVYKPVMNQTCCPQYTIRCRPLQFQPSKSHKKVLKKMLKFLAKGEVPKGSCEDEPMDSTMDDAVAGDFALINKLDIQCDLKTLSDDIKESLESEGKNSKKEEPQELLQSQDFVGEKLGSGEPSHSVKVHTVPKPGKGADLSKPPCRKAKEIRKERKRLKLMQQNPAGELEGFQAQGHPPSLFPPKAKSNQPKSLEDLIFESLPENASHKLEVRVVRSSPPSSQFKATLLESYQVYKRYQMVIHKNPPDTPTESQFTRFLCSSPLEAETPPNGPDCGYGSFHQQYWLDGKIIAVGVIDILPNCVSSVYLYYDPDYSFLSLGVYSALREIAFTRQLHEKTSQLSYYYMGFYIHSCPKMKYKGQYRPSDLLCPETYVWVPIEQCLPSLENSKYCRFNQDPEAVDEDRSTEPDRLQVFHKRAIMPYGVYKKQQKDPSEEAAVLQYASLVGQKCSERMLLFRN

SEQ ID NO: 878292 - protein, 518 aa, Homo sapiens; identical to SEQ ID NO: 878284

SEQ ID NO: 878293 - protein, 343 aa, Homo sapiens
MAFWAGGSPSVVDYFPSEDFYRCGYCKNESGSRSNGMWAHSMTVQDYQDLIDRGWRRSGKYVYKPVMNQTCCPQYTIRCRPLQFQPSKSHKKVLKKMLKFLAKGEVPKGSCEDEPMDSTMDDAVAGDFALINKLDIQCDLKTLSDDIKESLESEGKNSKKEEPQELLQSQDFVGEKLGSGEPSHSVKVHTVPKPGKGADLSKPPCRKAKEIRKERKRLKLMQQNPAGELEGFQAQGHPPSLFPPKAKSNQPKSLEDLIFESLPENASHKLEVRLVPVSFEDPEFKSSFSQSFSLYVKYQVAIHQDPPDECGKTEIKKLLLGKLKRENRLNPGRRGCRELRWCH

SEQ ID NO: 878294 - protein, 445 aa, Homo sapiens
DRKRWDGTKNTRNSWQFELFPLLHLSFRLCKMGSRCLNPPPPAHSDTTGKDSFGNIRGAETGQGASACSVTSARVTCGAGSEPHSHRNPGISAQVGLAPSYGAARGRRRPLALQQSPQERRHVGWNSTRGLLPASLPGTASSQSASATASAALPLKVTGPLARNPTPPWTAAAALATRGQRPEKGLFPGPAPFSLGKRKRGRGRTWERRRRVSIETSTCFRPGCERLGAAAGANLSQLASSQRPLRERWVLYTIIMAAAGAPDGMEEPGMDTEAETVATEAPARPVNCLEAEAAAGAAAEDSGAARGSLQPAPAQPPGDPAAQASVSNGEDAGGGAGRELVDLKIIWNKTKHDVKFPLDSTGSELKQKIHSITGLPPAMQKVMYKGLVPEDKTLREIKVTSGAKIMVVGSTINDVLAVNTPKDAAQQDAKAEENKKEPLCRQKGP

SEQ ID NO: 878295 - protein, 564 aa, Homo sapiens
DRKRWDGTKNTRNSWQFELFPLLHLSFRLCKMGSRCLNPPPPAHSDTTGKDSFGNIRGAETGQGASACSVTSARVTCGAGSEPHSHRNPGISAQVGLAPSYGAARGRRRPLALQQSPQERRHVGWNSTRGLLPASLPGTASSQSASATASAALPLKVTGPLARNPTPPWTAAAALATRGQRPEKGLFPGPAPFSLGKRKRGRGRTWERRRRVSIETSTCFRPGCERLGAAAGANLSQLASSQRPLRERWVLYTIIMAAAGAPDGMEEPGMDTEAETVATEAPARPVNCLEAEAAAGAAAEDSGAARGSLQPAPAQPPGDPAAQASVSNGEDAGGGAGRELVDLKIIWNKTKHDVKFPLDSTGSELKQKIHSITGLPPAMQKVMYKGLVPEDKTLREIKVTSGAKIMVVGSTINDVLAVNTPKDAAQQDAKAEENKKEPLCRQKQHRKVLDKGKPEDVMPSVKGAQERLPTVPLSGMYNKSGGKVRLTFKLEQDQLWIGTKERTEKLPMGSIKNVVSEPIEGHEDYHMMAFQLGPTEASYYWVYWVPTQYVDAIKDTVLGKWQYF

SEQ ID NO: 878296 - protein, 441 aa, Homo sapiens
DRKRWDGTKNTRNSWQFELFPLLHLSFRLCKMGSRCLNPPPPAHSDTTGKDSFGNIRGAETGQGASACSVTSARVTCGAGSEPHSHRNPGISAQVGLAPSYGAARGRRRPLALQQSPQERRHVGWNSTRGLLPASLPGTASSQSASATASAALPLKVTGPLARNPTPPWTAAAALATRGQRPEKGLFPGPAPFSLGKRKRGRGRTWERRRRVSIETSTCFRPGCERLGAAAGANLSQLASSQRPLRERWVLYTIIMAAAGAPDGMEEPGMDTEAETVATEAPARPVNCLEAEAAAGAAAEDSGAARGSLQPAPAQPPGDPAAQASVSNGEDAGGGAGRELVDLKIIWNKTKHDVKFPLDSTGSELKQKIHSITGLPPAMQKVMYKGLVPEDKTLREIKVTSGAKIMVVGSTINDVLAVNTPKDAAQQDAIKDTVLGKWQYF

SEQ ID NO: 878297 - protein, 403 aa, Homo sapiens
DRKRWDGTKNTRNSWQFELFPLLHLSFRLCKMGSRCLNPPPPAHSDTTGKDSFGNIRGAETGQGASACSVTSARVTCGAGSEPHSHRNPGISAQVGLAPSYGAARGRRRPLALQQSPQERRHVGWNSTRGLLPASLPGTASSQSASATASAALPLKVTGPLARNPTPPWTAAAALATRGQRPEKGLFPGPAPFSLGKRKRGRGRTWERRRRVSIETSTCFRPGCERLGAAAGANLSQLASSQRPLRERWVLYTIIMAAAGAPDGMEEPGMDTEAETVATEAPARPVNCLEAEAAAGAAAEDSGAARGSLQPAPAQPPGDPAAQASVSNGEDAGGGAGRELVDLKIIWNKTKHDVKFPLDSTGSELKQKIHSITGLPPAMQKVMYKGLVPEDKTLRGDVLSPLA

SEQ ID NO: 878298 - protein, 564 aa, Homo sapiens; identical to SEQ ID NO: 878295

SEQ ID NO: 878299 - protein, 520 aa, Homo sapiens
DRKRWDGTKNTRNSWQFELFPLLHLSFRLCKMGSRCLNPPPPAHSDTTGKDSFGNIRGAETGQGASACSVTSARVTCGAGSEPHSHRNPGISAQVGLAPSYGAARGRRRPLALQQSPQERRHVGWNSTRGLLPASLPGTASSQSASATASAALPLKVTGPLARNPTPPWTAAAALATRGQRPEKGLFPGPAPFSLGKRKRGRGRTWERRRRVSIETSTCFRPGCERLGAAAGANLSQLASSQRPLRERWVLYTIIMAAAGAPDGMEEPGMDTEAETVATEAPARPVNCLEAEAAAGAAAEDSGAARGSLQPAPAQPPGDPAAQASVSNGEDAGGGAGRELVDLKIIWNKTKHDVKFPLDSTGSELKQKIHSITGLPPAMQKVMYKGLVPEDKTLREIKVTSGAKIMVVGSTINDVLAVNTPKDAAQQDAKAEENKKEPLCRQKQHRKVLDKGKPEDVMPSVKGAQERLPTVPLSGMYNKSGGKVRLTFKLEQDQLWIGTKDSGGTKCLITVLTTLRLEMP

SEQ ID NO: 878300 - protein, 107 aa, Homo sapiens
MPSVKGAQERLPTVPLSGMYNKSGGKVRLTFKLEQDQLWIGTKERTEKLPMGSIKNVVSEPIEGHEDYHMMAFQLGPTEASYYWVYWVPTQYVDAIKDTVLGKWQYF

SEQ ID NO: 878301 - protein, 564 aa, Homo sapiens; identical to SEQ ID NO: 878295

SEQ ID NO: 878302 - protein, 564 aa, Homo sapiens; identical to SEQ ID NO: 878295

SEQ ID NO: 878303 - protein, 148 aa, Homo sapiens
IKKLSSSGLSIAVHIRKNMSSIVMDAVRCFLIAQDLEMYGINYFEIKNKKGTDLWLGVDALGLNIYEKDDKLTPKIGFPWSEIRNISFNDKKFVIKPIDKKAPDFVFYAPRLRINKRILQLCMGNHELYMRRRKPDTIEVQQMKTQET

SEQ ID NO: 878304 - protein, 107 aa, Homo sapiens
GFWEPGQRAHSADARAAGSTRSTAGAGLGQRLRCCWIVVFSGIEDTHQKPKMPKPINVRVTTMDAELEFAIQPNTTGKQLFDHFGLHYVDNKGFPTWLKLDKKASQD

SEQ ID NO: 878305 - protein, 749 aa, Homo sapiens
IKKLSSSGLSIAVHIRKNMSSIVMDAVRCFLIAQDLEMYGINYFEIKNKKGTDLWLGVDALGLNIYEKDDKIVFPWSEIRNISFNDKKFVIKPIDKKAPDFVLYAPRLRINKRILQLCMGNHELYMRRRNLTRSTAGAGLGQRLRCCWIVVFSGIEDTHQKPKMPKPINVRVTTMDAELEFAIQPNTTGKQLFDQVVKTIGLREVWYFGLHYVDNKGFPTWLKLDKKVSAQEVRKENPLQFKFRAKFYPEDVAEELIQDITQKLFFLQVKEGILSDEIYCPPETAVLLGSYAVQAKFGDYNKEVHKSGYLSSERLIPQRVMDQHKLTRDQWEDRIQVWHAEHRGMLKDNAMLEYLKIAQDLEMYGINYFEIKNKKGTDLWLGVDALGLNIYEKDDKLTPKIGFPWSEIRNISFNDKKFVIKPIDKKAPDFVFYAPRLRINKRILQLCMGNHELYMRRRKPDTIEVQQMKAQAREEKHQKQLERQQLETEKKRRETVEREKEQMMREKEELMLRLQDYEEKTKKAERELSEQIQRALQLEEERKRAQEEAERLEADRMAALRAKEELERQAVDQIKSQEQLAAELAEYTAKIALLEEARRRKEDEVEEWQHRAKEAQDDLVKTKEELHLVMTAPPPPPPPVYEPVSYHVQESLQDEGAEPTGYSAELSSEGIRDDRNEEKRITEAEKNERVQRQLLTLSSELSQARDENKRTHNDIIHNENMRQGRDKYKTLRQIRQGNTKQRIDEFEAL

SEQ ID NO: 878306 - protein, 637 aa, Homo sapiens
GFWEPGQRAHSADARAAGSTRSTAGAGLGQRLRCCWIVVFSGIEDTHQKPKMPKPINVRVTTMDAELEFAIQPNTTGKQLFDQVVKTIGLREVWYFGLHYVDNKGFPTWLKLDKKVSAQEVRKENPLQFKFRAKFYPEDVAEELIQDITQKLFFLQVKEGILSDEIYCPPETAVLLGSYAVQAKFGDYNKEVHKSGYLSSERLIPQRVMDQHKLTRDQWEDRIQVWHAEHRGMLKDNAMLEYLKIAQDLEMYGINYFEIKNKKGTDLWLGVDALGLNIYEKDDKLTPKIGFPWSEIRNISFNDKKFVIKPIDKKAPDFVFYAPRLRINKRILQLCMGNHELYMRRRKPDTIEVQQMKAQAREEKHQKQLERQQLETEKKRRETVEREKEQMMREKEELMLRLQDYEEKTKKAERELSEQIQRALQLEEERKRAQEEAERLEADRMAALRAKEELERQAVDQIKSQEQLAAELAEYTAKIALLEEARRRKEDEVEEWQHRAKEAQDDLVKTKEELHLVMTAPPPPPPPVYEPVSYHVQESLQDEGAEPTGYSAELSSEGIRDDRNEEKRITEAEKNERVQRQLLTLSSELSQARDENKRTHNDIIHNENMRQGRDKYKTLRQIRQGNTKQRIDEFEAL

SEQ ID NO: 878307 - protein, 586 aa, Homo sapiens
MPKPINVRVTTMDAELEFAIQPNTTGKQLFDQVVKTIGLREVWYFGLHYVDNKGFPTWLKLDKKVSAQEVRKENPLQFKFRAKFYPEDVAEELIQDITQKLFFLQVKEGILSDEIYCPPETAVLLGSYAVQAKFGDYNKEVHKSGYLSSERLIPQRVMDQHKLTRDQWEDRIQVWHAEHRGMLKDNAMLEYLKIAQDLEMYGINYFEIKNKKGTDLWLGVDALGLNIYEKDDKLTPKIGFPWSEIRNISFNDKKFVIKPIDKKAPDFVFYAPRLRINKRILQLCMGNHELYMRRRKPDTIEVQQMKAQAREEKHQKQLERQQLETEKKRRETVEREKEQMMREKEELMLRLQDYEEKTKKAERELSEQIQRALQLEEERKRAQEEAERLEADRMAALRAKEELERQAVDQIKSQEQLAAELAEYTAKIALLEEARRRKEDEVEEWQHRAKEAQDDLVKTKEELHLVMTAPPPPPPPVYEPVSYHVQESLQDEGAEPTGYSAELSSEGIRDDRNEEKRITEAEKNERVQRQLLTLSSELSQARDENKRTHNDIIHNENMRQGRDKYKTLRQIRQGNTKQRIDEFEAL

SEQ ID NO: 878308 - protein, 606 aa, Homo sapiens
MPKPINVRVTTMDAELEFAIQPNTTGKQLFDQVVKTIGLREVWYFGLHYVDNKGFPTWLKLDKKVSAQEVRKENPLQFKFRAKFYPEDVAEELIQDITQKLFFLQVKEGILSDEIYCPPETAVLLGSYAVQAKFGDYNKEVHKSGYLSSERLIPQRVMDQHKLTRDQWEDRIQVWHAEHRGMLKDNAMLEYLKIAQDLEMYGINYFEIKNKKGTDLWLGVDALGLNIYEKDDKLTPKIGFPWSEIRNISFNDKKFVIKPIDKKAPDFVFYAPRLRINKRILQLCMGNHELYMRRRKPDTIEVQQMKAQAREEKHQKQLERQQLETEKKRRETVEREKEQMMREKEELMLRLQDYEEKTKKAERELSEQIQRALQLEEERKRAQEEAERLEADRMAALRAKEELERQAVDQIKSQEQLAAELAEYTAKIALLEEARRRKEDEVEEWQHRAKEAQDDLVKTKEELHLVMTAPPPPPPPVYEPVSYHVQESLQDEGAEPTGYSAELSSEGIRDDRNEEKRITEAEKNERVQRQLLGTGRAIMGRKGLDQRCLMLQTLSSELSQARDENKRTHNDIIHNENMRQGRDKYKTLRQIRQGNTKQRIDEFEAL

SEQ ID NO: 878309 - protein, 641 aa, Homo sapiens
MPKPINVRVTTMDAELEFAIQPNTTGKQLFDQETGFRHVCQASLELLNSSDPPVLASQSAGITSVSHHAQLAAFPHPFWVSGKREEEVVKTIGLREVWYFGLHYVDNKGFPTWLKLDKKVSAQEVRKENPLQFKFRAKFYPEDVAEELIQDITQKLFFLQVKEGILSDEIYCPPETAVLLGSYAVQAKFGDYNKEVHKSGYLSSERLIPQRVMDQHKLTRDQWEDRIQVWHAEHRGMLKDNAMLEYLKIAQDLEMYGINYFEIKNKKGTDLWLGVDALGLNIYEKDDKLTPKIGFPWSEIRNISFNDKKFVIKPIDKKAPDFVFYAPRLRINKRILQLCMGNHELYMRRRKPDTIEVQQMKAQAREEKHQKQLERQQLETEKKRRETVEREKEQMMREKEELMLRLQDYEEKTKKAERELSEQIQRALQLEEERKRAQEEAERLEADRMAALRAKEELERQAVDQIKSQEQLAAELAEYTAKIALLEEARRRKEDEVEEWQHRAKEAQDDLVKTKEELHLVMTAPPPPPPPVYEPVSYHVQESLQDEGAEPTGYSAELSSEGIRDDRNEEKRITEAEKNERVQRQLLTLSSELSQARDENKRTHNDIIHNENMRQGRDKYKTLRQIRQGNTKQRIDEFEAL

SEQ ID NO: 878310 - protein, 554 aa, Homo sapiens
MPKPINVRVTTMDAELEFAIQPNTTGKQLFDQVSAQEVRKENPLQFKFRAKFYPEDVAEELIQDITQKLFFLQVKEGILSDEIYCPPETAVLLGSYAVQAKFGDYNKEVHKSGYLSSERLIPQRVMDQHKLTRDQWEDRIQVWHAEHRGMLKDNAMLEYLKIAQDLEMYGINYFEIKNKKGTDLWLGVDALGLNIYEKDDKLTPKIGFPWSEIRNISFNDKKFVIKPIDKKAPDFVFYAPRLRINKRILQLCMGNHELYMRRRKPDTIEVQQMKAQAREEKHQKQLERQQLETEKKRRETVEREKEQMMREKEELMLRLQDYEEKTKKAERELSEQIQRALQLEEERKRAQEEAERLEADRMAALRAKEELERQAVDQIKSQEQLAAELAEYTAKIALLEEARRRKEDEVEEWQHRAKEAQDDLVKTKEELHLVMTAPPPPPPPVYEPVSYHVQESLQDEGAEPTGYSAELSSEGIRDDRNEEKRITEAEKNERVQRQLLTLSSELSQARDENKRTHNDIIHNENMRQGRDKYKTLRQIRQGNTKQRIDEFEAL

SEQ ID NO: 878311 - protein, 637 aa, Homo sapiens; identical to SEQ ID NO: 878306

SEQ ID NO: 878312 - protein, 637 aa, Homo sapiens; identical to SEQ ID NO: 878306

SEQ ID NO: 878313 - protein, 515 aa, Homo sapiens
MSQGGVLPPWFCEIVSVGFVPILCMSGRIQLRTIVCNDGPQLNDGPQLNDGPQLNDGPQLNDGPQLNDGPQLNVVLSSERLIPQRVMDQHKLTRDQWEDRIQVWHAEHRGMLKDNAMLEYLKIAQDLEMYGINYFEIKNKKGTDLWLGVDALGLNIYEKDDKLTPKIGFPWSEIRNISFNDKKFVIKPIDKKAPDFVFYAPRLRINKRILQLCMGNHELYMRRRKPDTIEVQQMKAQAREEKHQKQLERQQLETEKKRRETVEREKEQMMREKEELMLRLQDYEEKTKKAERELSEQIQRALQLEEERKRAQEEAERLEADRMAALRAKEELERQAVDQIKSQEQLAAELAEYTAKIALLEEARRRKEDEVEEWQHRAKEAQDDLVKTKEELHLVMTAPPPPPPPVYEPVSYHVQESLQDEGAEPTGYSAELSSEGIRDDRNEEKRITEAEKNERVQRQLLTLSSELSQARDENKRTHNDIIHNENMRQGRDKYKTLRQIRQGNTKQRIDEFEAL

SEQ ID NO: 878314 - protein, 378 aa, Homo sapiens
GFWEPGQRAHSADARAAGSTRSTAGAGLGQRLRCCWIVVFSGIEDTHQKPKMPKPINVRVTTMDAELEFAIQPNTTGKQLFDQVVKTIGLREVWYFGLHYVDNKGFPTWLKLDKKVSAQEVRKENPLQFKFRAKFYPEDVAEELIQDITQKLFFLQVKEGILSDEIYCPPETAVLLGSYAVQAKFGDYNKEVHKSGYLSSERLIPQRVMDQHKLTRDQWEDRIQVWHAEHRGMLKDNAMLEYLKIAQDLEMYGINYFEIKNKKGTDLWLGVDALGLNIYEKDDKLTPKIGFPWSEIRNISFNDKKFVIKPIDKKAPDFVFYAPRLRINKRILQLCMGNHELYMRRRKPDTIEVQQMKAQAREEKHQKQRRTSVCSGSC

SEQ ID NO: 878315 - protein, 399 aa, Homo sapiens [sequence omitted]

SEQ ID NO: 878316 - protein, 557 aa, Homo sapiens
GFWEPGQRAHSADARAAGSTRSTAGAGLGQRLRCCWIVVFSGIEDTHQKPKMPKPINVRVTTMDAELEFAIQPNTTGKQLFDQVVKTIGLREVWYFGLHYVDNKGFPTWLKLDKKVSAQEVRKENPLQFKFRAKFYPEDVAEELIQDITQKLFFLQVKEGILSDEIYCPPETAVLLGSYAVQAKFGDYNKEVHKSGYLSSERLIPQRVMDQHKLTRDQWEDRIQVWHAEHRGMLKDNAMLEYLKIAQDLEMYGINYFEIKNKKGTDLWLGVDALGLNIYEKDDKLTPKIGFPWSEIRNISFNDKKFVIKPIDKKAPDFVFYAPRLRINKRILQLCMGNHELYMRRRKPDTIEVQQMKAQAREEKHQKQLERQQLETEKKRRETVEREKEQMMREKEELMLRLQDYEEKTKKAERELSEQIQRALQLEEERKRAQEEAERLEADRMAALRAKEELERQAVDQIKSQEQLAAELAEYTAKIALLEEARRRKEDEVEEWQHRAKEAQDDLVKTKEELHLVMTAPPPPPPPVYEPRRACRPLRVATPPKLVWVRCGRGPSR

SEQ ID NO: 878317 - protein, 515 aa, Homo sapiens
  misc_feature (502)..(502): Xaa can be any naturally occurring amino acid
  misc_feature (510)..(510): Xaa can be any naturally occurring amino acid
GFWEPGQRAHSADARAAGSTRSTAGAGLGQRLRCCWIVVFSGIEDTHQKPKMPKPINVRVTTMDAELEFAIQPNTTGKQLFDQVVKTIGLREVWYFGLHYVDNKGFPTWLKLDKKVSAQEVRKENPLQFKFRAKFYPEDVAEELIQDITQKLFFLQVKEGILSDEIYCPPETAVLLGSYAVQAKFGDYNKEVHKSGYLSSERLIPQRVMDQHKLTRDQWEDRIQVWHAEHRGMLKDNAMLEYLKIAQDLEMYGINYFEIKNKKGTDLWLGVDALGLNIYEKDDKLTPKIGFPWSEIRNISFNDKKFVIKPIDKKAPDFVFYAPRLRINKRILQLCMGNHELYMRRRKPDTIEVQQMKAQAREEKHQKQLERQQLETEKKRRETVEREKEQMMREKEELMLRLQDYEEKTKKAERELSEQIQRALQLEEERKRAQEEAERLEADRMAALRAKEELERQAVDQIKSQEQLAAELAEYTAKIALLEEARRRKEDEVEEWQHRPRXRYCEQETXVYRPA

SEQ ID NO: 878318 - protein, 399 aa, Homo sapiens
DIFTYAKVLALITVSVAGIVILGKKGTDLWLGVDALGLNIYEKDDKLTPKIGFPWSEIRNISFNDKKFVIKPIDKKAPDFVFYAPRLRINKRILQLCMGNHELYMRRRKPDTIEVQQMKAQAREEKHQKQLERQQLETEKKRRETVEREKEQMMREKEELMLRLQDYEEKTKKAERELSEQIQRALQLEEERKRAQEEAERLEADRMAALRAKEELERQAVDQIKSQEQLAAELAEYTAKIALLEEARRRKEDEVEEWQHRAKEAQDDLVKTKEELHLVMTAPPPPPPPVYEPVSYHVQESLQDEGAEPTGYSAELSSEGIRDDRNEEKRITEAEKNERVQRQLLTLSSELSQARDENKRTHNDIIHNENMRQGRDKYKTLRQIRQGNTKQRIDEFEAL

SEQ ID NO: 878319 - protein, 339 aa, Homo sapiens
MTKSLSLNPSTRRHLTLCDFVFYAPRLRINKRILQLCMGNHELYMRRRKPDTIEVQQMKAQAREEKHQKQLERQQLETEKKRRETVEREKEQMMREKEELMLRLQDYEEKTKKAERELSEQIQRALQLEEERKRAQEEAERLEADRMAALRAKEELERQAVDQIKSQEQLAAELAEYTAKIALLEEARRRKEDEVEEWQHRAKEAQDDLVKTKEELHLVMTAPPPPPPPVYEPVSYHVQESLQDEGAEPTGYSAELSSEGIRDDRNEEKRITEAEKNERVQRQLLTLSSELSQARDENKRTHNDIIHNENMRQGRDKYKTLRQIRQGNTKQRIDEFEAL

SEQ ID NO: 878320 - protein, 302 aa, Homo sapiens [sequence omitted]

SEQ ID NO: 878321 - protein, 278 aa, Homo sapiens
MGEMNGKNWAKLCKDCKVADGKPVTGTDVDIVFSKVKGKSARVINYEEKTKKAERELSEQIQRALQLEEERKRAQEEAERLEADRMAALRAKEELERQAVDQIKSQEQLAAELAEYTAKIALLEEARRRKEDEVEEWQHRAKEAQDDLVKTKEELHLVMTAPPPPPPPVYEPVSYHVQESLQDEGAEPTGYSAELSSEGIRDDRNEEKRITEAEKNERVQRQLLTLSSELSQARDENKRTHNDIIHNENMRQGRDKYKTLRQIRQGNTKQRIDEFEAL

SEQ ID NO: 878322 - protein, 120 aa, Homo sapiens
MTAPPPPPPPVYEPVSYHVQESLQDEGAEPTGYSAELSSEGIRDDRNEEKRITEAEKNERVQRQLLTLSSELSQARDENKRTHNDIIHNENMRQGRDKYKTLRQIRQGNTKQRIDEFEAL

SEQ ID NO: 878323 - protein, 169 aa, Homo sapiens
PESLEKSPAKLPLLKEARRRKKYNLKMASSGAKEAQDDLVKTKEELHLVMTAPPPPPPPVYEPVSYHVQESLQDEGAEPTGYSAELSSEGIRDDRNEEKRITEAEKNERVQRQLLTLSSELSQARDENKRTHNDIIHNENMRQGRDKYKTLRQIRQGNTKQRIDEFEAL

SEQ ID NO: 878324 - protein, 80 aa, Homo sapiens
LLGARAASALGGRKGGGEHTEHCRRRVGTASSLLLDSRVFGDRGYSPETENAETNQCPSYHHGCRAGVCNPAKYNWKTAF

SEQ ID NO: 878325 - protein, 293 aa, Homo sapiens
GFWEPGQRAHSADARAAGSTRSTAGAGLGQRLRCCWIVVFSGIEDTHQKPKMPKPINVRVTTMDAELEFAIQPNTTGKQLFDQVVKTIGLREVWYFGLHYVDNKGFPTWLKLDKKVSAQEVRKENPLQFKFRAKFYPEDVAEELIQDITQKLFFLQVKEGILSDEIYCPPETAVLLGSYAVQAKFGDYNKEVHKSGYLSSERLIPQRVMDQHKLTRDQWEDRIQVWHAEHRGMLKDNAMLEYLKIAQDLEMYGINYFEIKNKKGTDLWLGVDALGLNIYEKDDKLNPNFSSDP

SEQ ID NO: 878326 - protein, 287 aa, Homo sapiens
GFWEPGQRAHSADARAAGSTRSTAGAGLGQRLRCCWIVVFSGIEDTHQKPKMPKPINVRVTTMDAELEFAIQPNTTGKQLFDQVVKTIGLREVWYFGLHYVDNKGFPTWLKLDKKVSAQEVRKENPLQFKFRAKFYPEDVAEELIQDITQKLFFLQVKEGILSDEIYCPPETAVLLGSYAVQAKFGDYNKEVHKSGYLSSERLIPQRVMDQHKLTRDQWEDRIQVWHAEHRGMLKDNAMLEYLKIAQDLEMYGINYFEIKNKKGVVNVITMKNKTEDWSPGRWEEAW

SEQ ID NO: 878327 - protein, 182 aa, Homo sapiens
MPKPINVRVTTMDAELEFAIQPNTTGKQLFDQVVKTIGLREVWYFGLHYVDNKGFPTWLKLDKKVSAQEVRKENPLQFKFRAKFYPEDVAEELIQDITQKLFFLQVKEGILSDEIYCPPETAVLLGSYAVQAKFGDYNKEVHKSGYLSSERLIPQGLFQGNRTLGFLQAKYTRTTSNLRIDI

SEQ ID NO: 878328 - protein, 194 aa, Homo sapiens
GFWEPGQRAHSADARAAGSTRSTAGAGLGQRLRCCWIVVFSGIEDTHQKPKMPKPINVRVTTMDAELEFAIQPNTTGKQLFDQVVKTIGLREVWYFGLHYVDNKGFPTWLKLDKKVSAQEVRKENPLQFKFRAKFYPEDVAEELIQDITQKLFFLQVKEGILSDEIYCPPETAVLLGSYAVQAKCAHAEYPDTR

SEQ ID NO: 878329 - protein, 122 aa, Homo sapiens
MTKSLSLNPSTRRHLTLCDFVFYAPRLRINKRILQLCMGNHELYMRRRKPDTIEVQQMKAQAREEKHQKQLERQQLETEKKRRETDEEPGDLSKPGDLSKPGDLSKPGDLSQPGDLCMPGDL

SEQ ID NO: 878330 - protein, 78 aa, Homo sapiens
EPTGYSAELSSEGIRDDRNEEKRITEAEKNERVQRQLLVRPKGLCLQGACLAFGADRLGEGSDVSQPHPAPLLPFLFS

SEQ ID NO: 878331 - protein, 637 aa, Homo sapiens; identical to SEQ ID NO: 878306

SEQ ID NO: 878332 - protein, 586 aa, Homo sapiens; identical to SEQ ID NO: 878307

SEQ ID NO: 878333 - protein, 637 aa, Homo sapiens; identical to SEQ ID NO: 878306

SEQ ID NO: 878334 - protein, 637 aa, Homo sapiens; identical to SEQ ID NO: 878306

SEQ ID NO: 878335 - protein, 585 aa, Homo sapiens
GFWEPGQRAHSADARAAGSTRSTAGAGLGQRLRCCWIVVFSGIEDTHQKPKMPKPINVRVTTMDAELEFAIQPNTTGKQLFDQVVKTIGLREVWYFGLHYVDNKGFPTWLKLDKKVSAQEVRKENPLQFKFRAKFYPEDVAEELIQDITQKLFFLQVKEGILSDEIYCPPETAVLLGSYAVQAKFGDYNKEVHKSGYLSSERLIPQRVMDQHKLTRDQWEDRIQVWHAEHRGMLKDNAMLEYLKIAQDLEMYGINYFEIKNKKGTDLWLGVDALGLNIYEKDDKLTPKIGFPWSEIRNISFNDKKFVIKPIDKKAPDFVFYAPRLRINKRILQLCMGNHELYMRRRKPDTIEVQQMKAQAREEKHQKQLERQQLETEKKRRETVEREKEQMMREKEELMLRLQDYEEKTKKAERELSEQIQRALQLEEERKRAQEEAERLEADRMAALRAKEELERQAVDQIKSQEQLAAELAEYTAKIALLEEARRRKEDEVEEWQHRAKEAQDDLVKTKEELHLVMTAPPPPPPPVYEPTLSSELSQARDENKRTHNDIIHNENMRQGRDKYKTLRQIRQGNTKQRIDEFEAL

SEQ ID NO: 878336 - protein, 603 aa, Homo sapiens
  misc_feature (47)..(47): Xaa can be any naturally occurring amino acid
MCSLRTIENAAERITVSLRVPHSGCEIWRSVTRVSIYKVVHNDGMLXSTVVKTIGLREVWYFGLHYVDNKGFPTWLKLDKKVSAQEVRKENPLQFKFRAKFYPEDVAEELIQDITQKLFFLQVKEGILSDEIYCPPETAVLLGSYAVQAKFGDYNKEVHKSGYLSSERLIPQRVMDQHKLTRDQWEDRIQVWHAEHRGMLKDNAMLEYLKIAQDLEMYGINYFEIKNKKGTDLWLGVDALGLNIYEKDDKLTPKIGFPWSEIRNISFNDKKFVIKPIDKKAPDFVFYAPRLRINKRILQLCMGNHELYMRRRKPDTIEVQQMKAQAREEKHQKQLERQQLETEKKRRETVEREKEQMMREKEELMLRLQDYEEKTKKAERELSEQIQRALQLEEERKRAQEEAERLEADRMAALRAKEELERQAVDQIKSQEQLAAELAEYTAKIALLEEARRRKEDEVEEWQHRAKEAQDDLVKTKEELHLVMTAPPPPPPPVYEPVSYHVQESLQDEGAEPTGYSAELSSEGIRDDRNEEKRITEAEKNERVQRQLLTLSSELSQARDENKRTHNDIIHNENMRQGRDKYKTLRQIRQGNTKQRIDEFEAL

SEQ ID NO: 878337 - protein, 544 aa, Homo sapiens
MCWGQWAFVFRICVESVACFVQVSAQEVRKENPLQFKFRAKFYPEDVAEELIQDITQKLFFLQVKEGILSDEIYCPPETAVLLGSYAVQAKFGDYNKEVHKSGYLSSERLIPQRVMDQHKLTRDQWEDRIQVWHAEHRGMLKDNAMLEYLKIAQDLEMYGINYFEIKNKKGTDLWLGVDALGLNIYEKDDKLTPKIGFPWSEIRNISFNDKKFVIKPIDKKAPDFVFYAPRLRINKRILQLCMGNHELYMRRRKPDTIEVQQMKAQAREEKHQKQLERQQLETEKKRRETVEREKEQMMREKEELMLRLQDYEEKTKKAERELSEQIQRALQLEEERKRAQEEAERLEADRMAALRAKEELERQAVDQIKSQEQLAAELAEYTAKIALLEEARRRKEDEVEEWQHRAKEAQDDLVKTKEELHLVMTAPPPPPPPVYEPVSYHVQESLQDEGAEPTGYSAELSSEGIRDDRNEEKRITEAEKNERVQRQLLTLSSELSQARDENKRTHNDIIHNENMRQGRDKYKTLRQIRQGNTKQRIDEFEAL

SEQ ID NO: 878338 - protein, 637 aa, Homo sapiens; identical to SEQ ID NO: 878306

SEQ ID NO: 878339 - protein, 637 aa, Homo sapiens; identical to SEQ ID NO: 878306

SEQ ID NO: 878340 - protein, 412 aa, Homo sapiens
GFWEPGQRAHSADARAAGSTRSTAGAGLGQRLRCCWIVVFSGIEDTHQKPKMPKPINVRVTTMDAELEFAIQPNTTGKQLFDQVVKTIGLREVWYFGLHYVDNKGFPTWLKLDKKVSAQEVRKENPLQFKFRAKFYPEDVAEELIQDITQKLFFLQVKEGILSDEIYCPPETAVLLGSYAVQAKFGDYNKEVHKSGYLSSERLIPQRVMDQHKLTRDQWEDRIQVWHAEHRGMLKDNAMLEYLKIAQDLEMYGINYFEIKNKKGTDLWLGVDALGLNIYEKDDKLTPKIGFPWSEIRNISFNDKKFVIKPIDKKAPDFVFYAPRLRINKRILQLCMGNHELYMRRRKPDTIEVQQLPNRNILGWEPGRRPGLFSPVVIVPSRPDSRDYSRITSCVVLGAGLIELRKMPVKSE

SEQ ID NO: 878341 - protein, 472 aa, Homo sapiens
MPKPINVRVTTMDAELEFAIQPNTTGKQLFDQVVKTIGLREVWYFGLHYVDNKGFPTWLKLDKKVSAQEVRKENPLQFKFRAKFYPEDVAEELIQDITQKLFFLQVKEGILSDEIYCPPETAVLLGSYAVQAKFGDYNKEVHKSGYLSSERLIPQRVMDQHKLTRDQWEDRIQVWHAEHRGMLKDNAMLEYLKIAQDLEMYGINYFEIKNKKGTDLWLGVDALGLNIYEKDDKLTPKIGFPWSEIRNISFNDKKFVIKPIDKKAPDFVFYAPRLRINKRILQLCMGNHELYMRRRKPDTIEVQQMKAQAREEKHQKQLERQQLETEKKRRETVEREKEQMMREKEELMLRLQDYEEKTKKAERELSEQIQRALQLEEERKRAQEEAERLEADRMAALRAKEELERQAVDQIKSQEQLAAELAEYTAKIALLEEARRRKEDEVEEWQHRCGYASECGGHTLLQSNPEHLHLIN

SEQ ID NO: 878342 - protein, 393 aa, Homo sapiens
MAQVLTIPLCTSLLHLPTHVNRPLAGVDALGLNIYEKDDKLTPKIGFPWSEIRNISFNDKKFVIKPIDKKAPDFVFYAPRLRINKRILQLCMGNHELYMRRRKPDTIEVQQMKAQAREEKHQKQLERQQLETEKKRRETVEREKEQMMREKEELMLRLQDYEEKTKKAERELSEQIQRALQLEEERKRAQEEAERLEADRMAALRAKEELERQAVDQIKSQEQLAAELAEYTAKIALLEEARRRKEDEVEEWQHRAKEAQDDLVKTKEELHLVMTAPPPPPPPVYEPVSYHVQESLQDEGAEPTGYSAELSSEGIRDDRNEEKRITEAEKNERVQRQLLTLSSELSQARDENKRTHNDIIHNENMRQGRDKYKTLRQIRQGNTKQRIDEFEAL

SEQ ID NO: 878343 - protein, 424 aa, Homo sapiens
IKKLSSSGLSIAVHIRKNMSSIVMDAVRCFLIAQDLEMYGINYFEIKNKKGTDLWLGVDALGLNIYEKDDKLTPKIGFPWSEIRNISFNDKKFVIKPIDKKAPDFVFYAPRLRINKRILQLCMGNHELYMRRRKPDTIEVQQMKAQAREEKHQKQLERQQLETEKKRRETVEREKEQMMREKEELMLRLQDYEEKTKKAERELSEQIQRALQLEEERKRAQEEAERLEADRMAALRAKEELERQAVDQIKSQEQLAAELAEYTAKIALLEEARRRKEDEVEEWQHRAKEAQDDLVKTKEELHLVMTAPPPPPPPVYEPVSYHVQESLQDEGAEPTGYSAELSSEGIRDDRNEEKRITEAEKNERVQRQLLTLSSELSQARDENKRTHNDIIHNENMRQGRDKYKTLRQIRQGNTKQRIDEFEAL

SEQ ID NO: 878344 - protein, 484 aa, Homo sapiens
GFWEPGQRAHSADARAAGSTRSTAGAGLGQRLRCCWIVVFSGIEDTHQKPKMPKPINVRVTTMDAELEFAIQPNTTGKQLFDQVVKTIGLREVWYFGLHYVDNKGFPTWLKLDKKVSAQEVRKENPLQFKFRAKFYPEDVAEELIQDITQKLFFLQVKEGILSDEIYCPPETAVLLGSYAVQAKFGDYNKEVHKSGYLSSERLIPQRVMDQHKLTRDQWEDRIQVWHAEHRGMLKDNAMLEYLKIAQDLEMYGINYFEIKNKKGTDLWLGVDALGLNIYEKDDKLTPKIGFPWSEIRNISFNDKKFVIKPIDKKAPDFVFYAPRLRINKRILQLCMGNHELYMRRRKPDTIEVQQMKAQAREEKHQKQLERQQLETEKKRRETVEREKEQMMREKEELMLRLQDYEEKTKKAERELSEQIQRALQLEEERKRAQEEKHQKQQEQQQLETEKKRRATVEREKEQMMREKEELTTHQTYEESKPSE

SEQ ID NO: 878345 - protein, 193 aa, Homo sapiens
MAALRAKEELERQAVDQIKSQEQLAAELAEYTAKIALLEEARRRKEDEVEEWQHRAKEAQDDLVKTKEELHLVMTAPPPPPPPVYEPVSYHVQESLQDEGAEPTGYSAELSSEGIRDDRNEEKRITEAEKNERVQRQLLTLSSELSQARDENKRTHNDIIHNENMRQGRDKYKTLRQIRQGNTKQRIDEFEAL

SEQ ID NO: 878346 - protein, 391 aa, Homo sapiens
GFWEPGQRAHSADARAAGSTRSTAGAGLGQRLRCCWIVVFSGIEDTHQKPKMPKPINVRVTTMDAELEFAIQPNTTGKQLFDQVVKTIGLREVWYFGLHYVDNKGFPTWLKLDKKVSAQEVRKENPLQFKFRAKFYPEDVAEELIQDITQKLFFLQVKEGILSDEIYCPPETAVLLGSYAVQAKFGDYNKEVHKSGYLSSERLIPQRVMDQHKLTRDQWEDRIQVWHAEHRGMLKDNAMLEYLKIAQDLEMYGINYFEIKNKKGTDLWLGVDALGLNIYEKDDKLTPKIGFPWSEIRNISFNDKKFVIKPIDKKAPDFVFYAPRLRINKRILQLCMGNHELYMRRRKPDTIEVQQMKAQAREEKHQKQLERQQLETEKKRRETVHCFLLHS

SEQ ID NO: 878347 - protein, 126 aa, Homo sapiens
MAALRAKEELERQAVDQIKSQEQLAAELAEYTAKIALLEEARRRKEDEVEEWQHRAKEAQDDLVKTKEELHLVMTAPPPPPPPVYEPRATPSSASTSSRPCNSQARTKGRGVLIAGAASPATLVCL

SEQ ID NO: 878348 - protein, 293 aa, Homo sapiens
GFWEPGQRAHSADARAAGSTRSTAGAGLGQRLRCCWIVVFSGIEDTHQKPKMPKPINVRVTTMDAELEFAIQPNTTGKQLFDQVVKTIGLREVWYFGLHYVDNKGFPTWLKLDKKVSAQEVRKENPLQFKFRAKFYPEDVAEELIQDITQKLFFLQVKEGILSDEIYCPPETAVLLGSYAVQAKFGDYNKEVHKSGYLSSERLIPQRVMDQHKLTRDQWEDRIQVWHAEHRGMLKDNAMLEYLKIAQDLEMYGINYFEIKNKKGTDLWLGVDALGLAICKWQGQGQKMNHVTK

SEQ ID NO: 878349 - protein, 282 aa, Homo sapiens
GFWEPGQRAHSADARAAGSTRSTAGAGLGQRLRCCWIVVFSGIEDTHQKPKMPKPINVRVTTMDAELEFAIQPNTTGKQLFDQVVKTIGLREVWYFGLHYVDNKGFPTWLKLDKKVSAQEVRKENPLQFKFRAKFYPEDVAEELIQDITQKLFFLQVKEGILSDEIYCPPETAVLLGSYAVQAKFGDYNKEVHKSGYLSSERLIPQRVMDQHKLTRDQWEDRIQVWHAEHRGMLKDNAMLEYLKIAQDLEMYGSHRLRKKSRKAQTYRMQQEPHMHIRDETI

SEQ ID NO: 878350 - protein, 99 aa, Homo sapiens
MTKSLSLNPSTRRHLTLCDFVFYAPRLRINKRILQLCMGNHELYMRRRKPDTIEVQQMKAQAREEKHQKQLERQQLETEKKRRETVEGEGEPVSNKYTK

SEQ ID NO: 878351 - protein, 174 aa, Homo sapiens
IKKLSSSGLSIAVHIRKNMSSIVMDAVRCFLIAQDLEMYGINYFEIKNKKGTDLWLGVDALGLNIYEKDDKIVFPWSEIRNISFNDKKFVIKPIDKKAPDFVLYAPRLRINKRILQLCMGNHELYMRRRNLTRSTAGAGLGQRLRCCWIVVFSGIEDTHQKPKMPKPINVRVTT

SEQ ID NO: 878352 - protein, 319 aa, Homo sapiens
MALFGALFLALLAGAHAEFPGCKIRVTSKALELVKQEGLRFLEQELETITIPDLRGKEGHFYYNISEVKVTELQLTSSELDFQPQQELMLQITNASLGLRFRRQLLYWFFYDGGYINASAEGVSIRTGLELSRDPAGRMKVSNVSCQASVSRMHAAFGGTFKKVYDFLSTFITSGMRFLLNQQICPVLYHAGTVLLNSLLDTVPVRSSVDELVGIDYSLMKDPVASTSNLDMDFRGAFFPLTERNWSLPNRAVEPQLQEEERMVYVAFSEFFFDSAMESYFPGGGPAAVAGGGQGAPRPGHAAEGHLLWEHCPAEPSSD

SEQ ID NO: 878353 - protein, 319 aa, Homo sapiens; identical to SEQ ID NO: 878352

SEQ ID NO: 878354 - protein, 319 aa, Homo sapiens; identical to SEQ ID NO: 878352

SEQ ID NO: 878355 - protein, 319 aa, Homo sapiens; identical to SEQ ID NO: 878352

SEQ ID NO: 878356 - protein, 319 aa, Homo sapiens; identical to SEQ ID NO: 878352

SEQ ID NO: 878357 - protein, 319 aa, Homo sapiens; identical to SEQ ID NO: 878352

SEQ ID NO: 878358 - protein, 373 aa, Homo sapiens
MGLSGSDNSCDPTPPPGPLAMALFGALFLALLAGAHAEFPGCKIRVTSKALELGKAQGQTGTDGSGRGWGRPNSGQRELSKGFSAASVKQEGLRFLEQELETITIPDLRGKEGHFYYNISEVKVTELQLTSSELDFQPQQELMLQITNASLGLRFRRQLLYWFFYDGGYINASAEGVSIRTGLELSRDPAGRMKVSNVSCQASVSRMHAAFGGTFKKVYDFLSTFITSGMRFLLNQQICPVLYHAGTVLLNSLLDTVPVRSSVDELVGIDYSLMKDPVASTSNLDMDFRGAFFPLTERNWSLPNRAVEPQLQEEERMVYVAFSEFFFDSAMESYFPGGGPAAVAGGGQGAPRPGHAAEGHLLWEHCPAEPSSD

SEQ ID NO: 878359 - protein, 319 aa, Homo sapiens; identical to SEQ ID NO: 878352

SEQ ID NO: 878360 - protein, 231 aa, Homo sapiens
MLQITNASLGLRFRRQLLYWFFYDGGYINASAEGVSIRTGLELSRDPAGRMKVSNVSCQASVSRMHAAFGGTFKKVYDFLSTFITSGMRFLLNQQICPVLYHAGTVLLNSLLDTVPVRSSVDELVGIDYSLMKDPVASTSNLDMDFRGAFFPLTERNWSLPNRAVEPQLQEEERMVYVAFSEFFFDSAMESYFPGGGPAAVAGGGQGAPRPGHAAEGHLLWEHCPAEPSSD

SEQ ID NO: 878361 - protein, 229 aa, Homo sapiens
MWPSLSSSSTLPWRATFRAGALQLLLVGDKVPHDLDMLLRATYFGSIVLLSPAVIDSPLKLELRVLAPPRCTIKPSGTTISVTASVTIALVPPDQPEVQLSSMTMDARLSAKMALRGKALRTQLDLRRFRIYSNHSALESLALIPLQAPLKTMLQIGVMPMLNERTWRGVQIPLPEGINFVHEVVTNHAGFLTIGADLHFAKGLREVIEKNRPADVRASTAPTPSTAAV

SEQ ID NO: 878362 - protein, 267 aa, Homo sapiens
MALFGALFLALLAGAHAEFPGCKIRVTSKALELVKQEGLRFLEQELETITIPDLRGKEGHFYYNISEVKVTELQLTSSELDFQPQQELMLQITNASLGLRFRRQLLYWFLKVYDFLSTFITSGMRFLLNQQICPVLYHAGTVLLNSLLDTVPVRSSVDELVGIDYSLMKDPVASTSNLDMDFRGAFFPLTERNWSLPNRAVEPQLQEEERMVYVAFSEFFFDSAMESYFPGGGPAAVAGGGQGAPRPGHAAEGHLLWEHCPAEPSSD

SEQ ID NO: 878363 - protein, 229 aa, Homo sapiens; identical to SEQ ID NO: 878361

SEQ ID NO: 878364 - protein, 258 aa, Homo sapiens
MALFGALFLALLAGAHAEFPGCKIRVTSKALELVKQEGLRFLEQELETITIPDLRGKEGHFYYNISEVKVTELQLTSSELDFQPQQELMLQITNASLGLRFRRQLLYWFFYDGGYINASAEGVSIRTGLELSRDPAGRMKVSNVSCQASVSRMHAAFGGTFKKVYDFLSTFITSGMRFLLNQQICPVLYHAGTVLLNSLLDTVPVRSSVDELVGIDYSLMKDPVASTSNLDMDFRGAFFPLTERNWSSTAPTPSTAAV

SEQ ID NO: 878365 - protein, 319 aa, Homo sapiens; identical to SEQ ID NO: 878352

SEQ ID NO: 878366 - protein, 258 aa, Homo sapiens; identical to SEQ ID NO: 878364

SEQ ID NO: 878367 - protein, 275 aa, Homo sapiens
MALFGALFLALLAGAHAEFPGCKIRVTSKALELVKQEGLRFLEQELETITIPDLRGKEGHFYYNISEVKVTELQLTSSELDFQPQQELMLQITNASLGLRFRRQLLYWFFYDGGYINASAEGVSIRTGLELSRDPAGRMKVSNVSCQASVSRMHAAFGGTFKKVYDFLSTFITSGMRFLLNQQICPVLYHAGTVLLNSLLDTVPVRSSVDELVGIDYSLMKDPVASTISVTASVHAWSHRQLRSAVQLICAVSARRSGEAGRVLASIFTLGVRST

SEQ ID NO: 878368 - protein, 169 aa, Homo sapiens
MGLSGSDNSCDPTPPPGPLAMALFGALFLALLAGAHAEFPGCKIRVTSKALELVKQEGLRFLEQELETITIPDLRGKEGHFYYNISEVKVTELQLTSSELDFQPQQELMLQITNASLGLRFRRTGLLMSGRPLPPHRPQQLSEPSIPKLAAVIQDPNPSQPLFSHIHSL

SEQ ID NO: 878369 - protein, 72 aa, Homo sapiens
INPPGSYDGGYINASAEGVSIRTGLELSRDPAGRMKVSNVSCQASVSRMHAAFGGTFKYSPSPNPSSPFSSP

SEQ ID NO: 878370 - protein, 319 aa, Homo sapiens; identical to SEQ ID NO: 878352

SEQ ID NO: 878371 - protein, 319 aa, Homo sapiens; identical to SEQ ID NO: 878352

SEQ ID NO: 878372 - protein, 319 aa, Homo sapiens; identical to SEQ ID NO: 878352

SEQ ID NO: 878373 - protein, 319 aa, Homo sapiens; identical to SEQ ID NO: 878352

SEQ ID NO: 878374 - protein, 319 aa, Homo sapiens; identical to SEQ ID NO: 878352

SEQ ID NO: 878375 - protein, 339 aa, Homo sapiens
MGLSGSDNSCDPTPPPGPLAMALFGALFLALLAGAHAEFPGCKIRVTSKALELVKQEGLRFLEQELETITIPDLRGKEGHFYYNISEVKVTELQLTSSELDFQPQQELMLQITNASLGLRFRRQLLYWFFYDGGYINASAEGVSIRTGLELSRDPAGRMKVSNVSCQASVSRMHAAFGGTFKKVYDFLSTFITSGMRFLLNQQICPVLYHAGTVLLNSLLDTVPVRSSVDELVGIDYSLMKDPVASTSNLDMDFRGAFFPLTERNWSLPNRAVEPQLQEEERMVYVAFSEFFFDSAMESYFPGGGPAAVAGGGQGAPRPGHAAEGHLLWEHCPAEPSSD

SEQ ID NO: 878376 - protein, 293 aa, Homo sapiens
KGQASHHRRDQADGRGLENVEGAKKEAGPVDVRRGRRTTERVKVTELQLTSSELDFQPQQELMLQITNASLGLRFRRQLLYWFFYDGGYINASAEGVSIRTGLELSRDPAGRMKVSNVSCQASVSRMHAAFGGTFKKVYDFLSTFITSGMRFLLNQQICPVLYHAGTVLLNSLLDTVPVRSSVDELVGIDYSLMKDPVASTSNLDMDFRGAFFPLTERNWSLPNRAVEPQLQEEERMVYVAFSEFFFDSAMESYFPGGGPAAVAGGGQGAPRPGHAAEGHLLWEHCPAEPSSD

SEQ ID NO: 878377 - protein, 267 aa, Homo sapiens; identical to SEQ ID NO: 878362

SEQ ID NO: 878378 - protein, 229 aa, Homo sapiens; identical to SEQ ID NO: 878361

SEQ ID NO: 878379 - protein, 319 aa, Homo sapiens; identical to SEQ ID NO: 878352

SEQ ID NO: 878380 - protein, 319 aa, Homo sapiens; identical to SEQ ID NO: 878352

SEQ ID NO: 878381 - protein, 105 aa, Homo sapiens
MALFGALFLALLAGAHAEFPGCKIRVTSKALELVKQEGLRFLEQELETITIPDLRGKEGHFYYNISDPLPPHRPQQLSEPSIPKLAAVIQDPNPSQPLFSHIHSL

SEQ ID NO: 878382 - protein, 69 aa, Homo sapiens
RARLPKGIQQRRGQATPFRNCCGNKVLTCPQAVYGRPWAQSGMYRALGRGQSWRQNPACRGTLLRRGLS

SEQ ID NO: 878383 - protein, 125 aa, Homo sapiens
MGLSGSDNSCDPTPPPGPLAMALFGALFLALLAGAHAEFPGCKIRVTSKALELVKQEGLRFLEQELETITIPDLRGKEGHFYYNISDPLPPHRPQQLSEPSIPKLAAVIQDPNPSQPLFSHIHSL

SEQ ID NO: 878384 - protein, 607 aa, Homo sapiens
MEAPAAGLFLLLLLGTWAPAPGSASSEAPPLINEDVKRTVDLSSHLAKVTAEVVLAHLGGGSTSRATSFLLALEPELEARLAHLGVQVKGEDEEENNLEVRETKIKGKSGRFFTVKLPVALDPGAKISVIVETVYTHVLHPYPTQITQSEKQFVVFEGNHYFYSPYPTKTQTMRVKLASRNVESYTKLGNPTRSEDLLDYGPFRDVPAYSQDTFKVHYENNSPFLTITSMTRVIEVSHWGNIAVEENVDLKHTGAVLKGPFSRYDYQRQPDSGISSIRSFKTILPAAAQDVYYRDEIGNVSTSHLLILDDSVEMEIRPRFPLFGGWKTHYIVGYNLPSYEYLYNLGDQYALKMRFVDHVFDEQVIDSLTVKIILPEGAKNIEIDSPYEISRAPDELHYTYLDTFGRPVIVAYKKNLVEQHIQDIVVHYTFNKVLMLQEPLLVVAAFYILFFTVIIYVRLDFSITKDPAAEARMKVACITEQVLTLVNKRIGLYRHFDETVNRYKQSRDISTLNSGKKSLETEHKALTSEIALLQSRLKTEGSDLCDRVSEMQKLDAQVKELVLKSAVEAERLVAGKLKKDTYIENEKLISGKRQELVTKIDHILDAL

SEQ ID NO: 878385 - protein, 646 aa, Homo sapiens
MPVIPATREAEAGELLEPGRQRLQPAEMAPSHSSLLFPVMEAPAAGLFLLLLLGTWAPAPGSASSEAPPLINEDVKRTVDLSSHLAKVTAEVVLAHLGGGSTSRATSFLLALEPELEARLAHLGVQVKGEDEEENNLEVRETKIKGKSGRFFTVKLPVALDPGAKISVIVETVYTHVLHPYPTQITQSEKQFVVFEGNHYFYSPYPTKTQTMRVKLASRNVESYTKLGNPTRSEDLLDYGPFRDVPAYSQDTFKVHYENNSPFLTITSMTRVIEVSHWGNIAVEENVDLKHTGAVLKGPFSRYDYQRQPDSGISSIRSFKTILPAAAQDVYYRDEIGNVSTSHLLILDDSVEMEIRPRFPLFGGWKTHYIVGYNLPSYEYLYNLGDQYALKMRFVDHVFDEQVIDSLTVKIILPEGAKNIEIDSPYEISRAPDELHYTYLDTFGRPVIVAYKKNLVEQHIQDIVVHYTFNKVLMLQEPLLVVAAFYILFFTVIIYVRLDFSITKDPAAEARMKVACITEQVLTLVNKRIGLYRHFDETVNRYKQSRDISTLNSGKKSLETEHKALTSEIALLQSRLKTEGSDLCDRVSEMQKLDAQVKELVLKSAVEAERLVAGKLKKDTYIENEKLISGKRQELVTKIDHILDAL

SEQ ID NO: 878386 - protein, 607 aa, Homo sapiens; identical to SEQ ID NO: 878384

SEQ ID NO: 878387 - protein, 607 aa, Homo sapiens; identical to SEQ ID NO: 878384

SEQ ID NO: 878388 - protein, 472 aa, Homo sapiens
AGRGWVESNQITQSEKQFVVFEGNHYFYSPYPTKTQTMRVKLASRNVESYTKLGNPTRSEDLLDYGPFRDVPAYSQDTFKVHYENNSPFLTITSMTRVIEVSHWGNIAVEENVDLKHTGAVLKGPFSRYDYQRQPDSGISSIRSFKTILPAAAQDVYYRDEIGNVSTSHLLILDDSVEMEIRPRFPLFGGWKTHYIVGYNLPSYEYLYNLGDQYALKMRFVDHVFDEQVIDSLTVKIILPEGAKNIEIDSPYEISRAPDELHYTYLDTFGRPVIVAYKKNLVEQHIQDIVVHYTFNKVLMLQEPLLVVAAFYILFFTVIIYVRLDFSITKDPAAEARMKVACITEQVLTLVNKRIGLYRHFDETVNRYKQSRDISTLNSGKKSLETEHKALTSEIALLQSRLKTEGSDLCDRVSEMQKLDAQVKELVLKSAVEAERLVAGKLKKDTYIENEKLISGKRQELVTKIDHILDAL

SEQ ID NO: 878389 - protein, 456 aa, Homo sapiens
SSVPLLGLCSFGVFAPTKTQTMRVKLASRNVESYTKLGNPTRSEDLLDYGPFRDVPAYSQDTFKVHYENNSPFLTITSMTRVIEVSHWGNIAVEENVDLKHTGAVLKGPFSRYDYQRQPDSGISSIRSFKTILPAAAQDVYYRDEIGNVSTSHLLILDDSVEMEIRPRFPLFGGWKTHYIVGYNLPSYEYLYNLGDQYALKMRFVDHVFDEQVIDSLTVKIILPEGAKNIEIDSPYEISRAPDELHYTYLDTFGRPVIVAYKKNLVEQHIQDIVVHYTFNKVLMLQEPLLVVAAFYILFFTVIIYVRLDFSITKDPAAEARMKVACITEQVLTLVNKRIGLYRHFDETVNRYKQSRDISTLNSGKKSLETEHKALTSEIALLQSRLKTEGSDLCDRVSEMQKLDAQVKELVLKSAVEAERLVAGKLKKDTYIENEKLISGKRQELVTKIDHILDAL

SEQ ID NO: 878390 - protein, 378 aa, Homo sapiens
MTRVIEVSHWGNIAVEENVDLKHTGAVLKGPFSRYDYQRQPDSGISSIRSFKTILPAAAQDVYYRDEIGNVSTSHLLILDDSVEMEIRPRFPLFGGWKTHYIVGYNLPSYEYLYNLGDQYALKMRFVDHVFDEQVIDSLTVKIILPEGAKNIEIDSPYEISRAPDELHYTYLDTFGRPVIVAYKKNLVEQHIQDIVVHYTFNKVLMLQEPLLVVAAFYILFFTVIIYVRLDFSITKDPAAEARMKVACITEQVLTLVNKRIGLYRHFDETVNRYKQSRDISTLNSGKKSLETEHKALTSEIALLQSRLKTEGSDLCDRVSEMQKLDAQVKELVLKSAVEAERLVAGKLKKDTYIENEKLISGKRQELVTKIDHILDAL

SEQ ID NO: 878391 - protein, 241 aa, Homo sapiens
EDPQLTAFGGRSKNIEIDSPYEISRAPDELHYTYLDTFGRPVIVAYKKNLVEQHIQDIVVHYTFNKVLMLQEPLLVVAAFYILFFTVIIYVRLDFSITKDPAAEARMKVACITEQVLTLVNKRIGLYRHFDETVNRYKQSRDISTLNSGKKSLETEHKALTSEIALLQSRLKTEGSDLCDRVSEMQKLDAQVKELVLKSAVEAERLVAGKLKKDTYIENEKLISGKRQELVTKIDHILDAL

SEQ ID NO: 878392 - protein, 406 aa, Homo sapiens
MEAPAAGLFLLLLLGTWAPAPGSASSEAPPLINEDVKRTVDLSSHLAKVTAEVVLAHLGGGSTSRATSFLLALEPELEARLAHLGVQVKGEDEEENNLEVRETKIKGKSGRFFTVKLPVALDPGAKISVIVETVYTHVLHPYPTQITQSEKQFVVFEGNHYFYSPYPTKTQTMRVKLASRNVESYTKLGNPTRSEDLLDYGPFRDVPAYSQDTFKVHYENNSPFLTITSMTRVIEVSHWGNIAVEENVDLKHTGAVLKGPFSRYDYQRQPDSGISSIRSFKTILPAAAQDVYYRDEIGNVSTSHLLILDDSVEMEIRPRFPLFGGWKTHYIVGYNLPSYEYLYNLGDQYALKMRFVDHVFDEQVIDSLTVKIILPEGAKNIEIDSPYEIRKRQELVTKIDHILDAL

SEQ ID NO: 878393 - protein, 380 aa, Homo sapiens
MEAPAAGLFLLLLLGTWAPAPGSASSEAPPLINEDVKRTVDLSSHLAKVTAEVVLAHLGGGSTSRATSFLLALEPELEARLAHLGVQVKGEDEEENNLEVRETKIKGKSGRFFTVKLPVALDPGAKISVIVETVYTHVLHPYPTQITQSEKQFVVFEGNHYFYSPYPTKTQTMRVKLASRNVESYTKLGNPTRSEDLLDYGPFRDVPAYSQDTFKVHYENNSPFLTITSMTRVIEVSHWGNIAVEENVDLKHTGAVLKGPFSRYDYQRQPDSGISSIRSFKTILPAAAQDVYYRDEIGNVSTSHLLILDDSVEMEIRPRFPLFGGWKTHYIVGYNLPRSTTSWMPCSPCPHPPGGPGCLHFAVAGRLGGSGRLCMEASES

SEQ ID NO: 878394 - protein, 267 aa, Homo sapiens
MEAPAAGLFLLLLLGTWAPAPGSASSEAPPLINEDVKRTVDLSSHLAKVTAEVVLAHLGGGSTSRATSFLLALEPELEARLAHLGVQVKGEDEEENNLEVRETKIKGKSGRFFTVKLPVALDPGAKISVIVETVYTHVLHPYPTQITQSEKQFVVFEGNHYFYSPYPTKTQTMRVKLASRNVESYTKLGNPTRSEDLLDYGPFRDVPAYSQDTFKVHYENNSPFLTITSMTRVIEVSHWGNIAVEENVDLKHTGAVLKGPFSRYDYQ

SEQ ID NO: 878395 - protein, 214 aa, Homo sapiens
MEAPAAGLFLLLLLGTWAPAPGSASSEAPPLINEDVKRTVDLSSHLAKVTAEVVLAHLGGGSTSRATSFLLALEPELEARLAHLGVQVKGEDEEENNLEVRETKIKGKSGRFFTVKLPVALDPGAKISVIVETVYTHVLHPYPTQITQSEKQFVVFEGNHYFYSPYPTKTQTMRVKLASRNVESYTKLGNPTRSEDLLDYGPFRDVPAYSQDTF

SEQ ID NO: 878396 - protein, 225 aa, Homo sapiens
GKANFYFLNLSKIHCFKEQNEQNYWTGRMVGESRDLGKGRSCKNEVKGEDEEENNLEVRETKIKGKSGRFFTVKLPVALDPGAKISVIVETVYTHVLHPYPTQITQSEKQFVVFEGNHYFYSPYPTKTQTMRVKLASRNVESYTKLGNPTRSEDLLDYGPFRDVPAYSQDTFKVHYENNSPFLTITSMTRVIEVSHWGNIAVEENVDLKHTGAVLKGPFSRYDYQ

SEQ ID NO: 878397 - protein, 80 aa, Homo sapiens
HERVFLELASHQALSLHRQDRPHPGCPVAPARILQGAQGACTLLWQADWVVVGGCAWRPVKADICKRPSRKRNQALRQAV

SEQ ID NO: 878398 - protein, 607 aa, Homo sapiens; identical to SEQ ID NO: 878384

SEQ ID NO: 878399 - protein, 534 aa, Homo sapiens
MQSWGDVGLASWDWVKGEDEEENNLEVRETKIKGKSGRFFTVKLPVALDPGAKISVIVETVYTHVLHPYPTQITQSEKQFVVFEGNHYFYSPYPTKTQTMRVKLASRNVESYTKLGNPTRSEDLLDYGPFRDVPAYSQDTFKVHYENNSPFLTITSMTRVIEVSHWGNIAVEENVDLKHTGAVLKGPFSRYDYQRQPDSGISSIRSFKTILPAAAQDVYYRDEIGNVSTSHLLILDDSVEMEIRPRFPLFGGWKTHYIVGYNLPSYEYLYNLGDQYALKMRFVDHVFDEQVIDSLTVKIILPEGAKNIEIDSPYEISRAPDELHYTYLDTFGRPVIVAYKKNLVEQHIQDIVVHYTFNKVLMLQEPLLVVAAFYILFFTVIIYVRLDFSITKDPAAEARMKVACITEQVLTLVNKRIGLYRHFDETVNRYKQSRDISTLNSGKKSLETEHKALTSEIALLQSRLKTEGSDLCDRVSEMQKLDAQVKELVLKSAVEAERLVAGKLKKDTYIENEKLISGKRQELVTKIDHILDAL

SEQ ID NO: 878400 - protein, 607 aa, Homo sapiens; identical to SEQ ID NO: 878384

SEQ ID NO: 878401 - protein, 378 aa, Homo sapiens; identical to SEQ ID NO: 878390

SEQ ID NO: 878402 - protein, 415 aa, Homo sapiens
MEAPAAGLFLLLLLGTWAPAPGSASSEAPPLINEDVKRTVDLSSHLAKVTAEVVLAHLGGGSTSRATSFLLALEPELEARLAHLGVQVKGEDEEENNLEVRETKIKGKSGRFFTVKLPVALDPGAKISVIVETVYTHYIVGYNLPSYEYLYNLGDQYALKMRFVDHVFDEQVIDSLTVKIILPEGAKNIEIDSPYEISRAPDELHYTYLDTFGRPVIVAYKKNLVEQHIQDIVVHYTFNKVLMLQEPLLVVAAFYILFFTVIIYVRLDFSITKDPAAEARMKVACITEQVLTLVNKRIGLYRHFDETVNRYKQSRDISTLNSGKKSLETEHKALTSEIALLQSRLKTEGSDLCDRVSEMQKLDAQVKELVLKSAVEAERLVAGKLKKDTYIENEKLISGKRQELVTKIDHILDAL

SEQ ID NO: 878403 - protein, 191 aa, Homo sapiens
TRPHIQDIVVHYTFNKVLMLQEPLLVVAAFYILFFTVIIYVRLDFSITKDPAAEARMKVACITEQVLTLVNKRIGLYRHFDETVNRYKQSRDISTLNSGKKSLETEHKALTSEIALLQSRLKTEGSDLCDRVSEMQKLDAQVKELVLKSAVEAERLVAGKLKKDTYIENEKLISGKRQELVTKIDHILDAL

SEQ ID NO: 878404 - protein, 296 aa, Homo sapiens
MEAPAAGLFLLLLLGTWAPAPGSASSEAPPLINEDVKRTVDLSSHLAKVTAEVVLAHLGGGSTSRATSFLLALEPELEARLAHLGVQVKGEDEEENNLEVRETKIKGKSGRFFTVKLPVALDPGAKISVIVETVYTHVLHPYPTQITQSEKQFVVFEGNHYFYSPYPTKTQTMRVKLASRNVESYTKLGNPTRSEDLLDYGPFRDVPAYSQDTFKVHYENNSPFLTITSMTRVIEVSHWGNIAVEENVDLKHTGAVLKGPFSRYDYQRQPDSGISSIRSFKTILPNCCPDSRIYCN

SEQ ID NO: 878405 - protein, 80 aa, Homo sapiens; identical to SEQ ID NO: 878397

SEQ ID NO: 878406 - protein, 214 aa, Homo sapiens; identical to SEQ ID NO: 878395

SEQ ID NO: 878407 - protein, 124 aa, Homo sapiens
LDSQRCRRATGLNRLIIGFISKQYVTSLLLNEPDGTFLLRFSDSEIGGITIAHVIRGQDGSPQIENIQPFSAKREATAQQDLLVELRPGHRTVLEGLHTEAVVIEDLLGQEEEVLWEQPPVGPH

SEQ ID NO: 878408 - protein, 102 aa, Homo sapiens
MDRVPFVVAERVPWEKMCETLNLKFMAEVGTNRGLLPEHFLFLAQKIFNDNSLSMEAFQHRSVSWSQFNKEILLGRGFTFWQWFDGVLDLTKRCLRSYWSDR

SEQ ID NO: 878409 - protein, 847 aa, Homo sapiens
MSLWGLVSKMPPEKVQRLYVDFPQHLRHLLGDWLESQPWEFLVGSDAFCCNLASALLSDTVQHLQASVGEQGEGSTILQHISTLESIYQRDPLKLVATFRQILQGEKKAVMEQFRHLPMPFHWKQEELKFKTGLRRLQHRVGEIHLLREALQKGAEAGQVSLHSLIETPANGTGPSEALAMLLQETTGELEAAKALVLKRIQIWKRQQQLAGNGAPFEESLAPLQERCESLVDIYSQLQQEVGAAGGELEPKTRASLTGRLDEVLRTLVTSCFLVEKQPPQVLKTQTKFQAGVRFLLGLRFLGAPAKPPLVRADMVTEKQARELSVPQGPGAGAESTGEIINNTVPLENSIPGNCCSALFKNLLLKKIKRCERKGTESVTEEKCAVLFSASFTLGPGKLPIQLQALSLPLVVIVHGNQDNNAKATILWDNAFSEMDRVPFVVAERVPWEKMCETLNLKFMAEVGTNRGLLPEHFLFLAQKIFNDNSLSMEAFQHRSVSWSQFNKEILLGRGFTFWQWFDGVLDLTKRCLRSYWSDRLIIGFISKQYVTSLLLNEPDGTFLLRFSDSEIGGITIAHVIRGQDGSPQIENIQPFSAKDLSIRSLGDRIRDLAQLKNLYPKKPKDEAFRSHYKPEQMGKDGRGYVPATIKMTVERDQPLPTPELQMPTMVPSYDLGMAPDSSMSMQLGPDMVPQVYPPHSHSIPPYQGLSPEESVNVLSAFQEPHLQMPPSLGQMSLPFDQPHPQGLLPCQPQEHAVSSPDPLLCSDVTMVEDSCLSQPVTAFPQGTWIGEDIFPPLLPPTEQDLTKLLLEGQGESGGGSLGAQPLLQPSHYGQSGISMSHMDLRANPSW

SEQ ID NO: 878410 - protein, 847 aa, Homo sapiens; identical to SEQ ID NO: 878409

SEQ ID NO: 878411 - protein, 847 aa, Homo sapiens; identical to SEQ ID NO: 878409

SEQ ID NO: 878412 - protein, 847 aa, Homo sapiens; identical to SEQ ID NO: 878409

SEQ ID NO: 878413 - protein, 847 aa, Homo sapiens; identical to SEQ ID NO: 878409

SEQ ID NO: 878414 - protein, 667 aa, Homo sapiens [sequence omitted]

SEQ ID NO: 878415 - protein, 956 aa, Homo sapiens
MSLWGLVSKMPPEKVQRLYVDFPQHLRHLLGDWLESQPWEFLVGSDAFCCNLASALLSDTVQHLQASVGEQGEGSTILQHISTLESIYQRDPLKLVATFRQILQGEKKAVMEQFRHLPMPFHWKQEELKFKTGLRRLQHRVGEIHLLREALQKGAEAGQVSLHSLIETPANGTGPSEALAMLLQETTGELEAAKALVLKRIQIWKRQQQLAGNGAPFEESLAPLQERCESLVDIYSQLQQEVGAAGGELEPKTRASLTGRLDEVLRTLVTSCFLVEKQPPQVLKTQTKFQAGVRFLLGLRFLGAPAKPPLVRADMVTEKQARELSVPQGPGAGAESTGEIINNTVPLENSIPGNCCSALFKNLLLKKIKRCERKGTESVTEEKCAVLFSASFTLGPGKLPIQLQALSLPLVVIVHGNQDNNAKATILWDNAFSEMDRVPFVVAERVPWEKMCETLNLKFMAEVGTNRGLLPEHFLFLAQKIFNDNSLSMEAFQHRSVSWSQFNKEILLGRGFTFWQWFDGVLDLTKRCLRSYWSDRLIIGFISKQYVTSLLLNEPDGTFLLRFSDSEIGGITIAHVIRGQDGEATPASPLSLCLCPLGFLLGMKCPDLPDADPDLQEVLPASLLPSVVYNVHLLTVSSVGTETSGSLSLRSPTLGPLSLALVEENRSYGEGLGKGKKVRTEGSQGLLPTIGSPQIENIQPFSAKDLSIRSLGDRIRDLAQLKNLYPKKPKDEAFRSHYKPEQMGKDGRGYVPATIKMTVERDQPLPTPELQMPTMVPSYDLGMAPDSSMSMQLGPDMVPQVYPPHSHSIPPYQGLSPEESVNVLSAFQEPHLQMPPSLGQMSLPFDQPHPQGLLPCQPQEHAVSSPDPLLCSDVTMVEDSCLSQPVTAFPQGTWIGEDIFPPLLPPTEQDLTKLLLEGQGESGGGSLGAQPLLQPSHYGQSGISMSHMDLRANPSW

SEQ ID NO: 878416 - protein, 474 aa, Homo sapiens
PIPWNMLPSMAGTSTRMPALYAAPIGLPSGTALSLPLVVIVHGNQDNNAKATILWDNAFSEMDRVPFVVAERVPWEKMCETLNLKFMAEVGTNRGLLPEHFLFLAQKIFNDNSLSMEAFQHRSVSWSQFNKEILLGRGFTFWQWFDGVLDLTKRCLRSYWSDRLIIGFISKQYVTSLLLNEPDGTFLLRFSDSEIGGITIAHVIRGQDGSPQIENIQPFSAKDLSIRSLGDRIRDLAQLKNLYPKKPKDEAFRSHYKPEQMGKDGRGYVPATIKMTVERDQPLPTPELQMPTMVPSYDLGMAPDSSMSMQLGPDMVPQVYPPHSHSIPPYQGLSPEESVNVLSAFQEPHLQMPPSLGQMSLPFDQPHPQGLLPCQPQEHAVSSPDPLLCSDVTMVEDSCLSQPVTAFPQGTWIGEDIFPPLLPPTEQDLTKLLLEGQGESGGGSLGAQPLLQPSHYGQSGISMSHMDLRANPSW

SEQ ID NO: 878417 - protein, 420 aa, Homo sapiens
FGHSEQDLDRVPFVVAERVPWEKMCETLNLKFMAEVGTNRGLLPEHFLFLAQKIFNDNSLSMEAFQHRSVSWSQFNKEILLGRGFTFWQWFDGVLDLTKRCLRSYWSDRLIIGFISKQYVTSLLLNEPDGTFLLRFSDSEIGGITIAHVIRGQDGSPQIENIQPFSAKDLSIRSLGDRIRDLAQLKNLYPKKPKDEAFRSHYKPEQMGKDGRGYVPATIKMTVERDQPLPTPELQMPTMVPSYDLGMAPDSSMSMQLGPDMVPQVYPPHSHSIPPYQGLSPEESVNVLSAFQEPHLQMPPSLGQMSLPFDQPHPQGLLPCQPQEHAVSSPDPLLCSDVTMVEDSCLSQPVTAFPQGTWIGEDIFPPLLPPTEQDLTKLLLEGQGESGGGSLGAQPLLQPSHYGQSGISMSHMDLRANPSW

SEQ ID NO: 878418 - protein, 518 aa, Homo sapiens
MEQFRHLPMPFHWKQEELKFKTGLRRLQHRVGEIHLLREALQKGAEAGQVSLHSLIETPANGTGPSEALAMLLQETTGELEAAKALVLKRIQIWKRQQQLAGNGAPFEESLAPLQERCESLVDIYSQLQQEVGAAGGELEPKTRASLTGRLDEVLRTLVTSCFLVEKQPPQVLKTQTKFQAGVRFLLGLRFLGAPAKPPLVRADMVTEKQARELSVPQGPGAGAESTGEIINNTVPLENSIPGNCCSALFKNLLLKKIKRCERKGTESVTEEKCAVLFSASFTLGPGKLPIQLQALSLPLVVIVHGNQDNNAKATILWDNAFSEMDRVPFVVAERVPWEKMCETLNLKFMAEVGTNRGLLPEHFLFLAQKIFNDNSLSMEAFQHRSVSWSQFNKEILLGRGFTFWQWFDGVLDLTKRCLRSYWSDRLIIGFISKQYVTSLLLNEPDGTFLLRFSDSEIGGITIAHVIRGQDGEATPASPLSLCLCPLGFLLGMKCPDLPDADPDLQEVLPASLLPSVV

SEQ ID NO: 878419 - protein, 847 aa, Homo sapiens; identical to SEQ ID NO: 878409

SEQ ID NO: 878420 - protein, 847 aa, Homo sapiens; identical to SEQ ID NO: 878409

SEQ ID NO: 878421 - protein, 427 aa, Homo sapiens
VIYEDPRTCRGFEILLGRGFTFWQWFDGVLDLTKRCLRSYWSDRLIIGFISKQYVTSLLLNEPDGTFLLRFSDSEIGGITIAHVIRGQDGSPQIENIQPFSAKDLSIRSLGDRIRDLAQLKNLYPKKPKDEAFRSHYKRELELAALIPSCHPLPPCSPLPSSPCPCVILMSLPYFIAVLLLLPHDPCPPFPPPFLPNPRALHGCLFLLTTAEQMGKDGRGYVPATIKMTVERDQPLPTPELQMPTMVPSYDLGMAPDSSMSMQLGPDMVPQVYPPHSHSIPPYQGLSPEESVNVLSAFQEPHLQMPPSLGQMSLPFDQPHPQGLLPCQPQEHAVSSPDPLLCSDVTMVEDSCLSQPVTAFPQGTWIGEDIFPPLLPPTEQDLTKLLLEGQGESGGGSLGAQPLLQPSHYGQSGISMSHMDLRANPSW

SEQ ID NO: 878422 - protein, 206 aa, Homo sapiens
KQAGTGLGFMEDQPLPTPELQMPTMVPSYDLGMAPDSSMSMQLGPDMVPQVYPPHSHSIPPYQGLSPEESVNVLSAFQEPHLQMPPSLGQMSLPFDQPHPQGLLPCQPQEHAVSSPDPLLCSDVTMVEDSCLSQPVTAFPQGTWIGEDIFPPLLPPTEQDLTKLLLEGQGESGGGSLGAQPLLQPSHYGQSGISMSHMDLRANPSW

SEQ ID NO: 878423 - protein, 423 aa, Homo sapiens
MSLWGLVSKMPPEKVQRLYVDFPQHLRHLLGDWLESQPWEFLVGSDAFCCNLASALLSDTVQHLQASVGEQGEGSTILQHISTLESIYQRDPLKLVATFRQILQGEKKAVMEQFRHLPMPFHWKQEELKFKTGLRRLQHRVGEIHLLREALQKGAEAGQVSLHSLIETPANGTGPSEALAMLLQETTGELEAAKALVLKRIQIWKRQQQLAGNGAPFEESLAPLQERCESLVDIYSQLQQEVGAAGGELEPKTRASLTGRLDEVLRTLVTSCFLVEKQPPQVLKTQTKFQAGVRFLPHLQMPPSLGQMSLPFDQPHPQGLLPCQPQEHAVSSPDPLLCSDVTMVEDSCLSQPVTAFPQGTWIGEDIFPPLLPPTEQDLTKLLLEGQGESGGGSLGAQPLLQPSHYGQSGISMSHMDLRANPSW

SEQ ID NO: 878424 - protein, 812 aa, Homo sapiens
MSLWGLVSKMPPEKVQRLYVDFPQHLRHLLGDWLESQPWEFLVGSDAFCCNLASALLSDTVQHLQASVGEQGEGSTILQHISTLESIYQRDPLKLVATFRQILQGEKKAVMEQFRHLPMPFHWKQEELKFKTGLRRLQHRVGEIHLLREALQKGAEAGQVSLHSLIETPANGTGPSEALAMLLQETTGELEAAKALVLKRIQIWKRQQQLAGNGAPFEESLAPLQERCESLVDIYSQLQQEVGAAGGELEPKTRASLTGRLDEVLRTLVTSCFLVEKQPPQVLKTQTKFQAGVRFLLGLRFLGAPAKPPLVRADMVTEKQARELSVPQGPGAGAESTGEIINNTVPLENSIPGNCCSALFKNLLLKKIKRCERKGTESVTEEKCAVLFSASFTLGPGKLPIQLQALSLPLVVIVHGNQDNNAKATILWDNAFSEMDRVPFVVAERVPWEKMCETLNLKFMAEVGTNRGLLPEHFLFLAQKIFNDNSLSMEAFQHRSVSWSQFNKEILLGRGFTFWQWFDGVLDLTKRCLRSYWSDRLIIGFISKQYVTSLLLNEPDGTFLLRFSDSEIGGITIAHVIRGQDGSPQIENIQPFSAKDLSIRSLGDRIRDLAQLKNLYPKKPKDEAFRSHYKPEQMGKDGRGYVPATIKMTVERDQPLPTPELQMPTMVPSYDLGMAPDSSMSMQLGPDMVPQVYPPHSHSIPPYQGLSPEESVNVLSAFQEPHLQMPPSLGQMSLPFDQPHPQGLLPCQPQEHAVSSPDPLLCSDVTMVEDSCLSQPVTAFPQGTCQIPVSQVEASDTCMRLCKSTRAEILRV

SEQ ID NO: 878425 - protein, 725 aa, Homo sapiens
MSLWGLVSKMPPEKVQRLYVDFPQHLRHLLGDWLESQPWEFLVGSDAFCCNLASALLSDTVQHLQASVGEQGEGSTILQHISTLESIYQRDPLKLVATFRQILQGEKKAVMEQFRHLPMPFHWKQEELKFKTGLRRLQHRVGEIHLLREALQKGAEAGQVSLHSLIETPANGTGPSEALAMLLQETTGELEAAKALVLKRIQIWKRQQQLAGNGAPFEESLAPLQERCESLVDIYSQLQQEVGAAGGELEPKTRASLTGRLDEVLRTLVTSCFLVEKQPPQVLKTQTKFQAGVRFLLGLRFLGAPAKPPLVRADMVTEKQARELSVPQGPGAGAESTGEIINNTVPLENSIPGNCCSALFKNLLLKKIKRCERKGTESVTEEKCAVLFSASFTLGPGKLPIQLQALSLPLVVIVHGNQDNNAKATILWDNAFSEMDRVPFVVAERVPWEKMCETLNLKFMAEVGTNRGLLPEHFLFLAQKIFNDNSLSMEAFQHRSVSWSQFNKEILLGRGFTFWQWFDGVLDLTKRCLRSYWSDRLIIGFISKQYVTSLLLNEPDGTFLLRFSDSEIGGITIAHVIRGQDGSPQIENIQPFSAKDLSIRSLGDRIRDLAQLKNLYPKKPKDEAFRSHYKPEQMGKDGRGYVPATIKMTVERDQPLPTPELQMPTMVPSYDLGMAPDSSMSMQLGPDMVPQVYPPHSHSIPPYQGLSPEESVNVLSAFQELLIRV

SEQ ID NO: 878426 - protein, 732 aa, Homo sapiens
MSLWGLVSKMPPEKVQRLYVDFPQHLRHLLGDWLESQPWEFLVGSDAFCCNLASALLSDTVQHLQASVGEQGEGSTILQHISTLESIYQRDPLKLVATFRQILQGEKKAVMEQFRHLPMPFHWKQEELKFKTGLRRLQHRVGEIHLLREALQKGAEAGQVSLHSLIETPANGTGPSEALAMLLQETTGELEAAKALVLKRIQIWKRQQQLAGNGAPFEESLAPLQERCESLVDIYSQLQQEVGAAGGELEPKTRASLTGRLDEVLRTLVTSCFLVEKQPPQVLKTQTKFQAGVRFLLGLRFLGAPAKPPLVRADMVTEKQARELSVPQGPGAGAESTGEIINNTVPLENSIPGNCCSALFKNLLLKKIKRCERKGTESVTEEKCAVLFSASFTLGPGKLPIQLQALSLPLVVIVHGNQDNNAKATILWDNAFSEMDRVPFVVAERVPWEKMCETLNLKFMAEVGTNRGLLPEHFLFLAQKIFNDNSLSMEAFQHRSVSWSQFNKEILLGRGFTFWQWFDGVLDLTKRCLRSYWSDRLIIGFISKQYVTSLLLNEPDGTFLLRFSDSEIGGITIAHVIRGQDGSPQIENIQPFSAKDLSIRSLGDRIRDLAQLKNLYPKKPKDEAFRSHYKPEQMGKDGRGYVPATIKMTVERDQPLPTPELQMPTMVPSYDLGMAPDSSMSMQLGPDMVPQVYPPHSHSIPPYQGLSPEESVNVLSAFQEVSEKPHGDTIPL

SEQ ID NO: 878427 - protein, 667 aa, Homo sapiens [sequence omitted]

SEQ ID NO: 878428 - protein, 358 aa, Homo sapiens
MSLWGLVSKMPPEKVQRLYVDFPQHLRHLLGDWLESQPWEFLVGSDAFCCNLASALLSDTVQHLQASVGEQGEGSTILQHISTLESIYQRDPLKLVATFRQILQGEKKAVMEQFRHLPMPFHWKQEELKFKTGLRRLQHRVGEIHLLREALQKGAEAGQVSLHSLIETPANGTGPSEALAMLLQETTGELEAAKALVLKRIQIWKRQQQLAGNGAPFEESLAPLQERCESLVDIYSQLQQEVGAAGGELEPKTRASLTGRLDEVLRTLVTSCFLVEKQPPQVLKTQTKFQAGVRFLLGLRFLGAPAKPPLVRADMVTEKQARELSVPQGPGAGAETLKIFLLWCSMKDSLVSGGRERG

SEQ ID NO: 878429 - protein, 229 aa, Homo sapiens [sequence omitted]

SEQ ID NO: 878430 - protein, 847 aa, Homo sapiens; identical to SEQ ID NO: 878409

SEQ ID NO: 878431 - protein, 847 aa, Homo sapiens; identical to SEQ ID NO: 878409

SEQ ID NO: 878432 - protein, 847 aa, Homo sapiens; identical to SEQ ID NO: 878409

SEQ ID NO: 878433 - protein, 847 aa, Homo sapiens; identical to SEQ ID NO: 878409

SEQ ID NO: 878434 - protein, 847 aa, Homo sapiens; identical to SEQ ID NO: 878409

SEQ ID NO: 878435 - protein, 919 aa, Homo sapiens
MSLWGLVSKMPPEKVQRLYVDFPQHLRHLLGDWLESQPWEFLVGSDAFCCNLASALLSDTVQHLQASVGEQGEGSTILQHISTLESIYQRDPLKLVATFRQILQGEKKAVMEQFRHLPMPFHWKQEELKFKTGLRRLQHRVGEIHLLREALQKGAEAGQVSLHSLIETPANGTGPSEALAMLLQETTGELEAAKALVLKRIQIWKRQQQLAGNGAPFEESLAPLQERCESLVDIYSQLQQEVGAAGGELEPKTRASLTGRLDEVLRTLVTSCFLVEKQPPQVLKTQTKFQAGVRFLLGLRFLGAPAKPPLVRADMVTEKQARELSVPQGPGAGAESTGEIINNTVPLENSIPGNCCSALFKNLLLKKIKRCERKGTESVTEEKCAVLFSASFTLGPGKLPIQLQALSLPLVVIVHGNQDNNAKATILWDNAFSEMDRVPFVVAERVPWEKMCETLNLKFMAEVGTNRGLLPEHFLFLAQKIFNDNSLSMEAFQHRSVSWSQFNKEILLGRGFTFWQWFDGVLDLTKRCLRSYWSDRLIIGFISKQYVTSLLLNEPDGTFLLRFSDSEIGGITIAHVIRGQDGSPQIENIQPFSAKDLSIRSLGDRIRDLAQLKNLYPKKPKDEAFRSHYKRELELAALIPSCHPLPPCSPLPSSPCPCVILMSLPYFIAVLLLLPHDPCPPFPPPFLPNPRALHGCLFLLTTAEQMGKDGRGYVPATIKMTVERDQPLPTPELQMPTMVPSYDLGMAPDSSMSMQLGPDMVPQVYPPHSHSIPPYQGLSPEESVNVLSAFQEPHLQMPPSLGQMSLPFDQPHPQGLLPCQPQEHAVSSPDPLLCSDVTMVEDSCLSQPVTAFPQGTWIGEDIFPPLLPPTEQDLTKLLLEGQGESGGGSLGAQPLLQPSHYGQSGISMSHMDLRANPSW

SEQ ID NO: 878436 - protein, 847 aa, Homo sapiens; identical to SEQ ID NO: 878409

SEQ ID NO: 878437 - protein, 462 aa, Homo sapiens
TVQLAKLLYFVILQEGSHGVVLYLIGNGRIGDHFNNAKATILWDNAFSEMDRVPFVVAERVPWEKMCETLNLKFMAEVGTNRGLLPEHFLFLAQKIFNDNSLSMEAFQHRSVSWSQFNKEILLGRGFTFWQWFDGVLDLTKRCLRSYWSDRLIIGFISKQYVTSLLLNEPDGTFLLRFSDSEIGGITIAHVIRGQDGSPQIENIQPFSAKDLSIRSLGDRIRDLAQLKNLYPKKPKDEAFRSHYKPEQMGKDGRGYVPATIKMTVERDQPLPTPELQMPTMVPSYDLGMAPDSSMSMQLGPDMVPQVYPPHSHSIPPYQGLSPEESVNVLSAFQEPHLQMPPSLGQMSLPFDQPHPQGLLPCQPQEHAVSSPDPLLCSDVTMVEDSCLSQPVTAFPQGTWIGEDIFPPLLPPTEQDLTKLLLEGQGESGGGSLGAQPLLQPSHYGQSGISMSHMDLRANPSW

SEQ ID NO: 878438 - protein, 387 aa, Homo sapiens
RTNNNRLSRSPRLFLFLAQKIFNDNSLSMEAFQHRSVSWSQFNKEILLGRGFTFWQWFDGVLDLTKRCLRSYWSDRLIIGFISKQYVTSLLLNEPDGTFLLRFSDSEIGGITIAHVIRGQDGSPQIENIQPFSAKDLSIRSLGDRIRDLAQLKNLYPKKPKDEAFRSHYKPEQMGKDGRGYVPATIKMTVERDQPLPTPELQMPTMVPSYDLGMAPDSSMSMQLGPDMVPQVYPPHSHSIPPYQGLSPEESVNVLSAFQEPHLQMPPSLGQMSLPFDQPHPQGLLPCQPQEHAVSSPDPLLCSDVTMVEDSCLSQPVTAFPQGTWIGEDIFPPLLPPTEQDLTKLLLEGQGESGGGSLGAQPLLQPSHYGQSGISMSHMDLRANPSW

SEQ ID NO: 878439 - protein, 376 aa, Homo sapiens
WVDRGLWVDRGLWVDRGLWVDRGLWVDRGLWVDEILLGRGFTFWQWFDGVLDLTKRCLRSYWSDRLIIGFISKQYVTSLLLNEPDGTFLLRFSDSEIGGITIAHVIRGQDGSPQIENIQPFSAKDLSIRSLGDRIRDLAQLKNLYPKKPKDEAFRSHYKPEQMGKDGRGYVPATIKMTVERDQPLPTPELQMPTMVPSYDLGMAPDSSMSMQLGPDMVPQVYPPHSHSIPPYQGLSPEESVNVLSAFQEPHLQMPPSLGQMSLPFDQPHPQGLLPCQPQEHAVSSPDPLLCSDVTMVEDSCLSQPVTAFPQGTWIGEDIFPPLLPPTEQDLTKLLLEGQGESGGGSLGAQPLLQPSHYGQSGISMSHMDLRANPSW

SEQ ID NO: 878440 - protein, 267 aa, Homo sapiens
MGSPQIENIQPFSAKDLSIRSLGDRIRDLAQLKNLYPKKPKDEAFRSHYKPEQMGKDGRGYVPATIKMTVERDQPLPTPELQMPTMVPSYDLGMAPDSSMSMQLGPDMVPQVYPPHSHSIPPYQGLSPEESVNVLSAFQEPHLQMPPSLGQMSLPFDQPHPQGLLPCQPQEHAVSSPDPLLCSDVTMVEDSCLSQPVTAFPQGTWIGEDIFPPLLPPTEQDLTKLLLEGQGESGGGSLGAQPLLQPSHYGQSGISMSHMDLRANPSW

SEQ ID NO: 878441 - protein, 280 aa, Homo sapiens
PRFLLPGTESLFSFKSVVLVEPELSTKDPLPTIAPQSERSDLAQLKNLYPKKPKDEAFRSHYKPEQMGKDGRGYVPATIKMTVERDQPLPTPELQMPTMVPSYDLGMAPDSSMSMQLGPDMVPQVYPPHSHSIPPYQGLSPEESVNVLSAFQEPHLQMPPSLGQMSLPFDQPHPQGLLPCQPQEHAVSSPDPLLCSDVTMVEDSCLSQPVTAFPQGTWIGEDIFPPLLPPTEQDLTKLLLEGQGESGGGSLGAQPLLQPSHYGQSGISMSHMDLRANPSW

SEQ ID NO: 878442 - protein, 193 aa, Homo sapiens
AGTVRVVWMPTMVPSYDLGMAPDSSMSMQLGPDMVPQVYPPHSHSIPPYQGLSPEESVNVLSAFQEPHLQMPPSLGQMSLPFDQPHPQGLLPCQPQEHAVSSPDPLLCSDVTMVEDSCLSQPVTAFPQGTWIGEDIFPPLLPPTEQDLTKLLLEGQGESGGGSLGAQPLLQPSHYGQSGISMSHMDLRANPSW

SEQ ID NO: 878443 - protein, 711 aa, Homo sapiens
MSLWGLVSKMPPEKVQRLYVDFPQHLRHLLGDWLESQPWEFLVGSDAFCCNLASALLSDTVQHLQASVGEQGEGSTILQHISTLESIYQRDPLKLVATFRQILQGEKKAVMEQFRHLPMPFHWKQEELKFKTGLRRLQHRVGEIHLLREALQKGAEAGQVSLHSLIETPANGTGPSEALAMLLQETTGELEAAKALVLKRIQIWKRQQQLAGNGAPFEESLAPLQERCESLVDIYSQLQQEVGAAGGELEPKTRASLTGRLDEVLRTLVTSCFLVEKQPPQVLKTQTKFQAGVRFLLGLRFLGAPAKPPLVRADMVTEKQARELSVPQGPGAGAESTGEIINNTVPLENSIPGNCCSALFKNLLLKKIKRCERKGTESVTEEKCAVLFSASFTLGPGKLPIQLQALSLPLVVIVHGNQDNNAKATILWDNAFSEMDRVPFVVAERVPWEKMCETLNLKFMAEVGTNRGLLPEHFLFLAQKIFNDNSLSMEAFQHRSVSWSQFNKEILLGRGFTFWQWFDGVLDLTKRCLRSYWSDRLIIGFISKQYVTSLLLNEPDGTFLLRFSDSEIGGITIAHVIRGQDGSPQIENIQPFSAKDLSIRSLGDRIRDLAQLKNLYPKKPKDEAFRSHYKPEQMGKDGRGYVPATIKMTVERDQPLPTPELQMPTMVPSYDLGMAPDSSMSMQLGPDMVPQVYPPHSHSIPPGIEDIGSQP

SEQ ID NO: 878444 - protein, 725 aa, Homo sapiens; identical to SEQ ID NO: 878425

SEQ ID NO: 878445 - protein, 711 aa, Homo sapiens; identical to SEQ ID NO: 878443

SEQ ID NO: 878446 - protein, 298 aa, Homo sapiens
MSLWGLVSKMPPEKVQRLYVDFPQHLRHLLGDWLESQPWEFLVGSDAFCCNLASALLSDTVQHLQASVGEQGEGSTILQHISTLESIYQRDPLKLVATFRQILQGEKKAVMEQFRHLPMPFHWKQEELKFKTGLRRLQHRVGEIHLLREALQKGAEAGQVSLHSLIETPANGTGPSEALAMLLQETTGELEAAKALVLKRIQIWKRQQQLAGNGAPFEESLAPLQERCESLVDIYSQLQQEVGAAGGELEPKTRASLTGRLDEVLRTLVTSCFLVEKQPPQVLKTQTKFQAGVRFLTV

SEQ ID NO: 878447 - protein, 329 aa, Homo sapiens
MADGGSPFLGRRDFVYPSSTRDPSASNGGGSPARREEKKRKAARLKFDFQAQSPKELTLQKGDIVYIHKEVDKNWLEGEHHGRLGIFPANYVEVLPADEIPKPIKPPTYQVLEYGEAVAQYTFKGDLEVELSFRKGEHICLIRKVNENWYEGRITGTGRQGIFPASYVQVSREPRLRLCDDGPQLPTSPRLTAAARSARHPSSPSALRSPADPTDLGGQTSPRRTGFSFPTQEPRPQTQNLGTPGPALSHSRGPSHPLDLGTSSPNTSQIHWTPYRAMYQYRPQNEDELELREGDRVDVMQQCDDGWFVGVSRRTQKFGTFPGNYVAPV

SEQ ID NO: 878448 - protein, 329 aa, Homo sapiens; identical to SEQ ID NO: 878447

SEQ ID NO: 878449 - protein, 832 aa, Homo sapiens
MARIPGVGRASASPSWEKKEESESDVVLLSPKDPDRGHAEEQLACPESSHLDPSMQGPPRSLRAGLSLDDFIPGHLQSHIGSSSRGTRVPVIRNGGSNTLNFQFHDPAPRTVCNGGYTPRRDASQHPDPAWYQTWPGPGSKPSASTKIPASQHTQNWSATWTKDSKRRDKRWVKYEGIGPVDESGMPIAPRSSVDRPRDWYRRMFQQIHRKMPDLQLDWTFEEPPRDPRHLGAQQRPAHRPGPATSSSGRSWDHSEELPRSTFNYRPGAFSTVLQPSNQVLRRREKVDNVWTEESWNQFLQELETGQRPKKPLVDDPGEKPSQPIEVLLERELAELSAELDKDLRAIETRLPSPKSSPAPRRAPEQRPPAGEWETREEEGGCPRPGGRERGAAGRGGRGRSRGPAGGGRNRRAVSGRDRSATLCGAPFPRHRGQLTPEQRTGVAAAGGAARLGRPRHGPGTPAGPCRASPFPAQRLGNPASAWSSSYPHAPYLGSARSLSPHKMADGGSPFLGRRDFVYPSSTRDPSASNGGGSPARREEKKRKAARLKFDFQAQSPKELTLQKGDIVYIHKEVDKNWLEGEHHGRLGIFPANYVEVLPADEIPKPIKPPTYQVLEYGEAVAQYTFKGDLEVELSFRKGEHICLIRKVNENWYEGRITGTGRQGIFPASYVQVSREPRLRLCDDGPQLPTSPRLTAAARSARHPSSPSALRSPADPTDLGGQTSPRRTGFSFPTQEPRPQTQNLGTPGPALSHSRGPSHPLDLGTSSPNTSQIHWTPYRAMYQYRPQNEDELELREGDRVDVMQQCDDGWFVGVSRRTQKFGTFPGNYVAPV

SEQ ID NO: 878450 - protein, 709 aa, Homo sapiens
MARIPGVGRASASPSWEKKEESESDVVLLSPKDPDRGHAEEQLACPESSHLDPSMQGPPRSLRAGLSLDDFIPGHLQSHIGSSSRGTRVPVIRNGGSNTLNFQFHDPAPRTVCNGGYTPRRDASQHPDPAWYQTWPGPGSKPSASTKIPASQHTQNWSATWTKDSKRRDKRWVKYEGIGPVDESGMPIAPRSSVDRPRDWYRRMFQQIHRKMPDLQLDWTFEEPPRDPRHLGAQQRPAHRPGPATSSSGRSWDHSEELPRSTFNYRPGAFSTVLQPSNQVLRRREKVDNVWTEESWNQFLQELETGQRPKKPLVDDPGEKPSQPIEVLLERELAELSAELDKDLRAIETRLPSPSPASAWSSSYPHAPYLGSARSLSPHKMADGGSPFLGRRDFVYPSSTRDPSASNGGGSPARREEKKRKAARLKFDFQAQSPKELTLQKGDIVYIHKEVDKNWLEGEHHGRLGIFPANYVEVLPADEIPKPIKPPTYQVLEYGEAVAQYTFKGDLEVELSFRKGEHICLIRKVNENWYEGRITGTGRQGIFPASYVQVSREPRLRLCDDGPQLPTSPRLTAAARSARHPSSPSALRSPADPTDLGGQTSPRRTGFSFPTQEPRPQTQNLGTPGPALSHSRGPSHPLDLGTSSPNTSQIHWTPYRAMYQYRPQNEDELELREGDRVDVMQQCDDGWFVGVSRRTQKFGTFPGNYVAPV

SEQ ID NO: 878451 - protein, 867 aa, Homo sapiens
MARIPGVGRASASPSWEKKEESESDVVLLSPKDPDRGHAEEQLACPESSHLDPSMQGPPRSLRAGLSLDDFIPGHLQSHIGSSSRGTRFHDPAPRTVCNGGYTPRRDASQHPDPAWYQTWPGPGSKPSASTKIPASQHTQNWSATWTKDSKRRDKRWVKYEGIGPVDESGMPIAPRSSVDRPRDWYRRMFQQIHRKMPDLQLDWTFEEPPRDPRHLGAQQRPAHRPGPATSSSGRSWDHSEELPRSTFNYRPGAFSTVLQPSNQVLRRREKVDNVWTEESWNQFLQELETGQRPKKPLVDDPGEKPSQPIEVLLERELAELSAELDKDLRAIETRLPSPKSSPAPRRAPEQRPPAGEWETREEEGGCPRPGGRERGAAGRGGRGRSRGPAGGGRNRRAVSGRDRSATLCGAPFPRHRGQLTPSRGPGSRPPGAQRGEGGPATAQALPLGPAGPHPSPRSDSGSRTSCGEPRTRETPWEEVAGMGAMGGQSGLGVTRVGCGAPGWRLSLCAPCSPASAWSSSYPHAPYLGSARSLSPHKMADGGSPFLGRRDFVYPSSTRDPSASNGGGSPARREEKKRKAARLKFDFQAQSPKELTLQKGDIVYIHKEVDKNWLEGEHHGRLGIFPANYVEVLPADEIPKPIKPPTYQVLEYGEAVAQYTFKGDLEVELSFRKGEHICLIRKVNENWYEGRITGTGRQGIFPASYVQVSREPRLRLCDDGPQLPTSPRLTAAARSARHPSSPSALRSPADPTDLGGQTSPRRTGFSFPTQEPRPQTQNLGTPGPALSHSRGPSHPLDLGTSSPNTSQIHWTPYRAMYQYRPQNEDELELREGDRVDVMQQCDDGWFVGVSRRTQKFGTFPGNYVAPV

SEQ ID NO: 878452 - protein, 868 aa, Homo sapiens
MARIPGVGRASASPSWEKKEESESDVVLLSPKDPDRGHAEEQLACPESSHLDPSMQGPPRSLRAGLSLDDFIPGHLQSHIGSSSRGTRVPVIRNGGSNTLNFQFHDPAPRTVCNGGYTPRRDASQHPDPAWYQTWPGPGSKPSASTKIPASQHTQNWSATWTKDSKRRDKRWVKYEGIGPVDESGMPIAPRSSVDRPRDWYRRMFQQIHRKMPDLQLDWTFEEPPRDPRHLGAQQRPAHRPGPATSSSGRSWDHSEELPRSTFNYRPGAFSTVLQPSNQVLRRREKVDNVWTEESWNQFLQELETGQRPKKPLVDDPGEKPSQPIEVLLERELAELSAELDKDLRAIETRLPSPKSSPAPRRAPEQRPPAGEWETREEEGGCPRPGGRERGAAGRGGRGRSRGPAGGGRNRRAVSGRDRSATLCGAPFPRHRGQLTPEQRTGVAAAGGAARLGRPRHGPGTPAGPCRASPFPAQRLGNPASAWSSSYPHAPYLGSARSLSPHKMADGGSPFLGRRDFVYPSSTRDPSASNGGGSPARREEKKVRRGPGVGDLEWSQGCHPGSATRPTERAHSVLSPAQRKAARLKFDFQAQSPKELTLQKGDIVYIHKEVDKNWLEGEHHGRLGIFPANYVEVLPADEIPKPIKPPTYQVLEYGEAVAQYTFKGDLEVELSFRKGEHICLIRKVNENWYEGRITGTGRQGIFPASYVQVSREPRLRLCDDGPQLPTSPRLTAAARSARHPSSPSALRSPADPTDLGGQTSPRRTGFSFPTQEPRPQTQNLGTPGPALSHSRGPSHPLDLGTSSPNTSQIHWTPYRAMYQYRPQNEDELELREGDRVDVMQQCDDGWFVGVSRRTQKFGTFPGNYVAPV

SEQ ID NO: 878453 - protein, 329 aa, Homo sapiens; identical to SEQ ID NO: 878447

SEQ ID NO: 878454 - protein, 365 aa, Homo sapiens
MADGGSPFLGRRDFVYPSSTRDPSASNGGGSPARREEKKVRRGPGVGDLEWSQGCHPGSATRPTERAHSVLSPAQRKAARLKFDFQAQSPKELTLQKGDIVYIHKEVDKNWLEGEHHGRLGIFPANYVEVLPADEIPKPIKPPTYQVLEYGEAVAQYTFKGDLEVELSFRKGEHICLIRKVNENWYEGRITGTGRQGIFPASYVQVSREPRLRLCDDGPQLPTSPRLTAAARSARHPSSPSALRSPADPTDLGGQTSPRRTGFSFPTQEPRPQTQNLGTPGPALSHSRGPSHPLDLGTSSPNTSQIHWTPYRAMYQYRPQNEDELELREGDRVDVMQQCDDGWFVGVSRRTQKFGTFPGNYVAPV

SEQ ID NO: 878455 - protein, 427 aa, Homo sapiens
PRAPASGTPAPSPSSRPAPGIGRAGASRTPRPARSPPLPSRELFRRRRPRLPLGPGVAGPDCAVSPRRARRRPDGPRSSGPRPDPSASNGGGSPARREEKKVRRGPGVGDLEWSQGCHPGSATRPTERAHSVLSPAQRKAARLKFDFQAQSPKELTLQKGDIVYIHKEVDKNWLEGEHHGRLGIFPANYVEVLPADEIPKPIKPPTYQVLEYGEAVAQYTFKGDLEVELSFRKGEHICLIRKVNENWYEGRITGTGRQGIFPASYVQVSREPRLRLCDDGPQLPTSPRLTAAARSARHPSSPSALRSPADPTDLGGQTSPRRTGFSFPTQEPRPQTQNLGTPGPALSHSRGPSHPLDLGTSSPNTSQIHWTPYRAMYQYRPQNEDELELREGDRVDVMQQCDDGWFVGVSRRTQKFGTFPGNYVAPV

SEQ ID NO: 878456 - protein, 250 aa, Homo sapiens
MADGGSPFLGRRDFVYPSSTRDPSASNGGGSPARREEKKRKAARLKFDFQAQSPKELTLQKGDIVYIHKEVDKNWLEGEHHGRLGIFPANYVEVLPADEIPKPIKPPTYQVLEYGEAVAQYTFKGDLEVELSFRKGEHICLIRKVNENWYEGRITGTGRQGIFPASYVQVSREPRLRLCDDGPQLPTSPRLTAAARSARHPSSPSALRSPADPTDLGGQTSPRRTGFSFPTQEPRPQTQTRDGILLESPS

SEQ ID NO: 878457 - protein, 684 aa, Homo sapiens
MARIPGVGRASASPSWEKKEESESDVVLLSPKDPDRGHAEEQLACPESSHLDPSMQGPPRSLRAGLSLDDFIPGHLQSHIGSSSRGTRVPVIRNGGSNTLNFQFHDPAPRTVCNGGYTPRRDASQHPDPAWYQTWPGPGSKPSASTKIPASQHTQNWSATWTKDSKRRDKRWVKYEGIGPVDESGMPIAPRSSVDRPRDWYRRMFQQIHRKMPDLQLDWTFEEPPRDPRHLGAQQRPAHRPGPATSSSGRSWDHSEELPRSTFNYRPGAFSTVLQPSNQVLRRREKVDNVWTEESWNQFLQELETGQRPKKPLVDDPGEKPSQPIEVLLERELAELSAELDKDLRAIETRLPSPKSSPAPRRAPEQRPPAGEWETREEEGGCPRPGGRERGAAGRGGRGRSRGPAGGGRNRRAVSGRDRSATLCGAPFPRHRGQLTPEQRTGVAAAGGAARLGRPRHGPGTPAGPCRASPFPAQRLGNPASAWSSSYPHAPYLGSARSLSPHKMADGGSPFLGRRDFVYPSSTRDPSASNGGGSPARREEKKRKAARLKFDFQAQSPKELTLQKGDIVYIHKEVDKNWLEGEHHGRLGIFPANYVEVLPADEIPKPIKPPTYQVLEYGEAVAQYTFKGDLEVELSFRKGEHICLIRKVNENWYASHSGRNVGGACSSWLSLFSGERPSSVSLKQ

SEQ ID NO: 878458 - protein, 718 aa, Homo sapiens
ERPRQAAAGQGCSCAPGRPRAQPPARRGRGHAEEQLACPESSHLDPSMQGPPRSLRAGLSLDDFIPGHLQSHIGSSSRGTRVPVIRNGGSNTLNFQFHDPAPRTVCNGGYTPRRDASQHPDPAWYQTWPGPGSKPSASTKIPASQHTQNWSATWTKDSKRRDKRWVKYEGIGPVDESGMPIAPRSSVDRPRDWYRRMFQQIHRKMPDLQLDWTFEEPPRDPRHLGAQQRPAHRPGPATSSSGRSWDHSEELPRSTFNYRPGAFSTVLQPSNQVLRRREKVDNVWTEESWNQFLQELETGQRPKKPLVDDPGEKPSQPIEVLLERELAELSAELDKDLRAIETRLPSPKSSPAPRRAPEQRPPAGPASAWSSSYPHAPYLGSARSLSPHKMADGGSPFLGRRDFVYPSSTRDPSASNGGGSPARREEKKRKAARLKFDFQAQSPKELTLQKGDIVYIHKEVDKNWLEGEHHGRLGIFPANYVEVLPADEIPKPIKPPTYQVLEYGEAVAQYTFKGDLEVELSFRKGEHICLIRKVNENWYEGRITGTGRQGIFPASYVQVSREPRLRLCDDGPQLPTSPRLTAAARSARHPSSPSALRSPADPTDLGGQTSPRRTGFSFPTQEPRPQTQNLGTPGPALSHSRGPSHPLDLGTSSPNTSQIHWTPYRAMYQYRPQNEDELELREGDRVDVMQQCDDGWFVGVSRRTQKFGTFPGNYVAPV

SEQ ID NO: 878459 - protein, 882 aa, Homo sapiens
MARIPGVGRASASPSWEKKEESESDVVLLSPKDPDRGHAEEQLACPESSHLDPSMQGPPRSLRAGLSLDDFIPGHLQSHIGSSSRGTRVPVIRNGGSNTLNFQFHDPAPRTVCNGGYTPRRDASQHPDPAWYQTWPGPGSKPSASTKIPASQHTQNWSATWTKDSKRRDKRWVKYEGIGPVDESGMPIAPRSSVDRPRDWYRRMFQQIHRKMPDLQLDWTFEEPPRDPRHLGAQQRPAHRPGPATSSSGRSWDHSEELPRSTFNYRPGAFSTVLQPSNQVLRRREKVDNVWTEESWNQFLQELETGQRPKKPLVDDPGEKPSQPIEVLLERELAELSAELDKDLRAIETRLPSPKSSPAPRRAPEQRPPAGEWETREEEGGCPRPGGRERGAAGRGGRGRSRGPAGGGRNRRAVSGRDRSATLCGAPFPRHRGQLTPSRGPGSRPPGAQRGEGGPATAQALPLGPAGPHPSPRSDSGSRTSCGEPRTRETPWEEVAGMGAMGGQSGLGVTRVGCGAPGWRLSLCAPCSPASAWSSSYPHAPYLGSARSLSPHKMADGGSPFLGRRDFVYPSSTRDPSASNGGGSPARREEKKRKAARLKFDFQAQSPKELTLQKGDIVYIHKEVDKNWLEGEHHGRLGIFPANYVEVLPADEIPKPIKPPTYQVLEYGEAVAQYTFKGDLEVELSFRKGEHICLIRKVNENWYEGRITGTGRQGIFPASYVQVSREPRLRLCDDGPQLPTSPRLTAAARSARHPSSPSALRSPADPTDLGGQTSPRRTGFSFPTQEPRPQTQNLGTPGPALSHSRGPSHPLDLGTSSPNTSQIHWTPYRAMYQYRPQNEDELELREGDRVDVMQQCDDGWFVGVSRRTQKFGTFPGNYVAPV

SEQ ID NO: 878460 - protein, 849 aa, Homo sapiens
MARIPGVGRASASPSWEKKEESESDVVLLSPKDPDRGHAEEQLACPESSHLDPSMQGPPRSLRAGLSLDDFIPGHLQSHIGSSSRGTRVPVIRNGGSNTLNFQFHDPAPRTVCNGGYTPRRDASQHPDPAWYQTWPGPGSKPSASTKIPASQHTQNWSATWTKDSKRRDKRWVKYEGIGPVDESGMPIAPRSSVDRPRDWYRRMFQQIHRKMPDLQLDWTFEEPPRDPRHLGAQQRPAHRPGPATSSSGRSWDHSEELPRSTFNYRPGAFSTVLQPSNQVLRRREKVDNVWTEESWNQFLQELETGQRPKKPLVDDPGEKPSQPIEVLLERELAELSAELDKDLRAIETRLPSPKSSPAPRRAPEQRPPAGLSGRRGRRKGAVPGRAGGNVARPGGADGGDRGAQPGEEGTAEPCPGGTAAPLSAGRRSRATEGSYLLAEDRGRGRRGRSAVRAAPPRPRHSRWALPGLTLPRAATREVGHPVESPGPGRRPGRSPASAWSSSYPHAPYLGSARSLSPHKMADGGSPFLGRRDFVYPSSTRDPSASNGGGSPARREEKKRKAARLKFDFQAQSPKELTLQKGDIVYIHKEVDKNWLEGEHHGRLGIFPANYVEVLPADEIPKPIKPPTYQVLEYGEAVAQYTFKGDLEVELSFRKGEHICLIRKVNENWYEGRITGTGRQGIFPASYVQVSREPRLRLCDDGPQLPTSPRLTAAARSARHPSSPSALRSPADPTDLGGQTSPRRTGFSFPTQEPRPQTQNLGTPGPALSHSRGPSHPLDLGTSSPNTSQIHWTPYRAMYQYRPQNEDELELREGDRVDVMQQCDDGWFVGVSRRTQKFGTFPGNYVAPV

SEQ ID NO: 878461 - protein, 382 aa, Homo sapiens [sequence omitted]

SEQ ID NO: 878462 - protein, 382 aa, Homo sapiens [sequence omitted]

SEQ ID NO: 878463 - protein, 329 aa, Homo sapiens; identical to SEQ ID NO: 878447

SEQ ID NO: 878464 - protein, 93 aa, Homo sapiens
AHEVAVHDGWFVDKKKKYHFCIRSHKRFERNGRDLCPFRCLPEDPEIRNVPWKLRCPGVSGLHGNLEPARMGWGAVALVGGRGPPPTSSFPRT

SEQ ID NO: 878465 - protein, 109 aa, Homo sapiens
PSTPACWLPSLPTQEPRPQNLGTPGPALSHSRGPSHPLDLGTSSPNTSQIHWTPYRAMYQYRPQNEDELELREGDRVDVMQQCDDGWFVGVSRRTQKFGTFPGNYVAPV

SEQ ID NO: 878466 - protein, 1136 aa, Homo sapiens [sequence omitted]

SEQ ID NO: 878467 - protein, 1035 aa, Homo sapiens
VTRCPQHILPMVGSTPHFGDPCAGSPGPGGRGDPDGRGDHLLEARRPRAHECLGEALRVMHQIISKYPLLNTVETLTAAGTLIAKVKAFHYESNNDLEKQEFEKALETIAVAFSSTVSEFLMGEVDSSTLLAVPPGDSSQSMESLYGPGSEGTPPSLDDCDAGCLPAEEVDVLLQRCEGGVDAALLYAKNMAKYMKDLISYLEKRTTLEMEFAKGLQKIAHNCRQSVMQEPHMPLLSIYSLALEQDLEFGHSMVQAVGTLQTQTFMQPLTLRRLEHEKRRKEIKEAWHRAQRKLQEAESNLRKAKQGYVQRCEDHDKARFLVAKAEEEQAGSAPGAGGTATKTLDKRRRLEEEAKNKAEEAMATYRTCVADAKTQKQELEDTKVTALRQIQEVIRQSDQTIKSATISYYQMMHMQTAPLPVHFQMLCESSKLYDPGQQYASHVRQLQRDQEPDVHYDFEPHVSANAWSPVMRARKSSFNVSDVARPEAAGSPPEEGGCTEGTPAKDHRAGRGHQVHKSWPLSISDSDSGLDPGPGAGDFKKFERTSSSGTMSSTEELVDPDGGAGASAFEQADLNGMTPELPVAVPSGPFRHEGLSKAARTHRLRKLRTPAKCRECNSYVYFQGAECEECCLACHKKCLETLAIQCGHKKLQGRLQLFGQDFSHAARSAPDGVPFIVKKCVCEIERRALRTKGIYRVNGVKTRVEKLCQAFENGKELVELSQASPHDISNVLKLYLRQLPEPLISFRLYHELVGLAKDSLKAEAEAKAASRGRQDGSESEAVAVALAGRLRELLRDLPPENRASLQYLLRHLRRIVEVEQDNKMTPGNLGIVFGPTLLRPRPTEATVSLSSLVDYPHQARVIETLIVHYGLVFEEEPEETPGGQDESSNQRAEVVVQVPYLEAGEAVVYPLQEAAADGCRESRVVSNDSDSDLEEASELLSSSEASALGHLSFLEQQQSEASLEVASGSHSGSEEQLEATAREDGDGDEDGPAQQLSGFNTNQSNNVLQAPLPPMRLRGGRMTLGSCRERQPEFV

SEQ ID NO: 878468 - protein, 1092 aa, Homo sapiens
MFSRKKRELMKTPSISKKNRAGSPSPQPSGELPRKDGADAVFPGPSLEPPAGSSGVKATGTLKRPTSLSRHASAAGFPLSGAASWTLGRSHRSPLTAASPGELPTEGAGPDVVEDISHLLADVARFAEGLEKLKECVLRDDLLEARRPRAHECLGEALRVMHQIISKYPLLNTVETLTAAGTLIAKVKAFHYESNNDLEKQEFEKALETIAVAFSSTVSEFLMGEVDSSTLLAVPPGDSSQSMESLYGPGSEGTPPSLDDCDAGCLPAEEVDVLLQRCEGGVDAALLYAKNMAKYMKDLISYLEKRTTLEMEFAKGLQKIAHNCRQSVMQEPHMPLLSIYSLALEQDLEFGHSMVQAVGTLQTQTFMQPLTLRRLEHEKRRKEIKEAWHRAQRKLQEAESNLRKAKQGYVQRCEDHDKARFLVAKAEEEQAGSAPGAGGTATKTLDKRRRLEEEAKNKAEEAMATYRTCVADAKTQKQELEDTKVTALRQIQEVIRQSDQTIKSATISYYQMMHMQTAPLPVHFQMLCESSKLYDPGQQYASHVRQLQRDQEPDVHYDFEPHVSANAWSPVMRARKSSFNVSDVARPEAAGSPPEEGGCTEGTPAKDHRAGRGHQVHKSWPLSISDSDSGLDPGPGAGDFKKFERTSSSGTMSSTEELVDPDGGAGASAFEQADLNGMTPELPVAVPSGPFRHEGLSKAARTHRLRKLRTPAKCRECNSYVYFQGAECEECCLACHKKCLETLAIQCGHKKLQGRLQLFGQDFSHAARSAPDGVPFIVKKCVCEIERRALRTKGIYRVNGVKTRVEKLCQAFENGKELVELSQASPHDISNVLKLYLRQLPEPLISFRLYHELVGLAKDSLKAEAEAKAASRGRQDGSESEAVAVALAGRLRELLRDLPPENRASLQYLLRHLRRPALIETLIVHYGLVFEEEPEETPGGQDESSNQRAEVVVQVPYLEAGEAVVYPLQEAAADGCRESRVVSNDSDSDLEEASELLSSSEASALGHLSFLEQQQSEASLEVASGSHSGSEEQLEATAREDGDGDEDGPAQQLSGFNTNQSNNVLQAPLPPMRLRGGRMTLGSCRERQPEFV

SEQ ID NO: 878469 - protein, 638 aa, Homo sapiens
MFSRKKRELMKTPSISKKNRAGSPSPQPSGELPRKDGADAVFPGPSLEPPAGSSGVKATGTLKRPTSLSRHASAAGFPLSGAASWTLGRSHRSPLTAASPGELPTEGAGPDVVEDISHLLADVARFAEGLEKLKECVLRDDLLEARRPRAHECLGEALRVMHQIISKYPLLNTVETLTAAGTLIAKVKAFHYESNNDLEKQEFEKALETIAVAFSSTVSEFLMGEVDSSTLLAVPPGDSSQSMESLYGPGSEGTPPSLDDCDAGCLPAEEVDVLLQRCEGGVDAALLYAKNMAKYMKDLISYLEKRTTLEMEFAKGLQKIAHNCRQSVMQEPHMPLLSIYSLALEQDLEFGHSMVQAVGTLQTQTFMQPLTLRRLEHEKRRKEIKEAWHRAQRKLLLRDLPPENRASLQYLLRHLRRIVEVEQDNKMTPGNLGIVFGPTLLRPRPTEATVSLSSLVDYPHQARVIETLIVHYGLVFEEEPEETPGGQDESSNQRAEVVVQVPYLEAGEAVVYPLQEAAADGCRESRVVSNDSDSDLEEASELLSSSEASALGHLSFLEQQQSEASLEVASGSHSGSEEQLEATAREDGDGDEDGPAQQLSGFNTNQSNNVLQAPLPPMRLRGGRMTLGSCRERQPEFV

SEQ ID NO: 878470 - protein, 595 aa, Homo sapiens
MFSRKKRELMKTPSISKKNRAGSPSPQPSGELPRKDGADAVFPGPSLEPPAGSSGVKATGTLKRPTSLSRHASAAGFPLSGAASWTLGRSHRSPLTAASPGELPTEGAGPDVVEDISHLLADVARFAEGLEKLKECVLRDDLLEARRPRAHECLGEALRVMHQIISKYPLLNTVETLTAAGTLIAKVKAFHYESNNDLEKQEFEKALETIAVAFSSTVSEFLMGEVDSSTLLAVPPGDSSQSMESLYGPGSEGTPPSLDDCDAGCLPAEEVDVLLQRCEGGVDAALLYAKNMAKYMKDLISYLEKRTTLEMEFAKGLQKIAHNCRQSVMQEPHMPLLSIYSLALEQDLEFGHSMVQAVGTLQTQTFMQPLTLRRLEHEKRRKEIKEAWHRAQRKLQEAESNLRKAKQGYVQRCEDHDKARFLVAKAEEEQAGSAPGAGGTATKTLDKRRRLEEEAKNKAEEAMATYRTCVADAKTQKQELEDTKVTALRQIQEVIRQSDQTIKSATISYYQMMHMQTAPLPVHFQMLCESSKLYDPGQQYASHVRQLQRDQEPDVHYDFEPHVSANAWSPVMRARKSSTVWFFHRHVYFAEIKSF

SEQ ID NO: 878471 - protein, 234 aa, Homo sapiens
SRPVSPQPLTLRRLEHEKRRKEIKEAWHRAQRKLQEAESNLRKAKQGYVQRCEDHDKARFLVAKAEEEQAGSAPGAGGTATKTLDKRRRLEEEAKNKAEEAMATYRTCVADAKTQKQELEDTKVTALRQIQEVIRQSDQTIKSATISYYQMMHMQTAPLPVHFQMLCESSKLYDPGQQYASHVRQLQRDQEPDVHYDFEPHVSANAWSPVMRARKSSTVWFFHRHVYFAEIKSF

SEQ ID NO: 878472 - protein, 279 aa, Homo sapiens
LVRARVCNRPRLWRTRYQSMESLYGPGSEGTPPSLDDCDAGCLPAEEVDVLLQRCEGGVDAALLYAKNMAKYMKDLISYLEKRTTLEMEFAKGLQKIAHNCRQSVMQEPHMPLLSIYSLALEQDLEFGHSMVQAVGTLQTQTFMQPLTLRRLEHEKRRKEIKEAWHRAQRKLQEAESNLRKAKQGYVQRCEDHDKARFLVAKAEEEQAGSAPGAGGTATKTLDKRRRLEEEAKNKRRSYGTTALVGERRTEQSEVPGRRGNRGPQGHQVGVPPRLRRRT

SEQ ID NO: 878473 - protein, 1140 aa, Homo sapiens
MISSIPARFALTVGGDGRFHSHERAGTPVIHARLELPRKDGADAVFPGPSLEPPAGSSGVKATGTLKRPTSLSRHASAAGFPLSGAASWTLGRSHRSPLTAASPGELPTEGAGPDVVEDISHLLADVARFAEGLEKLKECVLRDDLLEARRPRAHECLGEALRVMHQIISKYPLLNTVETLTAAGTLIAKVKAFHYESNNDLEKQEFEKALETIAVAFSSTVSEFLMGEVDSSTLLAVPPGDSSQSMESLYGPGSEGTPPSLDDCDAGCLPAEEVDVLLQRCEGGVDAALLYAKNMAKYMKDLISYLEKRTTLEMEFAKGLQKIAHNCRQSVMQEPHMPLLSIYSLALEQDLEFGHSMVQAVGTLQTQTFMQPLTLRRLEHEKRRKEIKEAWHRAQRKLQEAESNLRKAKQGYVQRCEDHDKARFLVAKAEEEQAGSAPGAGGTATKTLDKRRRLEEEAKNKAEEAMATYRTCVADAKTQKQELEDTKVTALRQIQEVIRQSDQTIKSATISYYQMMHMQTAPLPVHFQMLCESSKLYDPGQQYASHVRQLQRDQEPDVHYDFEPHVSANAWSPVMRARKSSFNVSDVARPEAAGSPPEEGGCTEGTPAKDHRAGRGHQVHKSWPLSISDSDSGLDPGPGAGDFKKFERTSSSGTMSSTEELVDPDGGAGASAFEQADLNGMTPELPVAVPSGPFRHEGLSKAARTHRLRKLRTPAKCRECNSYVYFQGAECEECCLACHKKCLETLAIQCGHKKLQGRLQLFGQDFSHAARSAPDGVPFIVKKCVCEIERRALRTKGIYRVNGVKTRVEKLCQAFENGKELVELSQASPHDISNVLKLYLRQLPEPLISFRLYHELVGLAKDSLKAEAEAKAASRGRQDGSESEAVAVALAGRLRELLRDLPPENRASLQYLLRHLRRIVEVEQDNKMTPGNLGIVFGPTLLRPRPTEATVSLSSLVDYPHQARVIETLIVHYGLVFEEEPEETPGGQDESSNQRAEVVVQVPYLEAGEAVVYPLQEAAADGCRESRVVSNDSDSDLEEASELLSSSEASALGHLSFLEQQQSEASLEVASGSHSGSEEQLEATAREDGDGDEDGPAQQLSGFNTNQSNNVLQAPLPPMRLRGGRMTLGSCRERQPEFV

SEQ ID NO: 878474 - protein, 1161 aa, Homo sapiens
MFSRKKRELMKTPSISKKNRAGSPSPQPSGELPRKDGADAVFPGPSLEPPAGSSGVKATGTLKRPTSLSRHASAAGFPLSGAASWTLGRSHRSPLTAASPGELPTEGAGPDVVEDISHLLADVARFAEGLEKLKECVLRDDLLEARRPRAHECLGEALRVMHQIISKYPLLNTVETLTAAGTLIAKVKAFHYESNNDLEKQEFEKALETIAVAFSSTVSEFLMGEVDSSTLLAVPPGDSSQSMESLYGPGSEGTPPSLDDCDAGCLPAEEVDVLLQRCEGGVDAALLYAKNMAKYMKDLISYLEKRTTLEMEFAKGLQKIAHNCRQSVMQEPHMPLLSIYSLALEQDLEFGHSMVQAVGTLQTQTFMQPLTLRRLEHEKRRKEIKEAWHRAQRKLQEAESNLRKAKQGYVQRCEDHDKARFLVAKAEEEQAGSAPGAGGTATKTLDKRRRLEEEAKNKAEEAMATYRTCVADAKTQKQELEDTKVTALRQIQEVIRQSDQTIKSATISYYQMMHMQTAPLPVHFQMLCESSKLYDPGQQYASHVRQLQRDQEPDVHYDFEPHVSANAWSPVMRARKSSFNVSDVARPEAAGSPPEEGGCTEGTPAKDHRAGRGHQVHKSWPLSISDSDSGLDPGPGAGDFKKFERTSSSGTMSSTEELVDPDGGAGASAFEQADLNGMTPELPVAVPSGPFRHEGLSKAARTHRLRKLRTPAKCRECNSYVYFQGAECEECCLACHKKCLETLAIQCGHKKLQGRLQLFGQDFSHAARSAPDGVPFIVKKCVCEIERRALRTKGIYRVNGVKTRVEKLCQAFENGKELVELSQASPHDISNVLKLYLRQLPEPLISFRLYHELVGLAKDSLKAEAEAKAASRGRQDGSESEAVAVALAGRLRELLRDLPPENRASLQYLLRHLRRWSRHMEWRARGPGSRSAPGPCPPRRIVEVEQDNKMTPGNLGIVFGPTLLRPRPTEATVSLSSLVDYPHQARVIETLIVHYGLVFEEEPEETPGGQDESSNQRAEVVVQVPYLEAGEAVVYPLQEAAADGCRESRVVSNDSDSDLEEASELLSSSEASALGHLSFLEQQQSEASLEVASGSHSGSEEQLEATAREDGDGDEDGPAQQLSGFNTNQSNNVLQAPLPPMRLRGGRMTLGSCRERQPEFV

SEQ ID NO: 878475 - protein, 308 aa, Homo sapiens
HQHLLTLDSAQLPEPLISFRLYHELVGLAKDSLKAEAEAKAASRGRQDGSESEAVAVALAGRLRELLRDLPPENRASLQYLLRHLRRIVEVEQDNKMTPGNLGIVFGPTLLRPRPTEATVSLSSLVDYPHQARVIETLIVHYGLVFEEEPEETPGGQDESSNQRAEVVVQVPYLEAGEAVVYPLQEAAADGCRESRVVSNDSDSDLEEASELLSSSEASALGHLSFLEQQQSEASLEVASGSHSGSEEQLEATAREDGDGDEDGPAQQLSGFNTNQSNNVLQAPLPPMRLRGGRMTLGSCRERQPEFV

SEQ ID NO: 878476 - protein, 159 aa, Homo sapiens [sequence omitted]

SEQ ID NO: 878477 - protein, 147 aa, Homo sapiens
MWLWVWLIHTLHSGLQKPRERSLPEATFQNLLHPPTDLPSPCPLFESRCQVLPADTWLLEGRCSFHLTMQACFAVGRAVLSSSQLHTGITWRVQKLPASVKEHQCISTANIPNARLDSLQLPGPPGFSSFQELSDPGSSLNVGYKLT

SEQ ID NO: 878478 - protein, 236 aa, Homo sapiens
GGRGGGRQIYKSSEAHTFFALNRILFSTDTYTHRNELFKEDGPDSTVQKKKRFALLLKESGYECRGLPVGSHIRSSTSTLNASDASPSVNVALGMANPHPALWPSEAQGEKPPRSNLPEPSPSSHDLPSPCPLFESRCQVLPADTWLLEGRCSFHLTMQACFAVGRAVLSSSQLHTGITWRVQKLPASVKEHQCISTANIPNARLDSLQLPGPPGFSSFQELSDPGSSLNVGYKLT

SEQ ID NO: 878479 - protein, 147 aa, Homo sapiens; identical to SEQ ID NO: 878477

SEQ ID NO: 878480 - protein, 385 aa, Homo sapiens
MKLVRKNIEKDNAGQVTLVPEEPEDMWHTYNLVQVGDSLRASTIRKVQTESSTGSVGSNRVRTTLTLCVEAIDFDSQACQLRVKGTNIQENEYVKMGAYHTIELEPNRQFTLAKKQWDSVVLERIEQACDPAWSADVAAVVMQEGLAHICLVTPSMTLTRAKVEVNIPRKRKGNCSQHDRALERFYEQVVQAIQRHIHFDVVKCILVASPGFVREQFCDYMFQQAVKTDNKLLLENRSKFLQVHASSGHKYSLKEALCDPTVASRLSDTKAAGEVKALDDFYKMLQHEPDRAFYGLKQVEKANEAMAIDTLLISDELFRHQDVATRSRYVRLVDSVKENAGTVRIFSSLHVSGEQLSQLTGVAAILRFPVPELSDQEGDSSSEED

SEQ ID NO: 878481 - protein, 1179 aa, Homo sapiens
MAPRPRARPGVAVACCWLLTVVLRCCVSFNVDVKNSMTFSGPVEDMFGYTVQQYENEEGKWVLIGSPLVGQPKNRTGDVYKCPVGRGESLPCVKLDLPVNTSIPNVTEVKENMTFGSTLVTNPNGGFLACGPLYAYRCGHLHYTTGICSDVSPTFQVVNSIAPVQECSTQLDIVIVLDGSNSIYPWDSVTAFLNDLLERMDIGPKQTQVGIVQYGENVTHEFNLNKYSSTEEVLVAAKKIVQRGGRQTMTALGIDTARKEAFTEARGARRGVKKVMVIVTDGESHDNHRLKKVIQDCEDENIQRFSIAILGSYNRGNLSTEKFVEEIKSIASEPTEKHFFNVSDELALVTIVKTLGERIFALEATADQSAASFEMEMSQTGFSAHYSQDWVMLGAVGAYDWNGTVVMQKASQIIIPRNTTFNVESTKKNEPLASYLGYTVNSATASSGDVLYIAGQPRYNHTGQVIIYRMEDGNIKILQTLSGEQIGSYFGSILTTTDIDKDSNTDILLVGAPMYMGTEKEEQGKVYVYALNQTRFEYQMSLEPIKQTCCSSRQHNSCTTENKNEPCGARFGTAIAAVKDLNLDGFNDIVIGAPLEDDHGGAVYIYHGSGKTIRKEYAQRIPSGGDGKTLKFFGQSIHGEMDLNGDGLTDVTIGGLGGAALFWSRDVAVVKVTMNFEPNKVNIQKKNCHMEGKETVCINATVCFDVKLKSKEDTIYEADLQYRVTLDSLRQISRSFFSGTQERKVQRNITVRKSECTKHSFYMLDKHDFQDSVRITLDFNLTDPENGPVLDDSLPNSVHEYIPFAKDCGNKEKCISDLSLHVATTEKDLLIVRSQNDKFNVSLTVKNTKDSAYNTRTIVHYSPNLVFSGIEAIQKDSCESNHNITCKVGYPFLRRGEMVTFKILFQFNTSYLMENVTIYLSATSDSEEPPETLSDNVVNISIPVKYEVGLQFYSSASEYHISIAANETVPEVINSTEDIGNEINIFYLIRKSGSFPMPELKLSISFPNMTSNGYPVLYPTGLSSSENANCRPHIFEDPFSINSGKKMTTSTDHLKRGTILDCNTCKFATITCNLTSSDISQVNVSLILWKPTFIKSYFSSLNLTIRGELRSENASLVLSSSNQKRELAIQISKDGLPGRVPLWVILLSAFAGLLLLMLLILALWKIGFFKRPLKKKMEK

SEQ ID NO: 878482 - protein, 839 aa, Homo sapiens
MAPRPRARPGVAVACCWLLTVVLRCCVSFNVDVKNSMTFSGPVEDMFGYTVQQYENEEGKWVLIGSPLVGQPKNRTGDVYKCPVGRGESLPCVKLDLPVNTSIPNVTEVKENMTFGSTLVTNPNGGFLACGPLYAYRCGHLHYTTGICSDVSPTFQVVNSIAPVQECSTQLDIVIVLDGSNSIYPWDSVTAFLNDLLERMDIGPKQTQVGIVQYGENVTHEFNLNKYSSTEEVLVAAKKIVQRGGRQTMTALGIDTARKEAFTEARGARRGVKKVMVIVTDGESHDNHRLKKVIQDCEDENIQRFSIAILGSYNRGNLSTEKFVEEIKSIASEPTEKHFFNVSDVTIGGLGGAALFWSRDVAVVKVTMNFEPNKVNIQKKNCHMEGKETVCINATVCFDVKLKSKEDTIYEADLQYRVTLDSLRQISRSFFSGTQERKVQRNITVRKSECTKHSFYMLDKHDFQDSVRITLDFNLTDPENGPVLDDSLPNSVHEYIPFAKDCGNKEEIKDSAYNTRTIVHYSPNLVFSGIEAIQKDSCESNHNITCKVGYPFLRRGEMVTFKILFQFNTSYLMENVTIYLSATSDSEEPPETLSDNVVNISIPVKYEVGLQFYSSASEYHISIAANETVPEVINSTEDIGNEINIFYLIRKSGSFPMPELKLSISFPNMTSNGYPVLYPTGLSSSENANCRPHIFEDPFSINSGKKMTTSTDHLKRGTILDCNTCKFATITCNLTSSDISQVNVSLILWKPTFIKSYFSSLNLTIRGELRSENASLVLSSSNQKRELAIQISKDGLPGRVPLWVILLSAFAGLLLLMLLILALWKIGFFKRPLKKKMEK

SEQ ID NO: 878483 - protein, 385 aa, Homo sapiens; identical to SEQ ID NO: 878480

SEQ ID NO: 878484 - protein, 385 aa, Homo sapiens; identical to SEQ ID NO: 878480

SEQ ID NO: 878485 - protein, 189 aa, Homo sapiens
RAGPAGWAQLKLSISFPNMTSNGYPVLYPTGLSSSENANCRPHIFEDPFSINSGKKMTTSTDHLKRGTILDCNTCKFATITCNLTSSDISQVNVSLILWKPTFIKSYFSSLNLTIRGELRSENASLVLSSSNQKRELAIQISKDGLPGRVPLWVILLSAFAGLLLLMLLILALWKIGFFKRPLKKKMEK

SEQ ID NO: 878486 - protein, 1037 aa, Homo sapiens
MAPRPRARPGVAVACCWLLTVVLRCCVSFNVDVKNSMTFSGPVEDMFGYTVQQYENEEGKWVLIGSPLVGQPKNRTGDVYKCPVGRGESLPCVKLDLPVNTSIPNVTEVKENMTFGSTLVTNPNGGFLACGPLYAYRCGHLHYTTGICSDVSPTFQVVNSIAPVQECSTQLDIVIVLDGSNSIYPWDSVTAFLNDLLERMDIGPKQTQVGIVQYGENVTHEFNLNKYSSTEEVLVAAKKIVQRGGRQTMTALGIDTARKEAFTEARGARRGVKKVMVIVTDGESHDNHRLKKVIQDCEDENIQRFSIAILGSYNRGNLSTEKFVEEIKSIASEPTEKHFFNVSDELALVTIVKTLGERIFALEATADQSAASFEMEMSQTGFSAHYSQDWVMLGAVGAYDWNGTVVMQKASQIIIPRNTTFNVESTKKNEPLASYLGYTVNSATASSGDVLYIAGQPRYNHTGQVIIYRMEDGNIKILQTLSGEQIGSYFGSILTTTDIDKDSNTDILLVGAPMYMGTEKEEQGKVYVYALNQTRFEYQMSLEPIKQTCCSSRQHNSCTTENKNEPCGARFGTAIAAVKDLNLDGFNDIVIGAPLEDDHGGAVYIYHGSGKTIRKEYAQRIPSGGDGKTLKFFGQSIHGEMDLNGDGLTDVTIGGLGGAALFWSRDVAVVKVTMNFEPNKVNIQKKNCHMEGKETVCINATVCFDVKLKSKEDTIYEADLQYRVTLDSLRQISRSFFSGTQERKVQRNITVRKSECTKHSFYMLDKHDFQDSVRITLDFNLTDPENGPVLDDSLPNSVHEYIPFAKDCGNKEKCISDLSLHVATTEKDLLIVRSQNDKFNVSLTVKNTKDSAYNTRTIVHYSPNLVFSGIEAIQKDSCESNHNITCKVGYPFLRRGEMVTFKILFQFNTSYLMENVTIYLSATSDSEEPPETLSDNVVNISIPVKYEVGLQFYSSASEYHISIAANETVPEVINSTEDIGNEINIFYLIRKSGSFPMPELKLSISFPNMTSNGYPVLMQTADPISLRILSVSTLERK

SEQ ID NO: 878487 - protein, 1155 aa, Homo sapiens
MAPRPRARPGVAVACCWLLTVVLRCCVSFNVDVKNSMTFSGPVEDMFGYTVQQYENEEGKWVLIGSPLVGQPKNRTGDVYKCPVGRGESLPCVKLDLPVNTSIPNVTEVKENMTFGSTLVTNPNGGFLACGPLYAYRCGHLHYTTGICSDVSPTFQVVNSIAPVQECSTQLDIVIVLDGSNSIYPWDSVTAFLNDLLERMDIGPKQTQVGIVQYGENVTHEFNLNKYSSTEEVLVAAKKIVQRGGRQTMTALGIDTARKEAFTEARGARRGVKKVMVIVTDGESHDNHRLKKVIQDCEDENIQRFSIAILGSYNRGNLSTEKFVEEIKSIASEPTEKHFFNVSDELALVTIVKTLGERIFALEATADQSAASFEMEMSQTGFSAHYSQDWVMLGAVGAYDWNGTVVMQKASQIIIPRNTTFNVESTKKNEPLASYLGYTVNSATASSGDVLYIAGQPRYNHTGQVIIYRMEDGNIKILQTLSGEQIGSYFGSILTTTDIDKDSNTDILLVGAPMYMGTEKEEQGKVYVYALNQTRFEYQMSLEPIKQTCCSSRQHNSCTTENKNEPCGARFGTAIAAVKDLNLDGFNDIVIGAPLEDDHGGAVYIYHGSGKTIRKEYAQRIPSGGDGKTLKFFGQSIHGEMDLNGDGLTDVTIGGLGGAALFWSRDVAVVKVTMNFEPNKVNIQKKNCHMEGKETVCINATVCFDVKLKSKEDTIYEADLQYRVTLDSLRQISRSFFSGTQERKVQRNITVRKSECTKHSFYMLDKHDFQDSVRITLDFNLTDPENGPVLDDSLPNSVHEYIPFAKDCGNKEKCISDLSLHVATTEKDLLIVRSQNDKFNVSLTVKNTKDSAYNTRTIVHYSPNLVFSGIEAIQKDSCESNHNITCKVGYPFLRRGEMVTFKILFQFNTSYLMENVTIYLSATSDSEEPPETLSDNVVNISIPVKYEVGLQFYSSASEYHISIAANETVPEVINSTEDIGNEINIFYLIRKSGSFPMPELKLSISFPNMTSNGYPVLYPTGLSSSENANCRPHIFEDPFSINSGKKMTTSTDHLKRGTILDCNTCKFATITCNLTSSDILILGPKPGWPQIEDVNQDQALALAIKEAKLQHPDMLVTKAVVYRETDPSPEERDKKPQEILTSVKNPDILIWPSLW

SEQ ID NO: 878488 - protein, 102 aa, Homo sapiens [sequence omitted]

SEQ ID NO: 878489 - protein, 1030 aa, Homo sapiens
MAPRPRARPGVAVACCWLLTVVLRCCVSFNVDVKNSMTFSGPVEDMFGYTVQQYENEEGKWVLIGSPLVGQPKNRTGDVYKCPVGRGESLPCVKLDLPVNTSIPNVTEVKENMTFGSTLVTNPNGGFLACGPLYAYRCGHLHYTTGICSDVSPTFQVVNSIAPVQECSTQLDIVIVLDGSNSIYPWDSVTAFLNDLLERMDIGPKQTQVGIVQYGENVTHEFNLNKYSSTEEVLVAAKKIVQRGGRQTMTALGIDTARKEAFTEARGARRGVKKVMVIVTDGESHDNHRLKKVIQDCEDENIQRFSIAILGSYNRGNLSTEKFVEEIKSIASEPTEKHFFNVSDELALVTIVKTLGERIFALEATADQSAASFEMEMSQTGFSAHYSQDWVMLGAVGAYDWNGTVVMQKASQIIIPRNTTFNVESTKKNEPLASYLGYTVNSATASSGDVLYIAGQPRYNHTGQVIIYRMEDGNIKILQTLSGEQIGSYFGSILTTTDIDKDSNTDILLVGAPMYMGTEKEEQGKVYVYALNQTRFEYQMSLEPIKQTCCSSRQHNSCTTENKNEPCGARFGTAIAAVKDLNLDGFNDIVIGAPLEDDHGGAVYIYHGSGKTIRKEYAQRIPSGGDGKTLKFFGQSIHGEMDLNGDGLTDVTIGGLGGAALFWSRDVAVVKVTMNFEPNKVNIQKKNCHMEGKETVCINATVCFDVKLKSKEDTIYEADLQYRVTLDSLRQISRSFFSGTQERKVQRNITVRKSECTKHSFYMLDKHDFQDSVRITLDFNLTDPENGPVLDDSLPNSVHEYIPFAKDCGNKEKCISDLSLHVATTEKDLLIVRSQNDKFNVSLTVKNTKDSAYNTRTIVHYSPNLVFSGIEAIQKDSCESNHNITCKVGYPFLRRGEMVTFKILFQFNTSYLMENVTIYLSATSDSEEPPETLSDNVVNISIPVKYEVGLQFYSSASEYHISIAANETVPEVINSTEDIGNEINIFYLIRKSGSFPMPELKLSISFPNMTSNGYPVLYPTGLSSSEMQTW

SEQ ID NO: 878490 - protein, 1179 aa, Homo sapiens; identical to SEQ ID NO: 878481

SEQ ID NO: 878491 - protein, 1179 aa, Homo sapiens; identical to SEQ ID NO: 878481

SEQ ID NO: 878492 - protein, 980 aa, Homo sapiens
MDIGPKQTQVGIVQYGENVTHEFNLNKYSSTEEVLVAAKKIVQRGGRQTMTALGIDTARKEAFTEARGARRGVKKVMVIVTDGESHDNHRLKKVIQDCEDENIQRFSIAILGSYNRGNLSTEKFVEEIKSIASEPTEKHFFNVSDELALVTIVKTLGERIFALEATADQSAASFEMEMSQTGFSAHYSQDWVMLGAVGAYDWNGTVVMQKASQIIIPRNTTFNVESTKKNEPLASYLGYTVNSATASSGDVLYIAGQPRYNHTGQVIIYRMEDGNIKILQTLSGEQIGSYFGSILTTTDIDKDSNTDILLVGAPMYMGTEKEEQGKVYVYALNQTRFEYQMSLEPIKQTCCSSRQHNSCTTENKNEPCGARFGTAIAAVKDLNLDGFNDIVIGAPLEDDHGGAVYIYHGSGKTIRKEYAQRIPSGGDGKTLKFFGQSIHGEMDLNGDGLTDVTIGGLGGAALFWSRDVAVVKVTMNFEPNKVNIQKKNCHMEGKETVCINATVCFDVKLKSKEDTIYEADLQYRVTLDSLRQISRSFFSGTQERKVQRNITVRKSECTKHSFYMLDKHDFQDSVRITLDFNLTDPENGPVLDDSLPNSVHEYIPFAKDCGNKEKCISDLSLHVATTEKDLLIVRSQNDKFNVSLTVKNTKDSAYNTRTIVHYSPNLVFSGIEAIQKDSCESNHNITCKVGYPFLRRGEMVTFKILFQFNTSYLMENVTIYLSATSDSEEPPETLSDNVVNISIPVKYEVGLQFYSSASEYHISIAANETVPEVINSTEDIGNEINIFYLIRKSGSFPMPELKLSISFPNMTSNGYPVLYPTGLSSSENANCRPHIFEDPFSINSGKKMTTSTDHLKRGTILDCNTCKFATITCNLTSSDISQVNVSLILWKPTFIKSYFSSLNLTIRGELRSENASLVLSSSNQKRELAIQISKDGLPGRVPLWVILLSAFAGLLLLMLLILALWKIGFFKRPLKKKMEK

SEQ ID NO: 878493 - protein, 1192 aa, Homo sapiens
MAPRPRARPGVAVACCWLLTVVLRCCVSFNVDVKNSMTFSGPVEDMFGYTVQQYENEEGKWVLIGSPLVGQPKNRTGDVYKCPVGRGESLPCVKLDLPVNTSIPNVTEVKENMTFGSTLVTNPNGGFLACGPLYAYRCGHLHYTTGICSDVSPTFQVVNSIAPVQECSTQLDIVIVLDGSNSIYPWDSVTAFLNDLLERMDIGPKQTQVGIVQYGENVTHEFNLNKYSSTEEVLVAAKKIVQRGGRQTMTALGIDTARKEAFTEARGARRGVKKVMVIVTDGESHDNHRLKKVIQDCEDENIQRFSIAILGSYNRGNLSTEKFVEEIKSIASEPTEKHFFNVSDELALVTIVKTLGERIFALEATADQSAASFEMEMSQTGFSAHYSQDWVMLGAVGAYDWNGTVVMQKASQIIIPRNTTFNVESTKKNEPLASYLGYTVNSATASSGDVLYIAGQPRYNHTGQVIIYRMEDGNIKILQTLSGEQIGSYFGSILTTTDIDKDSNTDILLVGAPMYMGTEKEEQGKVYVYALNQTRFEYQMSLEPIKQTCCSSRQHNSCTTENKNEPCGARFGTAIAAVKDLNLDGFNDIVIGAPLEDDHGGAVYIYHGSGKTIRKEYAQRIPSGGDGKTLKFFGQSIHGEMDLNGDGLTDVTIGGLGGAALFWSRDVAVVKVTMNFEPNKVNIQKKNCHMEGKETVCINATVCFDVKLKSKEDTIYEADLQYRVTLDSLRQISRSFFSGTQERKVQRNITVRKSECTKHSFYMLDKHDFQDSVRITLDFNLTDPENGPVLDDSLPNSVHEYIPFAKDCGNKEKCISDLSLHVATTEKDLLIVRSQNDKFNVSLTVKNTKDSAYNTRTIVHYSPNLVFSGIEAIQKDSCESNHNITCKVGYPFLRRGEMVTFKILFQFNTSYLMENVTIYLSATSDSEEPPETLSDNVVNISIPVKYEVGLQFYSSASEYHISIAANETVPEVINSTEDIGNEINIFYLIRKSGSFPMPELKLSISFPNMTSNGYPVLYPTGLSSSENANCRPHIFEDPFSINSGKKMTTSTDHLKRGTILDCNTCKFATITCNLTSSDISQVNVSLILWKPTFIKSYFSSLNLTIRGELRSENASLVLSSSNQKREIMGHPAECFCRIVAVNAAHFSTVEDWILQKTTEKENGEMKYFTKENNNNYSIIYPQVCLKYVTRNV

SEQ ID NO: 878494 - protein, 1037 aa, Homo sapiens; identical to SEQ ID NO: 878486

SEQ ID NO: 878495 - protein, 184 aa, Homo sapiens
RFPLSWALDYNVLTWQNLRHGTYPTGLSSSENANCRPHIFEDPFSINSGKKMTTSTDHLKRGTILDCNTCKFATITCNLTSSDISQVNVSLILWKPTFIKSYFSSLNLTIRGELRSENASLVLSSSNQKRELAIQISKDGLPGRVPLWVILLSAFAGLLLLMLLILALWKIGFFKRPLKKKMEK

SEQ ID NO: 878496 - protein, 189 aa, Homo sapiens
GRSNIKVYVALDSPGFVREQFCDYMFQQAVKTDNKLLLENRSKFLQVHASSGHKYSLKEALCDPTVASRLSDTKAAGEVKALDDFYKMLQHEPDRAFYGLKQVEKANEAMAIDTLLISDELFRHQDVATRSRYVRLVDSVKENAGTVRIFSSLHVSGEQLSQLTGVAAILRFPVPELSDQEGDSSSEED

SEQ ID NO: 878497 - protein, 273 aa, Homo sapiens
MAPRPRARPGVAVACCWLLTVVLRCCVSFNVDVKNSMTFSGPVEDMFGYTVQQYENEEGKWVLIGSPLVGQPKNRTGDVYKCPVGRGESLPCVKLDLPVNTSIPNVTEVKENMTFGSTLVTNPNGGFLACGPLYAYRCGHLHYTTGICSDVSPTFQVVNSIAPVQECSTQLDIVIVLDGSNSIYPWDSVTAFLNDLLERMDIGPKQTQVGIVQYGENVTHEFNLNKYSSTEEVLVAAKKIVQRGGRQTMTALGIDTARWKANYPCSHFICLLR

SEQ ID NO: 878498 - protein, 140 aa, Homo sapiens
MRCKRRLNFSGFGYSLPQQQPAAVARRNERERNRVKLVNLGFATLREHVPNGAANKKMSKVETLRSAVEYIRALQQLLDEHDAVSAAFQAGVLSPTISPNYSNDLNSMAGSPVSSYSSDEGSYDPLSPEEQELLDFTNWF

SEQ ID NO: 878499 - protein, 236 aa, Homo sapiens
MESSAKMESGGAGQQPQPQPQQPFLPPAACFFATAAAAAAAAAAAAAQSAQQQQQQQQQQQQAPQLRPAADGQPSGGGHKSAPKQVKRQRSSSPELMRCKRRLNFSGFGYSLPQQQPAAVARRNERERNRVKLVNLGFATLREHVPNGAANKKMSKVETLRSAVEYIRALQQLLDEHDAVSAAFQAGVLSPTISPNYSNDLNSMAGSPVSSYSSDEGSYDPLSPEEQELLDFTNWF

SEQ ID NO: 878500 - protein, 123 aa, Homo sapiens
MESSAKMESGGAGQQPQPQPQQPFLPPAACFFATAAAAAAAAAAAAAQSAQQQQQQQQQQQQAPQLRPAADGQPSGGGHKSAPKQVKRQRSSSPELMRCKRRLNFSGFGYSLPQHSCWTSMTR

SEQ ID NO: 878501 - protein, 140 aa, Homo sapiens
MDVFMKGLSKAKEGVVAAAEKTKQGVAEAAGKTKEGVLYVGSKTKEGVVHGVATVAEKTKEQVTNVGGAVVTGVTAVAQKTVEGAGSIAAATGFVKKDQLGKNEEGAPQEGILEDMPVDPDNEAYEMPSEEGYQDYEPEA

SEQ ID NO: 878502 - protein, 140 aa, Homo sapiens; identical to SEQ ID NO: 878501

SEQ ID NO: 878503 - protein, 140 aa, Homo sapiens; identical to SEQ ID NO: 878501

SEQ ID NO: 878504 - protein, 140 aa, Homo sapiens; identical to SEQ ID NO: 878501

SEQ ID NO: 878505 - protein, 140 aa, Homo sapiens; identical to SEQ ID NO: 878501

SEQ ID NO: 878506 - protein, 140 aa, Homo sapiens; identical to SEQ ID NO: 878501

SEQ ID NO: 878507 - protein, 126 aa, Homo sapiens
MDVFMKGLSKAKEGVVAAAEKTKQGVAEAAGKTKEGVLYVVAEKTKEQVTNVGGAVVTGVTAVAQKTVEGAGSIAAATGFVKKDQLGKNEEGAPQEGILEDMPVDPDNEAYEMPSEEGYQDYEPEA

SEQ ID NO: 878508 - protein, 115 aa, Homo sapiens
MDVFMKGLSKAKEGVVAAAEKTKQGVAEAAGKTKEGVLYVGSKTKEGVVHGVATVAEKTKEQVTNVGGAVVTGVTAVAQKTVEGAGSIAAATGFVKKDQLGKVWLCTFCVTFISW

SEQ ID NO: 878509 - protein, 140 aa, Homo sapiens; identical to SEQ ID NO: 878501

SEQ ID NO: 878510 - protein, 140 aa, Homo sapiens; identical to SEQ ID NO: 878501

SEQ ID NO: 878511 - protein, 140 aa, Homo sapiens; identical to SEQ ID NO: 878501

SEQ ID NO: 878512 - protein, 112 aa, Homo sapiens
MDVFMKGLSKAKEGVVAAAEKTKQGVAEAAGKTKEGVLYVGSKTKEGVVHGVATVAEKTKEQVTNVGGAVVTGVTAVAQKTVEGAGSIAAATGFVKKDQLGKEGYQDYEPEA

SEQ ID NO: 878513 - protein, 140 aa, Homo sapiens; identical to SEQ ID NO: 878501

SEQ ID NO: 878514 - protein, 106 aa, Homo sapiens
MEGWGDPGQTCSLAMRMEIREPTVTTPSGLNVGLQALLFSPRPLLHSYPHPLRWQIHLLRGQICLKIDVGTVSKTCHSDTTCMWIFFFLDRISLLSPRLEYSGTVM

SEQ ID NO: 878515 - protein, 120 aa, Homo sapiens
MVSKMIIENFEALKSWLSKTLEPICDADPSALAKYVLALVKKDKSEKELKALCIDQLDVFLQKETQIFVEKLFDAVNTKSYLPPPEQPSSGSLKVEFFPHQEKDIKKEEVTICVNTLQVI

SEQ ID NO: 878516 - protein, 213 aa, Homo sapiens
MVSKMIIENFEALKSWLSKTLEPICDADPSALAKYVLALVKKDKSEKELKALCIDQLDVFLQKETQIFVEKLFDAVNTKSYLPPPEQPSSGSLKVEFFPHQEKDIKKEEITKEEEREKKFSRRLNHSPPQSSSRYRENRSRDERKKDDRSRKRDYDRNPPRRDSYRDRYNRRRGRSRSYSRSRSRSWSKERLRERDRDRSRTRSRSRTRSRGK

SEQ ID NO: 878517 - protein, 102 aa, Homo sapiens
WIGLGSQFPSGQTLPLCPEDLLVWGKRPLEAPGSCQVLDMVNWEVLPSGHSAEVSPCWGMGNRAVNGPICISSMCLERKTSQSRRVRVPRSALATPTSSLKE

SEQ ID NO: 878518 - protein, 253 aa, Homo sapiens
MLQMLQPGPKLNPGVAVEFAWCLHYIICSQVSNPLLIGHGALSTLGLLLLDLAGAVQKTEDAGLELLACPVLRCLSNLLTEAAVETVGGQMQLRDERVVAALFILLQFFFQKQPSLLPEGLWLLNNLTANSPSFCTSLLSLDLIEPLLQLLPVSNVVSVMVLTVLCNVAEKGPAYCQRLWPGPLLPALLHTLAFSDTEVVGQSLELLHLLFLYQPEAVQVFLQQSGLQALERHQEEAQLQDRVYALQQTALQG

SEQ ID NO: 878519 - protein, 526 aa, Homo sapiens
LRSRCHLLRPWERCGCCFLRLSSSCSTMWSRRQGRLRPTVCGVEELRRRRREREAALRKARREQQLVSKRLLRNDAPEEAGEGCVAAILGETEVQQFLRQAQRGTEEKEREGALVSLRRGLQHPETQQTFIRLEGSMRTLVGLLTSNQALLQLEAARCLHELSHSEQSTVAEACLPATSYLLTYLSSHSSDFIELCLYTLGNLIVESEAVRRQLLPQGIVPALAACIQSPHVAVLEALGYALSQLLQAEEAPEKIIPPASASSSILASTLPQHMLQMLQPGPKLNPGVAVEFAWCLHYIICSQVSNPLLIGHGALSTLGLLLLDLAGAVQKTEDAGLELLACPVLRCLSNLLTEAAVETVGGQMQLRDERVVAALFILLQFFFQKQPSLLPEGLWLLNNLTANSPSFCTSLLSLDLIEPLLQLLPVSNVVSVMVLTVLCNVAEKGPAYCQRLWPGPLLPALLHTLAFSDTEVVGQSLELLHLLFLYQPEAVQVFLQQSGLQALERHQEEAQLQDRVYALQQTALQG

SEQ ID NO: 878520 - protein, 520 aa, Homo sapiens
LRSRCHLLRPWERCGCCFLRLSSSCSTMWSRRQGRLRPTVCGVEELRRRRREREAALRKARREQQLVSKRLLRNDAPEEAGEGCVAAILGETEVQQFLRQAQRGTEEKEREGALVSLRRGLQHPETQQTFIRLEGSMRTLVGLLTSNQALLQLEAARCLHELSHSEQSTVAEACLPATSYLLTYLSSHSSDFIELCLYTLGNLIVESEAVRRQLLPQGIVPALAACIQSPHVAVLEALGYALSQLLQAEEAPEKIIPSILASTLPQHMLQMLQPGPKLNPGVAVEFAWCLHYIICSQVSNPLLIGHGALSTLGLLLLDLAGAVQKTEDAGLELLACPVLRCLSNLLTEAAVETVGGQMQLRDERVVAALFILLQFFFQKQPSLLPEGLWLLNNLTANSPSFCTSLLSLDLIEPLLQLLPVSNVVSVMVLTVLCNVAEKGPAYCQRLWPGPLLPALLHTLAFSDTEVVGQSLELLHLLFLYQPEAVQVFLQQSGLQALERHQEEAQLQDRVYALQQTALQG

SEQ ID NO: 878521 - protein, 484 aa, Homo sapiens
LRSRCHLLRPWERCGCCFLRLSSSCSTMWSRRQGRLRPTVCGVEELRRRRREREAALRKARREQQLVSKRLLRNDAPEEAGEGCVAAILGETEVQQFLRQAQRGTEEKEREGALVSLRRGLQHPETQQTFIRLEGSMRTLVGLLTSNQALLQLEAARCLHELSHSEQSTVAEACLPATSYLLTYLSSHSSDFIELCLYTLGNLIVESEAVRRQLLPQGIVPALAACIQSPHVAVLEALGYALSQLLQAEEAPEKIIPSILASTLPQHMLQMLQPGPKLNPGVAVEFAWCLHYIICSQVSNPLLIGHGALSTLGLLLLDLAGAVQKTEDAGLELLACPVLRCLSNLLTEAAVETVGGQMQLRDERVVAALFILLQFFFQKQPSLLPEGLWLLNNLTANSPSFCTSLLSLDLIEPLLQLLPVSNVVSVMVLTVLCNVAEKGPAYCQRLWPGPLLPALLHTLAFSDTEVVGQSLELLHLLFLYQPEV

SEQ ID NO: 878522 - protein, 520 aa, Homo sapiens; identical to SEQ ID NO: 878520

SEQ ID NO: 878523 - protein, 643 aa, Homo sapiens
LRSRCHLLRPWERCGCCFLRLSSSCSTMWSRRQGRLRPTVCGVEELRRRRREREAALRKARREQQLVSKRLLRNDAPEEAGEGCVAAILGETEVQQFLRQAQRGTEEKEREGALVSLRRGLQHPETQQTFIRSVWMVWWREELGLLRDGPQAKQGSGTHSHRLEGSMRTLVGLLTSNQALLQLEAARCLHELSHSEQSTVAEACLPATSYLLTYLSSHSSDFIVSPVPSYLVLGLDFKIVLLGPFELAGRRKKTCLPLCLQPWLHPSSPHPLVSRKDSCSSVPITSSSPSPHTQPGMKQAKPSAFVACSQELCLYTLGNLIVESEAVRRQLLPQGIVPALAACIQSPHVAVLEALGYALSQLLQAEEAPEKIIPPASASSSILASTLPQHMLQMLQPGPKLNPGVAVEFAWCLHYIICSQVSNPLLIGHGALSTLGLLLLDLAGAVQKTEDAGLELLACPVLRCLSNLLTEAAVETVGGQMQLRDERVVAALFILLQFFFQKQPSLLPEGLWLLNNLTANSPSFCTSLLSLDLIEPLLQLLPVSNVVSVMVLTVLCNVAEKGPAYCQRLWPGPLLPALLHTLAFSDTEVVGQSLELLHLLFLYQPEAVQVFLQQSGLQALERHQEEAQLQDRVYALQQTALQG

SEQ ID NO: 878524 - protein, 253 aa, Homo sapiens; identical to SEQ ID NO: 878518

SEQ ID NO: 878525 - protein, 323 aa, Homo sapiens
LRSRCHLLRPWERCGCCFLRLSSSCSTMWSRRQGRLRPTVCGVEELRRRRREREAALRKARREQQLVSKRLLRNDAPEEAGEGCVAAILGETEVQQFLRQAQRGTEEKEREGALVSLRRGLQHPETQQTFIRLEGSMRTLVGLLTSNQALLQLEAARCLHELSHSEQSTVAEACLPATSYLLTYLSSHSSDFIELCLYTLGNLIVESEAVRRQLLPQGIVPALAACIQSPHVAVLEALGYALSQLLQAEEAPEKIIPSILGSISTQDMLEMLKAGPKVCKQVSNLCHCMGSVYSGVVCELVGVRKRDETEWDAVLMLRTVLRE

SEQ ID NO: 878526 - protein, 520 aa, Homo sapiens; identical to SEQ ID NO: 878520

SEQ ID NO: 878527 - protein, 520 aa, Homo sapiens; identical to SEQ ID NO: 878520

SEQ ID NO: 878528 - protein, 253 aa, Homo sapiens; identical to SEQ ID NO: 878518

SEQ ID NO: 878529 - protein, 250 aa, Homo sapiens
AGTVGQFGMKCLPPNLDLLKYNRSYTVENAYECSECGKAFKKKFHFIRHEKNHTRKKPFECNDCGKAYSRKAHLATHQKIHNGERPFVCNDCGKAFMHKAQLVVHQRLHTGEKPYECSQCGKTFTWNSSFNQHVKSHTLEKSFECKECGKTFRYSSSLYKHSRFHTGEKPYQCIICGKAFGNTSVLVTHQRIHTGEKPYSCIECGKAFIKKSHLLRHQITHTGEKPYECNRCGKAFSQKSNLIVHQKIHT

SEQ ID NO: 878530 - protein, 378 aa, Homo sapiens
MISFQESVTFQDVAVDFTAEEWQLLDCAERTLYWDVMLENYRNLISVGCPITKTKVILKVEQGQEPWMVEGANPHESSPESDYPLVDEPGKHRESKDNFLKSVLLTFNKILTMERIHHYNMSTSLNPMRKKSYKSFEKCLPPNLDLLKYNRSYTVENAYECSECGKAFKKKFHFIRHEKNHTRKKPFECNDCGKAYSRKAHLATHQKIHNGERPFVCNDCGKAFMHKAQLVVHQRLHTGEKPYECSQCGKTFTWNSSFNQHVKSHTLEKSFECKECGKTFRYSSSLYKHSRFHTGEKPYQCIICGKAFGNTSVLVTHQRIHTGEKPYSCIECGKAFIKKSHLLRHQITHTGEKPYECNRCGKAFSQKSNLIVHQKIHT

SEQ ID NO: 878531 - protein, 342 aa, Homo sapiens [sequence omitted]

SEQ ID NO: 878532 - protein, 223 aa, Homo sapiens
MEVQKEAQRIMTLSVWKMYHSRMQRGGLRLHRSLQLSLVMRSARELYLSAKVEALEPEVSLPAALPSDPRLHPPREAESTAETATPDGEHPFPEPMDTQEAPTAEETSACCAPRPAKVSRKRRSSSLSDGGDAGLVPSKKARLEEKEEEEGASSEVADRLQPPPAQAEGAFPNLARVLQRRFSGLLNCSPAAPPTAPPACEAKPACRPADSMLNVLVRAVVAF

SEQ ID NO: 878533 - protein, 223 aa, Homo sapiens; identical to SEQ ID NO: 878532

SEQ ID NO: 878534 - protein, 114 aa, Homo sapiens [sequence omitted]

SEQ ID NO: 878535 - protein, 223 aa, Homo sapiens; identical to SEQ ID NO: 878532

SEQ ID NO: 878536 - protein, 223 aa, Homo sapiens; identical to SEQ ID NO: 878532

SEQ ID NO: 878537 - protein, 181 aa, Homo sapiens
MEVQKEAQRIMTLSVWKMYHSRMQRGGLRLHRSLQLSLVMRSARELYLSAKVEALEPEVSLPAALPSDPRLHPPREAESTAETATPDGEHPFPEPMDTQEAPTAEETSACCAPRPAKVSRKRRSSSLSDGGDAGLVPSKKARLEEKEEEEGASSEVADRLQPPPAQAEGAFRRDLRPQVLS

SEQ ID NO: 878538 - protein, 387 aa, Homo sapiens
MRVGRHVYISQRQRASAILFMSWQESLSVTCRLWMWMTGHLCTGLQLQEKAECVQSLLELGMDSNLRDINESTPLAYALYCGHTACVKLLSQESRTEPTRPPPSQSSRPQKKERRFNVLNQIFCKNKKEEQRAHQKDPSRDRYREEDTSEVNDIITTFDSIVGTNCQEQPGDQVAMVEFKKKTSDNSKYLLPEKKPLARKGLPPIRTQSLPPITLGNNFLTASHRATSHAGLSSAPHHMAQRSQKSRSEQDLLNNRTGCQMLLDNPWKSDSNQVFSYKVWTVSSSDKLLDRLLSVRPGHQEVSVPPHLRHLHNPSSGQNFQHLSPNRHKIRDLPFTRNNLAPLPDQKFLSGEPLRTNRVLPAIPSQRRHSTAAEESEHSANPTSDEN

SEQ ID NO: 878539 - protein, 295 aa, Homo sapiens
MLRTEPTRPPPSQSSRPQKKERRFNVLNQIFCKNKKEEQRAHQKDPSRDRYREEDTSEVNDIITTFDSIVGTNCQEQPGDQVAMVEFKKKTSDNSKYLLPEKKPLARKGLPPIRTQSLPPITLGNNFLTASHRATSHAGLSSAPHHMAQRSQKSRSEQDLLNNRTGCQMLLDNPWKSDSNQVFSYKVWTVSSSDKLLDRLLSVRPGHQEVSVPPHLRHLHNPSSGQNFQHLSPNRHKIRDLPFTRNNLAPLPDQKFLSGEPLRTNRVLPAIPSQRRHSTAAEESEHSANPTSDEN

SEQ ID NO: 878540 - protein, 295 aa, Homo sapiens; identical to SEQ ID NO: 878539

SEQ ID NO: 878541 - protein, 295 aa, Homo sapiens; identical to SEQ ID NO: 878539

SEQ ID NO: 878542 - protein, 426 aa, Homo sapiens
MTKLITETPDQPIPFLIDHLQSKQGNRGQLQRTLSGSAALWAESEKSESKGTRRDFRSYDKPWQLNAKKPKKSKSDLAVSNISPPSPDSKSLPRSVEHPKWNWRTKPQSRDFDELNHILQESKKLGKALENLSRSIAISDELDKETVTFNSSLLRPRVIGEWIGREENDADPLAAEMLQPPIPRSKNDQWESEDSGSSPAGSLKMEPKNKGLKQQQQQHKKLLAAMLSQDSFESIHSPTPSVTEEDIDNEDDAMELLEDLNDLRMEGVTTLVPSGSKFNQGRPTYPAEPQAKVTLNICSRCRLQGDNLEERTEESLPILHSPDEKIPDSFDSLPGTEEALMEEGDEFEKASKLTGPGEASSGVGHSLKNYMEEDESLKQLQVVHQPWILPSDTESEGVEAEQEKRSADLLLCVPCSSCPTLVYSGL

SEQ ID NO: 878543 - protein, 537 aa, Homo sapiens
MSSPLASELSELAALRPGFRLSAPHARVAPRAATHARGRGRASHAGQPRLRSSCPGPSPGKRRVVPSGGAQPRVLPALSSRSHLFPMASHPQTRIQAYLEKNKIGPLFEELMTKLITETPDQPIPFLIDHLQSKQGNRGQLQRTLSGSAALWAESEKSESKGTRRDFRSYDKPWQLNAKKPKKSKSDLAVSNISPPSPDSKSLPRSVEHPKWNWRTKPQSRDFDELNHILQESKKLGKALENLSRSIAISDELDKETVTFNSSLLRPRVIGEWIGREENDADPLAAEMLQPPIPRSKNDQWESEDSGSSPAGSLKMEPKNKGLKQQQQQHKKLLAAMLSQDSFESIHSPTPSVTEEDIDNEDDAMELLEDLNDLRMEGVTTLVPSGSKFNQGRPTYPAEPQAKVTLNICSRCRLQGDNLEERTEESLPILHSPDEKIPDSFDSLPGTEEALMEEGDEFEKASKLTGPGEASSGVGHSLKNYMEEDESLKQLQVVHQPWILPSDTESEGVEAEQEKRSADLLLCVPCSSCPTLVYSGL

SEQ ID NO: 878544 - protein, 89 aa, Homo sapiens
NAGIRYRAHYQQHKKLLAAMLSQDSFESIHSPTPSVTEEDIDNEDDAMELLGFKETTWKKGQKSHYQYSILQMKKSQIHSIPCLGLKKH

SEQ ID NO: 878545 - protein, 406 aa, Homo sapiens
MSSPLASELSELAALRPGFRLSAPHARVAPRAATHARGRGRASHAGQPRLRSSCPGPSPGKRRVVPSGGAQPRVLPALSSRSHLFPMASHPQTRIQAYLEKNKIGPLFEELMTKLITETPDQPIPFLIDHLQSKQGNRGQLQRTLSGSAALWAESEKSESKGTRRDFRSYDKPWQLNAKKPKKSKSDLAVSNISPPSPDSKSLPRSVEHPKWNWRTKPQSRDFDELNHILQESKKLGKALENLSRSIAISDELDKETVTFNSSLLRPRVIGEWIGREENDADPLAAEMLQPPIPRSKNDQWESEDSGSSPAGSLKMEPKNKGLKQQQQQHKKLLAAMLSQDSFESIHSPTPSVTEEDIDNEDDAMELLGFKETTWKKGQKSHYQYSILQMKKSQIHSIPCLGLKKH

SEQ ID NO: 878546 - protein, 146 aa, Homo sapiens
EGWCALSTLLPRSVSLAGLPGREPAKSPRPCTGKAPNTQLLILCLRRSYITTLRSQRGALSSYEWKLPASHQSVSKPARARGPPRPSHHGAGSPCPLGLSQTPPSPSSAVLSVEVPDIGSFSLHPSQHCCGKHSPFACTSPDQCLF

SEQ ID NO: 878547 - protein, 92 aa, Homo sapiens
SEPRNIVLETYVRDRHLDPRSSVLESHVRVKHSDPRSSVLEFYVSDKHSDSSSSDVAYPWILEKKVDGSKCPIQQQLERKIKNFVLYLKHFS

SEQ ID NO: 878548 - protein, 75 aa, Homo sapiens
MVVLGMQTEEGHCIMLRGLAPSLGGTQVICKVVGLPSSIGFNTSSHLLFPATLQGAPTHFPCRWRQGGSTDNPPA

SEQ ID NO: 878549 - protein, 156 aa, Homo sapiens
MIHGRSVLHIVASLIILHLSGATKKGTEKQTTSETQKSVQCGTWTKHAEGGIFTSPNYPSKYPPDRECIYIIEAAPRQCIELYFDEKYSIEPSWECKFDHIEVRDGPFGFSPIIGRFCGQQNPPVIKSSGRFLWIKFFADGELESMGFSARYNFTP

SEQ ID NO: 878550 - protein, 164 aa, Homo sapiens
PSGPSLHSEMLAEPFPKVVASLIILHLSGATKKGTEKQTTSETQKSVQCGTWTKHAEGGIFTSPNYPSKYPPDRECIYIIEAAPRQCIELYFDEKYSIEPSWECKFDHIEVRDGPFGFSPIIGRFCGQQNPPVIKSSGRFLWIKFFADGELESMGFSARYNFTP

SEQ ID NO: 878551 - protein, 216 aa, Homo sapiens
RPHWPSRGPRGAAAWPAPQAAQGPASAAPCGRYPLRASAAPAGPGCPCCPVQAGPGAPSPLGTQAARPPARRHHLLCPRRPCTGKWGAWTSSQAAASPASELPHHTFFRTANSPSSAGLRAPVSWPGAWWGHRESCTSPVRTNSEPNAKPQPAATRTQATLPGQQTHSLLSPGSFPIPSKTSFCETSAMAAGETVSPPFHKTTPSSMRPISGCARM

SEQ ID NO: 878552 - protein, 291 aa, Homo sapiens
MSDQIKFIMDSLNKEPFRKNYNLITFDSLEPMQLLQVLSDVLAEIDPKQLVDIREEMPEQTAKRMLSLLGILKYKPSGNATDMSTFRQGLVIGSKPVIYPVLHWLLQRTNELKKRAYLARFLIKLEVPSEFLQDETVADTNKQYEELMEAFKTLHKEYEQLKISGFSTAEIRKDISAMEEEKDQLIKRVEHLKKRVETAQNHQWMLKIARQLRVEKEREEYLAQQKQEQKNQLFHAVQRLQRVQNQLKSMRQAAADAKPESLMKRLEEEIKFNLYMVTEKFPKELENKKKE

SEQ ID NO: 878553 - protein, 431 aa, Homo sapiens
MSDQIKFIMDSLNKEPFRKNYNLITFDSLEPMQLLQVLSDVLAEIDPKQLVDIREEMPEQTAKRMLSLLGILKYKPSGNATDMSTFRQGLVIGSKPVIYPVLHWLLQRTNELKKRAYLARFLIKLEVPSEFLQDETVADTNKQYEELMEAFKTLHKEYEQLKISGFSTAEIRKDISAMEEEKDQLIKRVEHLKKRVETAQNHQWMLKIARQLRVEKEREEYLAQQKQEQKNQLFHAVQRLQRVQNQLKSMRQAAADAKPESLMKRLEEEIKFNLYMVTEKFPKELENKKKELHFLQKVVSEPAMGHSDLLELESKINEINTEINQLIEKKMMRNEPIEGKLSLYRQQASIISRKKEAKAEELQEAKEKLASLEREASVKRNQTREFDGTEVLKGDERQDLTLSPRLECGGVIMAYCSLKLLGSSDPPTSAS

SEQ ID NO: 878554 - protein, 401 aa, Homo sapiens
MSDQIKFIMDSLNKEPFRKNYNLITFDSLEPMQLLQVLSDVLAEIDPKQLVDIREEMPEQTAKRMLSLLGILKYKPSGNATDMSTFRQGLVIGSKPVIYPVLHWLLQRTNELKKRAYLARFLIKLEVPSEFLQDETVADTNKQDISAMEEEKDQLIKRVEHLKKRVETAQNHQWMLKIARQLRVEKEREEYLAQQKQEQKNQLFHAVQRLQRVQNQLKSMRQAAADAKPESLMKRLEEEIKFNLYMVTEKFPKELENKKKELHFLQKVVSEPAMGHSDLLELESKINEINTEINQLIEKKMMRNEPIEGKLSLYRQQASIISRKKEAKAEELQEAKEKLASLEREASVKRNQTREFDGTEVLKGDERQDLTLSPRLECGGVIMAYCSLKLLGSSDPPTSAS

SEQ ID NO: 878555 - protein, 85 aa, Homo sapiens
MKIDQNNPLGMCPGPPRGKSFPSIQRCRIHRGRRALATREEPHERTRCPHKWERSWAQSVLTQPPSVSGAPGQRVTISCTGSSSN

SEQ ID NO: 878556 - protein, 103 aa, Homo sapiens
MPGPRAAREEVQRQRRHVEGEDETNCETPSPGLSGRSPVPAPSSAHHRKNGLTQGHTALNASCFAVSRRIKDTLGWAQCLKPVIPALQEAEAGGSLELRSWRQ

SEQ ID NO: 878557 - protein, 353 aa, Homo sapiens
MGSLYSEYLNPNKVQEHYNYTKETLETQETTSRQVASAFIVILCCAIVVENLLVLIAVARNSKFHSAMYLFLGNLAASDLLAGVAFVANTLLSGSVTLRLTPVQWFAREGSAFITLSASVFSLLAIAIERHVAIAKVKLYGSDKSCRMLLLIGASWLISLVLGGLPILGWNCLGHLEACSTVLPLYAKHYVLCVVTIFSIILLAIVALYVRIYCVVRSSHADMAAPQTLALLKTVTIVLGVFIVCWLPAFSILLLDYACPVHSCPILYKAHYFFAVSTLNSLLNPVIYTWRSRDLRREVLRPLQCWRPGVGVQGRRRGGTPGHHLLPLRSSSSLERGMHMPTSPTFLEGNTVV

SEQ ID NO: 878558 - protein, 206 aa, Homo sapiens [sequence omitted]

SEQ ID NO: 878559 - protein, 155 aa, Homo sapiens [sequence omitted]

SEQ ID NO: 878560 - protein, 318 aa, Homo sapiens
MLLGQKSQRYKAEEGLQAQGEAPGLMDVQIPTAEEQKAASSSSTLIMGTLEEVTDSGSPSPPQSPEGASSSLTVTDSTLWSQSDEGSSSNEEEGPSTSPDPAHLESLFREALDEKVAELVRFLLRKYQIKEPVTKAEMLESVIKNYKNHFPDIFSKASECMQVIFGIDVKEVDPAGHSYILVTCLGLSYDGLLGDDQSTPKTGLLIIVLGMILMEGSRAPEEAIWEALSVMGLYDGREHSVYWKLRKLLTQEWVQENYLEYRQAPGSDPVRYEFLWGPRALAETSYVKVLEHVVRVNARVRISYPSLHEEALGEEKGV

SEQ ID NO: 878561 - protein, 318 aa, Homo sapiens; identical to SEQ ID NO: 878560

SEQ ID NO: 878562 - protein, 318 aa, Homo sapiens; identical to SEQ ID NO: 878560

SEQ ID NO: 878563 - protein, 671 aa, Homo sapiens
MDFEDDYTHSACRNTYQGFNGMDRDYGPGSYGGMDRDYGHGSYGGQRSMDSYLNQSYGMDNHSGGGGGSRFGPYESYDSRSSLGGRDLYRSGYGFNEPEQSRFGGSYGGRFESSYRNSLDSFGGRNQGGSSWEAPYSRSKLRPGFMEDRGRENYSSYSSFSSPHMKPAPVGSRGRGTPAYPESTFGSRNYDAFGGPSTGRGRGRGHMGDFGSIHRPGIVVDYQNKSTNVTVAAARGIKRKMMQPFNKPSGTFIKKPKLAKPMEKISLSKSPTKTDPKNEEEEKRRIEARREKQRRRREKNSEKYGDGYRMAFTCSFCKFRTFEEKDIELHLESSSHQETLDHIQKQTKFDKVVMEFLHECMVNKFKKTSIRKQQTNNQTEVVKIIEKDVMEGVTVDDHMMKVETVHCSACSVYIPALHSSVQQHLKSPDHIKGKQAYKEQIKRESVLTATSILNNPIVKARYERFVKGENPFEIQDHSQDQQIEGDKPQQITHKNDPKNEEEEKRRIEAGERNQRRKEEKKTSEKYGDGYRMAFTMFIFRTLSEHLKKKILNLHLESSSHQETLDHIQKQTKFDKVVHGVFGMSVLGELDARNNILFRKGKDKLFHQKVVKHKLTTMGWTCSVDVTCGGSAVMRLAVLILLLLVRAKLWTSRNRLEIRRVGYLIQGKLREL

SEQ ID NO: 878564 - protein, 532 aa, Homo sapiens
MDFEDDYTHSACRNTYQGFNGMDRDYGPGSYGGMDRDYGHGSYGGQRSMDSYLNQSYGMDNHSGGGGGSRFGPYESYDSRSSLGGRDLYRSGYGFNEPEQSRFGGSYGGRFESSYRNSLDSFGGRNQGGSSWEAPYSRSKLRPGFMEDRGRENYSSYSSFSSPHMKPAPVGSRGRGTPAYPESTFGSRNYDAFGGPSTGRGRGRGHMGDFGSIHRPGIVVDYQNKSTNVTVAAARGIKRKMMQPFNKPSGTFIKKPKLAKPMEKISLSKSPTKTDPKNEEEEKRRIEARREKQRRRREKNSEKYGDGYRMAFTCSFCKFRTFEEKDIELHLESSSHQETLDHIQKQTKFDKVVMEFLHECMVNKFKKTSIRKQQTNNQTEVVKIIEKDVMEGVTVDDHMMKVETVHCSACSVYIPALHSSVQQHLKSPDHIKGKQAYKEQIKRESVLTATSILNNPIVKARYERFVKGENPFEIQDHSQDQQIEGDEEDEEKIDEPIEEEEDEDEEEEAEEVGEVEEVEEVEEVREGGIEGE

SEQ ID NO: 878565 - protein, 736 aa, Homo sapiens
MPVPWFLLSLALGRSPVVLSLERLVGPQDATHCSPGLSCRLWDSDILCLPGDIVPAPGPVLAPTHLQTELVLRCQKETDCDLCLRVAVHLAVHGHWEEPEDEEKFGGAADSGVEEPRNASLQAQVVLSFQAYPTARCVLLEVQVPAALVQFGQSVGSVVYDCFEAALGSEVRIWSYTQPRYEKELNHTQQLPALPWLNVSADGDNVHLVLNVSEEQHFGLSLYWNQVQGPPKPRWHKNLTGPQIITLNHTDLVPCLCIQVWPLEPDSVRTNICPFREDPRAHQNLWQAARLRLLTLQSWLLDAPCSLPAEAALCWRAPGGDPCQPLVPPLSWENVTVDKVLEFPLLKGHPNLCVQVNSSEKLQLQECLWADSLGPLKDDVLLLETRGPQDNRSLCALEPSGCTSLPSKASTRAARLGEYLLQDLQSGQCLQLWDDDLGALWACPMDKYIHKRWALVWLACLLFAAALSLILLLKKDHAKGWLRLLKQDVRSGGEWEQALGGGPPPGSQACASSPLPSPSVFSGSGRQGPAALLLYSADDSGFERLVGALASALCQLPLRVAVDLWSRRELSAQGPVAWFHAQRRQTLQEGGVVVLLFSPGAVALCSEWLQDGVSGPGAHGPHDAFRASLSCVLPDFLQGRAPGSYVGACFDRLLHPDAVPALFRTVPVFTLPSQLPDFLGALQQPRAPRSGRLQERAEQVSRALQPALDSYFHPPGTPAPGRGVGPGAGPGAGDGT

SEQ ID NO: 878566 - protein, 726 aa, Homo sapiens
MPVPWFLLSLALGRSPVVLSLERLVGPQDATHCSPGLSCRLWDSDILCLPGDIVPAPGPVLAPTHLQTELVLRCQKETDCDLCLRVAVHLAVHASLQAQVVLSFQAYPTARCVLLEVQVPAALVQFGQSVGSVVYDCFEAALGSEVRIWSYTQPRYEKELNHTQQLPDCRGLEVWNSIPSCWALPWLNVSADGDNVHLVLNVSEEQHFGLSLYWNQVQGPPKPRWHKNLTGPQIITLNHTDLVPCLCIQVWPLEPDSVRTNICPFREDPRAHQNLWQAARLRLLTLQSWLLDAPCSLPAEAALCWRAPGGDPCQPLVPPLSWENVTVDKVLEFPLLKGHPNLCVQVNSSEKLQLQECLWADSLGPLKDDVLLLETRGPQDNRSLCALEPSGCTSLPSKASTRAARLGEYLLQDLQSGQCLQLWDDDLGALWACPMDKYIHKRWALVWLACLLFAAALSLILLLKKDHAKGWLRLLKQDVRSGGEWEQALGGGPPPGSQACASSPLPSPSVFSGSGRQGPRGSAPLLSHDSGFERLVGALASALCQLPLRVAVDLWSRRELSAQGPVAWFHAQRRQTLQEGGVVVLLFSPGAVALCSEWLQDGVSGPGAHGPHDAFRASLSCVLPDFLQGRAPGSYVGACFDRLLHPDAVPALFRTVPVFTLPSQLPDFLGALQQPRAPRSGRLQERAEQVSRALQPALDSYFHPPGTPAPGRGVGPGAGPGAGDGT

SEQ ID NO: 878567 - protein, 567 aa, Homo sapiens
MPVPWFLLSLALGRSPVVLSLERLVGPQDATHCSPGLSCRLWDSDILCLPGDIVPAPGPVLAPTHLQTELVLRCQKETDCDLCLRVAVHLAVHGHWEEPEDEEKFGGAADSGVEEPRNASLQAQVVLSFQAYPTARCVLLEVQVPAALVQFGQSVGSVVYDCFEAALGSEVRIGPTAFLGEVTVDVNSSEKLQLQECLWADSLGPLKDDVLLLETRGPQDNRSLCALEPSGCTSLPSKASTRAARLGEYLLQDLQSGQCLQLWDDDLGALWACPMDKYIHKRWALVWLACLLFAAALSLILLLKKDHAKGWLRLLKQDVRSGGEWEQALERRAAPGEPGLCQLTSSLPICFLRQRPPGAARLCSSYSADDSGFERLVGALASALCQLPLRVAVDLWSRRELSAQGPVAWFHAQRRQTLQEGGVVVLLFSPGAVALCSEWLQDGVSGPGAHGPHDAFRASLSCVLPDFLQGRAPGSYVGACFDRLLHPDAVPALFRTVPVFTLPSQLPDFLGALQQPRAPRSGRLQERAEQVSRALQPALDSYFHPPGTPAPGRGVGPGAGPGAGDGT

SEQ ID NO: 878568 - protein, 756 aa, Homo sapiens
MPVPWFLLSLALGRSPVVLSLERLVGPQDATHCSPGLSCRLWGATKFWAWNSFSSHPLLHYTDSDILCLPGDIVPAPGPVLAPTHLQTELVLRCQKETDCDLCLRVAVHLAVHGHWEEPEDEEKFGGAADSGVEEPRNASLQAQVVLSFQAYPTARCVLLEVQVPAALVQFGQSVGSVVYDCFEAALGSEVRIWSYTQPRYEKELNHTQQLPALPWLNVSADGDNVHLVLNVSEEQHFGLSLYWNQVQGPPKPRWHKNLTGPQIITLNHTDLVPCLCIQVWPLEPDSVRTNICPFREDPRAHQNLWQAARLRLLTLQSWLLDAPCSLPAEAALCWRAPGGDPCQPLVPPLSWENVTVDKVLEFPLLKGHPNLCVQVNSSEKLQLQECLWADSLGPLKDDVLLLETRGPQDNRSLCALEPSGCTSLPSKASTRAARLGEYLLQDLQSGQCLQLWDDDLGALWACPMDKYIHKRWALVWLACLLFAAALSLILLLKKDHAKGWLRLLKQDVRSGGEWEQALGGGPPPGSQACASSPLPSPSVFSGSGRQGPAALLLYSADDSGFERLVGALASALCQLPLRVAVDLWSRRELSAQGPVAWFHAQRRQTLQEGGVVVLLFSPGAVALCSEWLQDGVSGPGAHGPHDAFRASLSCVLPDFLQGRAPGSYVGACFDRLLHPDAVPALFRTVPVFTLPSQLPDFLGALQQPRAPRSGRLQERAEQVSRALQPALDSYFHPPGTPAPGRGVGPGAGPGAGDGT

SEQ ID NO: 878569 - protein, 415 aa, Homo sapiens
EGCLTSQDCASSQKDHEEREEGRAVHGAAPQDLSRNLEFSELPDHCYRMNSSPAGTPSPQPSRANGNINLGPSANPNAQPTDFDFLKVIGKGNYGKVLLAKRKSDGAFYAVKVLQKKSILKKKEQSHIMAERSVLLKNVRHPFLVGLRYSFQTPEKLYFVLDYVNGGELFFHLQRERRFLEPRARFYAAEVASAIGYLHSLNIIYRDLKPENILLDCQGHVVLTDFGLCKEGVEPEDTTSTFCGTPEYLAPEVLRKEPYDRAVDWWCLGAVLYEMLHGLPPFYSQDVSQMYENILHQPLQIPGGRTVAACDLLQSLLHKDQRQRLGSKADFLEIKNHVFFSPINWDDLYHKRLTPPFNPNVTGPADLKHFDPEFTQEAVSKSIGCTPDTVASSSGASSAFLGFSYAPEDDDILDC

SEQ ID NO: 878570 - protein, 415 aa, Homo sapiens; identical to SEQ ID NO: 878569

SEQ ID NO: 878571 - protein, 427 aa, Homo sapiens
MQGLLTSGRKPSGGGRCTGRGGWRGQWCLKPWMGGADPPTPTLSCLLLPVPPELPDHCYRMNSSPAGTPSPQPSRANGNINLGPSANPNAQPTDFDFLKVIGKGNYGKVLLAKRKSDGAFYAVKVLQKKSILKKKEQSHIMAERSVLLKNVRHPFLVGLRYSFQTPEKLYFVLDYVNGGELFFHLQRERRFLEPRARFYAAEVASAIGYLHSLNIIYRDLKPENILLDCQGHVVLTDFGLCKEGVEPEDTTSTFCGTPEYLAPEVLRKEPYDRAVDWWCLGAVLYEMLHGLPPFYSQDVSQMYENILHQPLQIPGGRTVAACDLLQSLLHKDQRQRLGSKADFLEIKNHVFFSPINWDDLYHKRLTPPFNPNVTGPADLKHFDPEFTQEAVSKSIGCTPDTVASSSGASSAFLGFSYAPEDDDILDC

SEQ ID NO: 878572 - protein, 367 aa, Homo sapiens
MNSSPAGTPSPQPSRANGNINLGPSANPNAQPTDFDFLKVIGKGNYGKVLLAKRKSDGAFYAVKVLQKKSILKKKEQSHIMAERSVLLKNVRHPFLVGLRYSFQTPEKLYFVLDYVNGGELFFHLQRERRFLEPRARFYAAEVASAIGYLHSLNIIYRDLKPENILLDCQGHVVLTDFGLCKEGVEPEDTTSTFCGTPEYLAPEVLRKEPYDRAVDWWCLGAVLYEMLHGLPPFYSQDVSQMYENILHQPLQIPGGRTVAACDLLQSLLHKDQRQRLGSKADFLEIKNHVFFSPINWDDLYHKRLTPPFNPNVTGPADLKHFDPEFTQEAVSKSIGCTPDTVASSSGASSAFLGFSYAPEDDDILDC

SEQ ID NO: 878573 - protein, 110 aa, Homo sapiens
NLALQLLCLMRMASRQPCPGPALTSGEDRQLTGQDTDFGGNCPSTHIASCRGQGHAEPGKPGKMHKQAQPNFAFCRFQVGRGKQISEERVVGEEHWTEGRRPKTNSSHCL

SEQ ID NO: 878574 - protein, 43 aa, Homo sapiens
MGSDKALAGPKFMSTSSLQAVVALITQGKGVTAGEVHRLLLRG

SEQ ID NO: 878575 - protein, 322 aa, Homo sapiens
HSCAPSPPVAHPTLCSIPTCAPTCGLNVGMSVYIQGVASEHMKRFFVNFVVGQDPGSDVAFHFNPRFDGWDKVVFNTLQGGKWGSEERKRSMPFKKGAAFELVFIVLAEHYKVVVNGNPFYEYGHRLPLQMVTHLQVDGDLQLQSINFIGGQPLRPQGPPMMPPYPGPGHCHQQLNSLPTMEGPPTFNPPVPYFGRLQGGLTARRTIIIKGYVPPTGKSFAINFKVGSSGDIALHINPRMGNGTVVRNSLLNGSWGSEEKKITHNPFGPGQFFDLSIRCGLDRFKVYANGQHLFDFAHRLSAFQRVDTLEIQGDVTLSYVQI

SEQ ID NO: 878576 - protein, 129 aa, Homo sapiens
MAYVPAPGYQPTYNPTLPYYQPIPGGLNVGMSVYIQGVASEHMKRFFVNFVVGQDPGSDVAFHFNPRFDGWDKVVFNTLQGGKWGSEERKRSMPFKKGAAFELVFIVLAEHYKVVVNGNPFYEYVSGHV

SEQ ID NO: 878577 - protein, 323 aa, Homo sapiens
MAYVPAPGYQPTYNPTLPYYQPIPGGLNVGMSVYIQGVASEHMKRFFVNFVVGQDPGSDVAFHFNPRFDGWDKVVFNTLQGGKWGSEERKRSMPFKKGAAFELVFIVLAEHYKVVVNGNPFYEYGHRLPLQMVTHLQVDGDLQLQSINFIGGQPLRPQGPPMMPPYPGPGHCHQQLNSLPTMEGPPTFNPPVPYFGRLQGGLTARRTIIIKGYVPPTGKSFAINFKVGSSGDIALHINPRMGNGTVVRNSLLNGSWGSEEKKITHNPFGPGQFFDLSIRCGLDRFKVYANGQHLFDFAHRLSAFQRVDTLEIQGDVTLSYVQI

SEQ ID NO: 878578 - protein, 113 aa, Homo sapiens
AFVGCSKSSVSSPGAPSPSIWEAKAASRSENRQNLCYSVTGRHREIRSSDARTSRKLGNDIFSHDTQGLLRKKLIEASFQKVILDGYGSCGPQNLNLRKEWESEGLLYRKGLG

SEQ ID NO: 878579 - protein, 139 aa, Homo sapiens
MEQVSFTERGLDKEERPSEEKIRHSLLIPVRATCKARIRVQLRWGNSRKREIHSMDSCQDRAGQHQGHEPKVQKDCLTLEKKPKASDTVHISEMRRPMMPAVGDPQRPTPGTASGQISVSRRPPTTTSEKPGDLSAHSI

SEQ ID NO: 878580 - protein, 110 aa, Homo sapiens
AFVGCSKSSVSSPGAPSPSIWEAKAASRSENRQNLCYSVTGRHREIRSSDARTSRKLGNDIFSHDTQGLLRKKLIEASFQKVILDGYGSCGPQNLNLRKEWESEGKIILW

SEQ ID NO: 878581 - protein, 126 aa, Homo sapiens
MGLLTFRDVAIEFSREEWEHLDSDQKLLYGDVMLENYGNLVSLGLAVSKPDLITFLEQRKEPWNVKSAETVAIQPDIFSHDTQGLLRKKLIEASFQKVILDGYGSCGPQNLNLRKEWESEGKIILW

SEQ ID NO: 878582 - protein, 171 aa, Homo sapiens
MANQQLVAWACDGSPDGLQSVWTTQALAEGIAGWHVTLRGTGSCVQVICRLVKKVEIQAQAGVLQSTWAAQGLCVLAQESCRKVTARPRMQSRKGTVLSPCLGQIPMDILTCTLLIPSPRQKKGRKPLPTTLPLQCLLLRKHSTALTLKGQYLKECHCITQGIFIEWRIQS

SEQ ID NO: 878583 - protein, 171 aa, Homo sapiens; identical to SEQ ID NO: 878582

SEQ ID NO: 878584 - protein, 68 aa, Homo sapiens
RGPQSHILGTQEEEEPQKLASQKPEEKSFKEDGVVLQRSHRGYRLGSAGIGCEHLTMRGASQCQVAVD

SEQ ID NO: 878585 - protein, 131 aa, Homo sapiens
EQRAHTVEGTHSGGQTQWRAHTVEGTHSGGHTQWRAHTAEGTHSGVTSDPHALRGCHLPARVWIITVICIFTPQRECTYTSVLLHLALIGMSGIWGNEKAETAIKNVALRPGAVAHACNPSTLGGRGGQIT

SEQ ID NO: 878586 - protein, 104 aa, Homo sapiens
EDGSRESTCNRPGPSTGGTDAVLLPAFPRATLGSTPVGPLDALGARQLLGNAGSPQERSSTGDVGWRIRMGRTPKLAPNSAHPLLYRALGSGLLVRPAASWEER

SEQ ID NO: 878587 - protein, 86 aa, Homo sapiens
RSRRGDSRQRKLLGVKKTKNATPPAWCVLEMRKWRYQKVGSELQSLAPEPLYLTTGIHRYSHSRVSHRAALYGLLEKSCLSPPSRL

SEQ ID NO: 878588 - protein, 156 aa, Homo sapiens
ENINKKRNATALPIEQPSFFFFTSLTNLLSKKKKRRRRRNQGREGGKCLTKFPQIKQCPIYGTVAHGHSSCAVLPLQHIPCYAHSATHSNTYLSNTQDLITQPGDGNINRTGPNTQKAQPRNHTESYDKNVFMVYGVSSLDATRVKKMEKLVKLRQ

SEQ ID NO: 878589 - protein, 193 aa, Homo sapiens
MDDLKYGVYPLKEASGCPGAERNLLVYSYFEKETLTFRDVAIEFSLEEWECLNPAQQNLYMNVMLENYKNLVFLGVAVSKQDPVTCLEQEKEPWNMKRHEMVDEPPAMCSYFTKDLWPEQDIKDSFQQVILRRYGKCEHENLQLRKGSASVDEYKVHKEGYNELNQCLTTTQSKIFPCDKYVKVFHKFLNANR

SEQ ID NO: 878590 - protein, 102 aa, Homo sapiens
  misc_feature (12)..(12): Xaa can be any naturally occurring amino acid
MRWWMNPQDTCXGCAAMCSYFTKDLWPEQDIKDSFQQVILRRYGKCEHENLQLRKGSASVDEYKVHKEGYNELNQCLTTTQSKIFPCDKYVKVFHKFLNANR

SEQ ID NO: 878591 - protein, 460 aa, Homo sapiens
  misc_feature (5)..(5): Xaa can be any naturally occurring amino acid
GPGLXPPRPGSRRAEVSGRPGRAGRRPGRRAAGGRRGAGCAGRAAGPALFRPGGGRRLPAARRSLRASPPATAIAHGRTMALKAEGAALDCFEVTLKCEEGEDEEEAMVVAVIPRPEPMLRVTQQEKTPPPRPSPLEAGSDGCEEPKQQVSWEQEFLVGSSPGGSGRALCMVCGAEIRAPSADTARSHILEQHPHTLDLSPSEKSNILEAWSEGVALLQDVRAEQPSPPNSDSGQDAHPDPDANPDAARMPAEIVVLLDSEDNPSLPKRSRPRGLRPLELPAVPATEPGNKKPRGQRWKEPPGEEPVRKKRGRPMTKNLDPDPEPPSPDSPTETFAAPAEVRHFTDGSFPAGFVLQLFSHTQLRGPDSKDSPKDREVAEGGLPRAESPSPAPPPGLRGTLDLQVIRVRMEEPPAVSLLQDWSRHPQGTKRVGAGDTSDWPTVLSESSTTVAGKPEKGNGV

SEQ ID NO: 878592 - protein, 411 aa, Homo sapiens
  misc_feature (5)..(5): Xaa can be any naturally occurring amino acid
GPGLXPPRPGSRRAEVSGRPGRAGRRPGRRAAGGRRGAGCAGRAAGPALFRPGGGRRLPAARRSLRASPPATAIAHGRTMALKAEGAALDCFEVTLKCEEGEDEEEAMVVAVIPRPEPMLRVTQQEKTPPPRPSPLEAGSDGCEEPKQQVSWEQEFLVGSSPGGSGRALCMVCGAEIRAPSADTARSHILEQHPHTLDLSPSEKSNILEAWSEGVALLQDVRAEQPSPPNSDSGQDAHPDPDANPDAARMPAEIVVLLDSEDNPSLPKRSRPRGLRPLELPEPPSPDSPTETFAAPAEVRHFTDGSFPAGFVLQLFSHTQLRGPDSKDSPKDREVAEGGLPRAESPSPGSPHFKSWGTLCANSIYLECSPSGAPRDTGSPGYPRADGGAPSGQPPARLVQAPPGHQACGSR

SEQ ID NO: 878593 - protein, 460 aa, Homo sapiens; identical to SEQ ID NO: 878591
  misc_feature (5)..(5): Xaa can be any naturally occurring amino acid

SEQ ID NO: 878594 - protein, 416 aa, Homo sapiens
  misc_feature (5)..(5): Xaa can be any naturally occurring amino acid
GPGLXPPRPGSRRAEVSGRPGRAGRRPGRRAAGGRRGAGCAGRAAGPALFRPGGGRRLPAARRSLRASPPATAIAHGRTMALKAEGAALDCFEVTLKCEEGEDEEEAMVVAVIPRPEPMLRVTQQEKTPPPRPSPLEAGSDGCEEPKQQVSWEQEFLVGSSPGGSGRALCMVCGAEIRAPSADTARSHILEQHPHTLDLSPSEKSNILEAWSEGVALLQDVRAEQPSPPNSDSGQDAHPDPDANPDAARMPAEIVVLLDSEDNPSLPKRSRPRGLRPLELPAVPATEPGNKKPRGQRWKEPPGEEPVRKKRGRPMTKNLDPDPEPPSPDSPTETFAAPAEVRHFTDGSFPAGFVLQLFSHTQLRGPDSKDSPKDREVAEGGLPRAESPSPGSPHFKSWGTLCANSIYLEWYIGWRQ

SEQ ID NO: 878595 - protein, 355 aa, Homo sapiens
  misc_feature (5)..(5): Xaa can be any naturally occurring amino acid
GARIXPSPPGLPDAPRSRGGPDAPVAGPAGERRAGGGERAARGGRRARRYSGQEAERRLPAARRSLRASPPATAIAHGRTMALKAEGAALDCFEVTLKCEEGEDEEEAMVVAVIPRPEPMLRVTQQEKTPPPRPSPLEAGSDGCEEPKQQVSWEQEFLVGSSPGGSGRALCMVCGAEIRAPSADTARSHILEQHPHTLDLSPSEKSNILEAWSEGVALLQDVRAEQPSPPNSGDRDPEREGDRDPEREGDRDPEREGDRDPEREGDRDPEREGDRDPEREGDRDPEREGHGDRGRQRQRDAERTGPPQREDRWGGGDKETKTGMGGGPGFRAGVPAPLWSPEHAATWCPGPAHAQ

SEQ ID NO: 878596 - protein, 393 aa, Homo sapiens
  misc_feature (5)..(5): Xaa can be any naturally occurring amino acid
GPGLXPPRPGSRRAEVSGRPGRAGRRPGRRAAGGRRGAGCAGRAAGPALFRPGGGRRLPAARRSLRASPPATAIAHGRTMALKAEGAALDCFEVTLKCEEGEDEEEAMVVAVIPRPEPMLRVTQQEKTPPPRPSPLEAGSDGCEEPKQQVSWEQEFLVGSSPGGSGRALCMVCGAEIRAPSADTARSHILEQHPHTLDLSPSEKSNILEAWSEGVALLQDVRAEQPSPPNSDSGQDAHPDPDANPDAARMPAEIVVLLDSEDNPSLPKRSRPRGLRPLELPAVPATEPGNKKPRGQRWKEPPGEEPVRKKRGRPMTKNLDPDPEPPSPDSPTETFAAPAEVRHFTDGSFPAGFVLQLFSHTQLRGPDSKDSPKDREVAEGGLPRAESPSPVSA

SEQ ID NO: 878597 - protein, 400 aa, Homo sapiens
  misc_feature (5)..(5): Xaa can be any naturally occurring amino acid
GPGLXPPRPGSRRAEVSGRPGRAGRRPGRRAAGGRRGAGCAGRAAGPALFRPGGGRRLPAARRSLRASPPATAIAHGRTMALKAEGAALDCFEVTLKCEEGEDEEEAMVVAVIPRPEPMLRVTQQEKTPPPRPSPLEAGSDGCEEPKQQVSWEQEFLVGSSPGGSGRALCMVCGAEIRAPSADTARSHILEQHPHTLDLSPSEKSNILEAWSEGVALLQDVRAEQPSPPNSDSGQDAHPDPDANPDAARMPAEIVVLLDSEDNPSLPKRSRPRGLRPLELPAVPATEPGNKKPRGQRWKEPPGEEPVRKKRGRPMTKNLDPDPEPPSPDSPTETFAAPAEVRHFTDGSFPAGFVLQLFSHTQLRGPDSKDSPKDREVAEGGLPRAESPSPGLTPSRRSQF

SEQ ID NO: 878598 - protein, 348 aa, Homo sapiens
  misc_feature (5)..(5): Xaa can be any naturally occurring amino acid
GPGLXPPRPGSRRAEVSGRPGRAGRRPGRRAAGGRRGAGCAGRAAGPALFRPGGGRRLPAARRSLRASPPATAIAHGRTMALKAEGAALDCFEVTLKCEEGEDEEEAMVVAVIPRPEPMLRVTQQEKTPPPRPSPLEAGSDGCEEPKQQVSWEQEFLVGSSPGGSGRALCMVCGAEIRAPSADTARSHILEQHPHTLDLSPSEKSNILEAWSEGVALLQDVRAEQPSPPNSDSGQDAHPDPDANPDAARMPAEIVVLLDSEDNPSLPKRSRPRGLRPLELPEPPSPDSPTETFAAPAEVRHFTDGSFPAGFVLQLFSHTLQRPEAGPGHPIHSRSHLHLFSCCIYHLC

SEQ ID NO: 878599 - protein, 186 aa, Homo sapiens
MGLLDRLSVLLGLKKKEVHVLCLGLDNSGKTTIINKLKPSNAQSQNILPTIGFSIEKFKSSSLSFTVFDMSGQGRYRNLWEHYYKEGQAIIFVIDSSDRLRMVVAKEELDTLLNHPDIKHRRIPILFFANKMDLRDAVTSVKVSQLLCLENIKDKPWHICASDAIKGEGLQEGVDWLQDQIQTVKT

SEQ ID NO: 878600 - protein, 186 aa, Homo sapiens; identical to SEQ ID NO: 878599

SEQ ID NO: 878601 - protein, 186 aa, Homo sapiens; identical to SEQ ID NO: 878599

SEQ ID NO: 878602 - protein, 186 aa, Homo sapiens; identical to SEQ ID NO: 878599

SEQ ID NO: 878603 - protein, 186 aa, Homo sapiens; identical to SEQ ID NO: 878599

SEQ ID NO: 878604 - protein, 146 aa, Homo sapiens
RARRSALQQLHGGGNRPSAPSPVAAEGPWLEVSSSGRGGAGRGQGLAGSQARGTRDPEAAQAMLHHLGAQLQAPGNSQAGWRAQPRRTGARCRRGCGQARRSARRRLHRGRNRPSAPSPRTVPGAAPISLRRRGAGVTARREGMRA

SEQ ID NO: 878605 - protein, 137 aa, Homo sapiens
DLPPQGEHRREPQLGPQSSCVSVSVTVGNVLGRHKDKSTVNNETRVCYGSFCSKCFLAREKVHERAPSRGRPFSIWCCALTGSHLPQLLLPLACGPHREGPFLSSSAYPQGRGLLDKSCKPGCGPSRGSVEWGWPGQ

SEQ ID NO: 878606 - protein, 86 aa, Homo sapiens
PDVSHRARPAESFIAIVMYYVLIVCARLPWDWQCSGFVYTSITTLTRHALPLDCYSDGSFQLCCDLMDRHHMWSVVDRMYEVHDCT

SEQ ID NO: 878607 - protein, 909 aa, Homo sapiens
RACASVRLSHAGSVSLALGVSCLGLIRAVAAAAAMGKTANSPGSGARPDPVRSFNRWKKKHSHRQNKKKQLRKQLKKPEWQVERESISRLMQNYEKINVNEITRFSDFPLSKKTLKGLQEAQYRLVTEIQKQTIGLALQGKDVLGAAKTGSGKTLAFLVPVLEALYRLQWTSTDGLGVLIISPTRELAYQTFEVLRKVGKNHDFSAGLIIGGKDLKHEAERINNINILVCTPGRLLQHMDETVSFHATDLQMLVLDEADRILDMGFADTMNAVIENLPKKRQTLLFSATQTKSVKDLARLSLKNPEYVWVHEKAKYSTPATLEQNYIVCELQQKISVLYSFLRSHLKKKSIVFFSSCKEVQYLYRVFCRLRPGVSILALHGRQQQMRRMEVYNEFVRKRAAVLFATDIAARGLDFPAVNWVLQFDCPEDANTYIHRAGRTARYKEDGEALLILLPSEKAMVQQLLQKKVPVKEIKINPEKLIDVQKKLESILAQDQDLKERAQRCFVSYVRSVYLMKDKEVFDVSKLPIPEYALSLGLAVAPRVRFLQKMQKQPTKELVRSQADKVIEPRAPSLTNDEVEEFRAYFNEKMSILQKGGKRLEGTEHRQDNDTGNEEQEEEEDDEEEMEEKLAKAKGSQAPSLPNTSEAQKIKEVPTQFLDRDEEEEDADFLKVKRHNVFGLDLKDEKTLQKKEPSKSSIKKKMTKVAEAKKVMKRNFKVNKKITFTDEGELVQQWPQMQKSAIKDAEEDDDTGGINLHKAKERLQEEDKFDKEEYRKKIKAKHREKRLKEREARREANKRQAKAKDEEEAFLDWSDDDDDDDDGFDPSTLPDPDKYRSSEDSDSEDMENKISDTKKKQGMKKRSNSEVEDVGPTSHNRKKARWDTLEPLDTGLSLAEDEELVLHLLRSQS

SEQ ID NO: 878608 - protein, 909 aa, Homo sapiens; identical to SEQ ID NO: 878607

SEQ ID NO: 878609 - protein, 394 aa, Homo sapiens
STLYIPVLHYKLPIPEYALSLGLAVAPRVRFLQKMQKQPTKELVRSQADKVIEPRAPSLTNDEVEEFRAYFNEKMSILQKGGKRLEGTEHRQDNDTGNEEQEEEEDDEEEMEEKLAKAKGSQAPSLPNTSEAQKIKEVPTQFLDRDEEEEDADFLKVKRHNVFGLDLKDEKTLQKKEPSKSSIKKKMTKVAEAKKVMKRNFKVNKKITFTDEGELVQQWPQMQKSAIKDAEEDDDTGGINLHKAKERLQEEDKFDKEEYRKKIKAKHREKRLKEREARREANKRQAKAKDEEEAFLDWSDDDDDDDDGFDPSTLPDPDKYRSSEDSDSEDMENKISDTKKKQGMKKRSNSEVEDVGPTSHNRKKARWDTLEPLDTGLSLAEDEELVLHLLRSQS

SEQ ID NO: 878610 - protein, 208 aa, Homo sapiens
MTKVAEAKKVMKRNFKVNKKITFTDEGELVQQWPQMQKSAIKDAEEDDDTGGINLHKAKERLQEEDKFDKEEYRKKIKAKHREKRLKEREARREANKRQAKAKDEEEAFLDWSDDDDDDDDGFDPSTLPDPDKYRSSEDSDSEDMENKISDTKKKQGMKKRSNSEVEDVGPTSHNRKKARWDTLEPLDTGLSLAEDEELVLHLLRSQS

SEQ ID NO: 878611 - protein, 335 aa, Homo sapiens
RACASVRLSHAGSVSLALGVSCLGLIRAVAAAAAMGKTANSPGSGARPDPVRSFNRWKKKHSHRQNKKKQLRKQLKKPEWQVERESISRLMQNYEKINVNEITRFSDFPLSKKTLKGLQEAQYRLVTEIQKQTIGLALQGKDVLGAAKTGSGKTLAFLVPVLEALYRLQWTSTDGLGVLIISPTRELAYQTFEVLRKVGKNHDFSAGLIIGGKDLKHEAERINNINILVCTPGRLLQHMDETVSFHATDLQMLVLDEADRILDMGFADTMNAVIENLPKKRQTLLFSATQTKSVKDLARLSLKNPEYVWVHEKAKYRKSIKKLVLKNLNNSNLFS

SEQ ID NO: 878612 - protein, 125 aa, Homo sapiens
FGKIWIEQGLIDSKGQDLVPKELIMQVLENLQLPEEIAVVHVPQHQHQKNSSFESWGNNLADQVAKQAASSQVSPIFHLTSSLPPPAAIPIFSHADQEKLKKTGAKESPKGKWVLTDGREMLSKP

SEQ ID NO: 878613 - protein, 103 aa, Homo sapiens
MEDVNSNVNADQERVSFCRPGWSAMARSRLTATSVSQVQENGFVKKLEPKSGWMTFLEVTGKICEMLFCPEAILLTRKDTLYCETGLIFLTLTKTIANTYFYF

SEQ ID NO: 878614 - protein, 80 aa, Homo sapiens
DIGAASPNPGPALRRRFICGQRCFGTRAGGTLATGPGPAICGGLGWSERRGRLFPPALPLLLREREGRGRRRQRGRDGGR

SEQ ID NO: 878615 - protein, 396 aa, Homo sapiens
MPRVKAAQAGRQSSAKRHLAEQFAVGEIITDMAKKEWKVGLPIGQGGFGCIYLADMNSSESVGSDAPCVVKVEPSDNGPLFTELKFYQRAAKPEQIQKWIRTRKLKYLGVPKYWGSGLHDKNGKSYRFMIMDRFGSDLQKIYEANAKRFSRKTVLQLSLRILDILEYIHEHEYVHGDIKASNLLLNYKNPDQVYLVDYGLAYRYCPEGVHKEYKEDPKRCHDGTIEFTSIDAHNGVAPSRRGDLEILGYCMIQWLTGHLPWEDNLKDPKYVRDSKIRYRENIASLMDKCFPEKNKPGEIAKYMETVKLLDYTEKPLYENLRDILLQGLKAIGSKDDGKLDLSVVENGGLKAKTITKKRKKEIEESKEPGVEDTEWSNTQTEEAIQTRSRTRKRVQK

SEQ ID NO: 878616 - protein, 396 aa, Homo sapiens; identical to SEQ ID NO: 878615

SEQ ID NO: 878617 - protein, 223 aa, Homo sapiens
MPRVKAAQAGRQSSAKRHLAEQFAVGEIITDMAKKEWKVGLPIGQGGFGCIYLADMNSSESVGSDAPCVVKVEPSDNGPLFTELKFYQRAAKPEQIQKWIRTRKLKYLDILEYIHEHEYVHGDIKASNLLLNYKNPDQVYLVDYGLAYRYCPEGVHKEYKEDPKRCHDGTIEFTSIDAHNGVAPSRRGDLEILGYCMIQWLTGHLPWEDNLKDPKYVRDSKIR

SEQ ID NO: 878618 - protein, 396 aa, Homo sapiens; identical to SEQ ID NO: 878615

SEQ ID NO: 878619 - protein, 396 aa, Homo sapiens; identical to SEQ ID NO: 878615

SEQ ID NO: 878620 - protein, 396 aa, Homo sapiens; identical to SEQ ID NO: 878615

SEQ ID NO: 878621 - protein, 420 aa, Homo sapiens
MPRVKAAQAGRQSSAKRHLAEQFAVGEIITDMAKKEWKVGLPIGQGGFGCIYLADMNSSESVGSDAPCVVKVEPSDNGPLFTELKFYQRAAKPEQIQKWIRTRKLKYLGVPKYWGSGLHDKNGKSYRFMIMDRFGSDLQKIYEANAKRFSRKTVLQLSLRILDILEYIHEHEYVHGDIKASNLLLNYKNPDQVYLVDYGLAYRYCPEGVHKEYKEDPKRCHDGTIEFTSIDAHNGVAPSRRGDLEILGYCMIQWLTGHLPWEDNLKDPKYVRDSKIRYRENIASLMDKCFPEKNKPGEIAKYMETVKLLDYTEKPLYENLRDILLQGLKAIGSKDDGKLDLSVVENGGLKAKTITKKRKKEIEESKEPGVEDTEWSNTQTEEAIQTRSEESQGAIHRSMSQPEASSSSYDSSRTRKRVQK

SEQ ID NO: 878622 - protein, 405 aa, Homo sapiens
MPRVKAAQAGRQSSAKRHLAEQFAVGEIITDMAKKEWKVGLPIGQGGFGCIYLADMNSSESVGSDAPCVVKVEPSDNGPLFTELKFYQRAAKPEQIQKWIRTRKLKYLGVPKYWGSGLHDKNGKSYRFMIMDRFGSDLQKIYEANAKRFSRKTVLQLSLRILDILEYIHEHEYVHGDIKASNLLLNYKNPDQVYLVDYGLAYRYCPEGVHKEYKEDPKRCHDGTIEFTSIDAHNGVAPSRRGDLEILGYCMIQWLTGHLPWEDNLKDPKYVRDSKIRYRENIASLMDKCFPEKNKPGEIAKYMETVKLLDYTEKPLYENLRDILLQGLKAIGSKDDGKLDLSVVENGGLKAKTITKKRKKEIEESKVQEPERESRSNSDAVNQISFSLFSFDFFLLFYLNCFIFL

SEQ ID NO: 878623 - protein, 375 aa, Homo sapiens
MPRVKAAQAGRQSSAKRHLAEQFAVGEIITDMAKKEWKVGLPIGQGGFGCIYLADMNSSESVGSDAPCVVKVEPSDNGPLFTELKFYQRAAKPEQIQKWIRTRKLKYLGVPKYWGSGLHDKNGKSYRFMIMDRFGSDLQKIYEANAKRFSRKTVLQLSLRILDILEYIHEHEYVHGDIKASNLLLNYKNPDQVYLVDYGLAYRYCPEGVHKEYKEDPKRCHDGTIEFTSIDAHNGVAPSRRGDLEILGYCMIQWLTGHLPWEDNLKDPKYVRDSKIRYRENIASLMDKCFPEKNKPGEIAKYMETVKLLDYTEKPLYENLRDILLQGLKAIGSKDDGKLDLSVVENGGLKAKTITKVGLMRDVESSSRGCLVIME

SEQ ID NO: 878624 - protein, 375 aa, Homo sapiens; identical to SEQ ID NO: 878623

SEQ ID NO: 878625 - protein, 394 aa, Homo sapiens
MPRVKAAQAGRQSSAKRHLAEQFAVGEIITDMAKKEWKVGLPIGQGGFGCIYLADMNSSESVGSDAPCVVKVEPSDNGPLFTELKFYQRAAKPEQIQKWIRTRKLKYLGVPKYWGSGLHDKNGKSYRFMIMDRFGSDLQKIYEANAKRFSRKTVLQLSLRILDILEYIHEHEYVHGDIKASNLLLNYKNPDQVYLVDYGLAYRYCPEGVHKEYKEDPKRCHDGTIEFTSIDAHNGVAPSRRGDLEILGYCMIQWLTGHLPWEDNLKDPKYVRDSKIRYRENIASLMDKCFPEKNKPGEIAKYMETVKLLDYTEKPLYENLRDILLQGLKAIGSKDDGKLDLSVVENGGLKAKTITKVNFVIKLFFGLLVFIIAINTKRKYSSSSMKNNNRLHGN

SEQ ID NO: 878626 - protein, 396 aa, Homo sapiens; identical to SEQ ID NO: 878615

SEQ ID NO: 878627 - protein, 365 aa, Homo sapiens [sequence omitted]

SEQ ID NO: 878628 - protein, 266 aa, Homo sapiens [sequence omitted]

SEQ ID NO: 878629 - protein, 591 aa, Homo sapiens
SKKSPFRKSKIECPSPGELDQKEPQMSPSVAASLSCPVPSTPPELSQRATLDTVPPPPPSKVGKRCRKTSDPRRSIVECQPDASATPGVGTADSPAAPTDSRDDQKGLSLSPQSPPERRGYPGPGLRSDWHASSPLLITSDTEHVTLLSEAEHHGIGDLKSNVLSVEEGEGLRTADAEKSSLSHPGIPPSPPSCGPGSPLMPSCDVHCTTDGRQCQASAQLDNLPASAWHSTDSASPQTYEVELEMQASGLPKLRIKKIDPSSSLEAEPLSKEESSLGEESFLPALSMPRASRSLSKPEPTYVSPPCPRLSHSTPGKSRGQTYICQACTPTHGPSSTPSPFQTDGVPWTPSPKHSGKTTPDIIKDWPRRKRAVGCGAGSSSGRGEVGADLPGSLSLLESEGKDHGLELSIHRTPILEDFELEGVCQLPDQSPPRNSMPKAEEASSWGQFGLSSRKRVLLAKEEADRGAKRICDLREDSEVSKSKEGSPSWSAWQLPSTGDEEVFVSGSTPPPSCAVRSCLSASALQALTQSPLLFQGKTPSSQSKDPRDEDVDVLPSTVEDSPFSRAFSRRRPISRTYTRKKLMGTWLEDL

SEQ ID NO: 878630 - protein, 591 aa, Homo sapiens; identical to SEQ ID NO: 878629

SEQ ID NO: 878631 - protein, 170 aa, Homo sapiens
GCGAGSSSGRGEVGADLPGSLSLLESEGKDHGLELSIHRTPILEDFELEGVCQLPDQSPPRNSMPKAEEASSWGQFGLSSRKRVLLAKEEADRGAKRICDLREDSEVSKSKEGSPSWSAWQLPSTGDEEVFVSGEFVFETQFPHGFFWSECLTRRHLGVASWEAWASRLG

SEQ ID NO: 878632 - protein, 107 aa, Homo sapiens
AGTTGVRHHPRLIFKFFVQMWFCYIAQAGLELLGSSNPPVSASQSAGITGVSYHVRPRSASSETMARERQTDLDLLQGGLSSSGTPIKKKECLPEPHLSVGLEAGPL

SEQ ID NO: 878633 - protein, 319 aa, Homo sapiens
ACAPNCARGIKRGEKKPEENSRPKQNARRGGRAACSPRPRPRPRRDARGPARDARAAAVPAPGRWRGGRAPASIARRGDSAPGFRRRWGPSLSMGLRDWLRTVCCCCRCECLEERALPEKEPLVSDNNPYSSFGATLVRDDEKNLWSMPHDVSHTEADDDRTLYNLIVIRNQQAKDSEEWQKLNYDIHTLRQVRREVRNRWKCILEDLGFQKEADSLLSVTKLSTISDSKNTRKAREMLLKLAEETNIFPTSWELSERYLFVVDRLIALDAAEEFFKLARRTYPKKPGVPCLADGQKELHLHLWGDLSCRLAHMQGVLH

SEQ ID NO: 878634 - protein, 141 aa, Homo sapiens
LRKRDSLINADQEWQKLNYDIHTLRQVRREVRNRWKCILEDLGFQKEADSLLSVTKLSTISDSKNTRKAREMLLKLAEETNIFPTSWELSERYLFVVDRLIALDAAEEFFKLARRTYPKKPGVPCLADGQKELHYLPFPSP

SEQ ID NO: 878635 - protein, 95 aa, Homo sapiens
HAPQIALGELKEGKKSPKKTHAPNKTQGEEGARPAALARVPGRGVMRADQPATPGLPLSPHLDAGAVAAPQPRSLAAATRPQASGAGGGPRSPWG

SEQ ID NO: 878636 - protein, 307 aa, Homo sapiens
ACAPNCARGIKRGEKKPEENSRPKQNARRGGRAACSPRPRPRPRRDARGPARDARAAAVPAPGRWRGGRAPASIARRGDSAPGFRRRWGPSLSMGLRDWLRTVCCCCRCECLEERALPEKEPLVSDNNPYSSFGATLVRDDEKNLWSMPHDVSHTEADDDRTLYNLIVIRNQQAKDSEEWQKLNYDIHTLRQVRREVRNRWKCILEDLGFQKEADSLLSVTKLSTISDSKNTRKAREMLLKLAEETNIFPTSWELSERYLFVVDRLIALDAAEEFFKLARRTYPKKPGVPCLADGQKELHYLPFPSP

SEQ ID NO: 878637 - protein, 307 aa, Homo sapiens; identical to SEQ ID NO: 878636

SEQ ID NO: 878638 - protein, 307 aa, Homo sapiens; identical to SEQ ID NO: 878636

SEQ ID NO: 878639 - protein, 156 aa, Homo sapiens
  misc_feature (14)..(14): Xaa can be any naturally occurring amino acid
LPPFPIYYLPREMXLVCNDSLIFHRYIEWQKLNYDIHTLRQVRREVRNRWKCILEDLGFQKEADSLLSVTKLSTISDSKNTRKAREMLLKLAEETNIFPTSWELSERYLFVVDRLIALDAAEEFFKLARRTYPKKPGVPCLADGQKELHYLPFPSP

SEQ ID NO: 878640 - protein, 112 aa, Homo sapiens [sequence omitted]

SEQ ID NO: 878641 - protein, 702 aa, Homo sapiens
MDQHQHLNKTAESASSEKKKTRRCNGFKMFLAALSFSYIAKALGGIIMKISITQIERRFDISSSLAGLIDGSFEIGNLLVIVFVSYFGSKLHRPKLIGIGCLLMGTGSILTSLPHFFMGYYRYSKETHINPSENSTSSLSTCLINQTLSFNGTSPEIVEKDCVKESGSHMWIYVFMGNMLRGIGETPIVPLGISYIDDFAKEGHSSLYLGSLNAIGMIGPVIGFALGSLFAKMYVDIGYVDLSTIRITPKDSRWVGAWWLGFLVSGLFSIISSIPFFFLPKNPNKPQKERKISLSLHVLKTNDDRNQTANLTNQGKNVTKNVTGFFQSLKSILTNPLYVIFLLLTLLQVSSFIGSFTYVFKYMEQQYGQSASHANFLLGIITIPTVATGMFLGGFIIKKFKLSLVGIAKFSFLTSMISFLFQLLYFPLICESKSVAGLTLTYDGNNSVASHVDVPLSYCNSECNCDESQWEPVCGNNGITYLSPCLAGCKSSSGIKKHTVFYNCSCVEVTGLQNRNYSAHLGECPRDNTCTRKFFIYVAIQVINSLFSATGGTTFILLTVKIVQPELKALAMGFQSMVIRTLGGILAPIYFGALIDKTCMKWSTNSCGAQGACRIYNSVFFGRVYLGLSIALRFPALVLYIVFIFAMKKKFQGKDTKASDNERKVMDEANLEFLNNGEHFVPSAGTDSKTCNLDMQDNAAAN

SEQ ID NO: 878642 - protein, 702 aa, Homo sapiens; identical to SEQ ID NO: 878641

SEQ ID NO: 878643 - protein, 688 aa, Homo sapiens
MDQHQHLNKTAESASSEKKKTRRCNGFKMFLAALSFSYIAKALGGIIMKISITQIERRFDISSSLAGLIDGSFEIGNLLVIVFVSYFGSKLHRPKLIGIGCLLMGTGSILTSLPHFFMGYYRYSKETHINPSENSTSSLSTCLINQTLSFNGTSPEIVEKDCVKESGSHMWIYVFMGNMLRGIGETPIVPLGISYIDDFAKEGHSSLYLGSLNAIGMIGPVIGFALGSLFAKMYVDIGYVDLSTIRITPKDSRWVGAWWLGFLVSGLFSIISSIPFFFLPKNPNKPQKERKISLSLHVLKTNDDRNQTANLTNQGKNVTKNVTGFFQSLKSILTNPLYVIFLLLTLLQVSSFIGSFTYVFKYMEQQYGQSASHANFLLGIITIPTVATGMFLGGFIIKKFKLSLVGIAKFSFLTSMISFLFQLLYFPLICESKSVAGLTLTYDGNNSVASHVDVPLSYCNSECNCDESQWEPVCGNNGITYLSPCLAGCKSSSGIKKHTNRNYSAHLGECPRDNTCTRKFFIYVAIQVINSLFSATGGTTFILLTVKIVQPELKALAMGFQSMVIRTLGGILAPIYFGALIDKTCMKWSTNSCGAQGACRIYNSVFFGRVYLGLSIALRFPALVLYIVFIFAMKKKFQGKDTKASDNERKVMDEANLEFLNNGEHFVPSAGTDSKTCNLDMQDNAAAN

SEQ ID NO: 878644 - protein, 524 aa, Homo sapiens
MLRGIGETPIVPLGISYIDDFAKEGHSSLYLGSLNAIGMIGPVIGFALGSLFAKMYVDIGYVDLSTIRITPKDSRWVGAWWLGFLVSGLFSIISSIPFFFLPKNPNKPQKERKISLSLHVLKTNDDRNQTANLTNQGKNVTKNVTGFFQSLKSILTNPLYVIFLLLTLLQVSSFIGSFTYVFKYMEQQYGQSASHANFLLGIITIPTVATGMFLGGFIIKKFKLSLVGIAKFSFLTSMISFLFQLLYFPLICESKSVAGLTLTYDGNNSVASHVDVPLSYCNSECNCDESQWEPVCGNNGITYLSPCLAGCKSSSGIKKHTVFYNCSCVEVTGLQNRNYSAHLGECPRDNTCTRKFFIYVAIQVINSLFSATGGTTFILLTVKIVQPELKALAMGFQSMVIRTLGGILAPIYFGALIDKTCMKWSTNSCGAQGACRIYNSVFFGRVYLGLSIALRFPALVLYIVFIFAMKKKFQGKDTKASDNERKVMDEANLEFLNNGEHFVPSAGTDSKTCNLDMQDNAAAN

SEQ ID NO: 878645 - protein, 524 aa, Homo sapiens; identical to SEQ ID NO: 878644

SEQ ID NO: 878646 - protein, 674 aa, Homo sapiens
MFLAALSFSYIAKALGGIIMKISITQIERRFDISSSLAGLIDGSFEIGNLLVIVFVSYFGSKLHRPKLIGIGCLLMGTGSILTSLPHFFMGYYRYSKETHINPSENSTSSLSTCLINQTLSFNGTSPEIVEKDCVKESGSHMWIYVFMGNMLRGIGETPIVPLGISYIDDFAKEGHSSLYLGSLNAIGMIGPVIGFALGSLFAKMYVDIGYVDLSTIRITPKDSRWVGAWWLGFLVSGLFSIISSIPFFFLPKNPNKPQKERKISLSLHVLKTNDDRNQTANLTNQGKNVTKNVTGFFQSLKSILTNPLYVIFLLLTLLQVSSFIGSFTYVFKYMEQQYGQSASHANFLLGIITIPTVATGMFLGGFIIKKFKLSLVGIAKFSFLTSMISFLFQLLYFPLICESKSVAGLTLTYDGNNSVASHVDVPLSYCNSECNCDESQWEPVCGNNGITYLSPCLAGCKSSSGIKKHTVFYNCSCVEVTGLQNRNYSAHLGECPRDNTCTRKFFIYVAIQVINSLFSATGGTTFILLTVKIVQPELKALAMGFQSMVIRTLGGILAPIYFGALIDKTCMKWSTNSCGAQGACRIYNSVFFGRVYLGLSIALRFPALVLYIVFIFAMKKKFQGKDTKASDNERKVMDEANLEFLNNGEHFVPSAGTDSKTCNLDMQDNAAAN

SEQ ID NO: 878647 - protein, 684 aa, Homo sapiens
MDQHQHLNKTAESASSEKKKTRRCNGFKMFLAALSFSYIAKALGGIIMGLIDGSFEIGNLLVIVFVSYFGSKLHRPKLIGIGCLLMGTGSILTSLPHFFMGYYRYSKETHINPSENSTSSLSTCLINQTLSFNGTSPEIVEKDCVKESGSHMWIYVFMGNMLRGIGETPIVPLGISYIDDFAKEGHSSLYLGSLNAIGMIGPVIGFALGSLFAKMYVDIGYVDLSTIRITPKDSRWVGAWWLGFLVSGLFSIISSIPFFFLPKNPNKPQKERKISLSLHVLKTNDDRNQTANLTNQGKNVTKNVTGFFQSLKSILTNPLYVIFLLLTLLQVSSFIGSFTYVFKYMEQQYGQSASHANFLLGIITIPTVATGMFLGGFIIKKFKLSLVGIAKFSFLTSMISFLFQLLYFPLICESKSVAGLTLTYDGNNSVASHVDVPLSYCNSECNCDESQWEPVCGNNGITYLSPCLAGCKSSSGIKKHTVFYNCSCVEVTGLQNRNYSAHLGECPRDNTCTRKFFIYVAIQVINSLFSATGGTTFILLTVKIVQPELKALAMGFQSMVIRTLGGILAPIYFGALIDKTCMKWSTNSCGAQGACRIYNSVFFGRVYLGLSIALRFPALVLYIVFIFAMKKKFQGKDTKASDNERKVMDEANLEFLNNGEHFVPSAGTDSKTCNLDMQDNAAAN

SEQ ID NO: 878648 - protein, 447 aa, Homo sapiens
SGWSGREMMADEEEEVKPILQKLQELVDQLYSFRDCYFETHSVEDAGRKQQDVRKEMEKTLQQMEEVVGSVQGKAQVLMLTGKALNVTPDYSPKAEELLSKAVKLEPELVEAWNQLGEVYWKKGDVAAAHTCFSGALTHCRNKVSLQNLSMVLRQLRTDTEDEHSHHVMDSVRQAKLAVQMDVHDGRSWYILGNSYLSLYFSTGQNPKISQQALSAYAQAEKVDRKASSNPDLHLNRATLHKYEESYGEALEGFSRAAALDPAWPEPRQREQQLLEFLDRLTSLLESKGKVKTKKLQSMLGSLRPAHLGPCSDGHYQSASGQKVTLELKPLSTLQPGVNSGAVILGKVVFSLTTEEKVPFTFGLVDSDGPCYAVMVYNIVQSWGVLIGDSVAIPEPNLRLHRIQHKGKDYSFSSVRVETPLLLVVNGKPQGSSSQAVATVASRPQCE

SEQ ID NO: 878649 - protein, 165 aa, Homo sapiens
SGWSGREMMADEEEEVKPILQKLQELVDQLYSFRDCYFETHSVEDAGRKQQDVRKEMEKTLQQMEEVVGSVQGKAQVLMLTGKALNVTPDYSPKAEELLSKAVKLEPELVEAWNQLGEVYWKKGDVAAAHTCFSGALTHVSCPLSLWKAEMGRMNFFGSMSFPRT

SEQ ID NO: 878650 - protein, 447 aa, Homo sapiens; identical to SEQ ID NO: 878648

SEQ ID NO: 878651 - protein, 236 aa, Homo sapiens
SGWSGREMMADEEEEVKPILQKLQELVDQLYSFRDCYFETHSVEDAGRKQQDVRKEMEKTLQQMEEVVGSVQGKAQVLMLTGKALNVTPDYSPKAEELLSKAVKYQSASGQKVTLELKPLSTLQPGVNSGAVILGKVVFSLTTEEKVPFTFGLVDSDGPCYAVMVYNIVQSWGVLIGDSVAIPEPNLRLHRIQHKGKDYSFSSVRVETPLLLVVNGKPQGSSSQAVATVASRPQCE

SEQ ID NO: 878652 - protein, 122 aa, Homo sapiens
SSPPARYHEKHFLFPFALSLVFLHINPEHIHKHVHTFSQISTYLHLYKCHVFNLTSPPRPNSLFKKNSHSYSMYHLIYSLPMVCIVLCCISYAYMVLYGLTYLPGCKLLEIRDLIFSHVSLV

SEQ ID NO: 878653 - protein, 621 aa, Homo sapiens
CARGGSGGGDRSWGRVGSEGGGGERGRRRAVRDAFPVLNYEPRVCRWGCSAAPVAEGEQRRRGATGSGGSGGAEAAEVRAAMQQVLENLTELPSSTGAEEIDLIFLKGIMENPIVKSLAKAHERLEDSKLEAVSDNNLELVNEILEDITPLINVDENVAELVGILKEPHFQSLLEAHDIVASKCYDSPPSSPEMNNSSINNQLLPVDAIRILGIHKRAGEPLGVTFRVENNDLVIARILHGGMIDRQGLLHVGDIIKEVNGHEVGNNPKELQELLKNISGSVTLKILPSYRDTITPQQVFVKCHFDYNPYNDNLIPCKEAGLKFSKGEILQIVNREDPNWWQASHVKEGGSAGLIPSQFLEEKRKAFVRRDWDNSGPFCGTISSKKKKKMMYLTTRNAEFDRHEIQIYEEVAKMPPFQRKTLVLIGAQGVGRRSLKNRFIVLNPTRFGTTVPFTSRKPREDEKDGQAYKFVSRSEMEADIKAGKYLEHGEYEGNLYGTKIDSILEVVQTGRTCILDVNPQALKVLRTSEFMPYVVFIAAPELETLRAMHKAVVDAGITTKLLTDSDLKKTVDESARIQRAYNHYFDLIIINDNLDKAFEKLQTAIEKLRMEPQWVPISWVY

SEQ ID NO: 878654 - protein, 428 aa, Homo sapiens
MNNSSINNQLLPVDAIRILGIHKRAGEPLGVTFRVENNDLVIARILHGGMIDRQGLLHVGDIIKEVNGHEVGNNPKELQELLKNISGSVTLKILPSYRDTITPQQVFVKCHFDYNPYNDNLIPCKEAGLKFSKGEILQIVNREDPNWWQASHVKEGGSAGLIPSQFLEEKRKAFVRRDWDNSGPFCGTISSKKKKKMMYLTTRNAEFDRHEIQIYEEVAKMPPFQRKTLVLIGAQGVGRRSLKNRFIVLNPTRFGTTVPFTSRKPREDEKDGQAYKFVSRSEMEADIKAGKYLEHGEYEGNLYGTKIDSILEVVQTGRTCILDVNPQALKVLRTSEFMPYVVFIAAPELETLRAMHKAVVDAGITTKLLTDSDLKKTVDESARIQRAYNHYFDLIIINDNLDKAFEKLQTAIEKLRMEPQWVPISWVY

SEQ ID NO: 878655 - protein, 621 aa, Homo sapiens; identical to SEQ ID NO: 878653

SEQ ID NO: 878656 - protein, 396 aa, Homo sapiens
CARGGSGGGDRSWGRVGSEGGGGERGRRRAVRDAFPVLNYEPRVCRWGCSAAPVAEGEQRRRGATGSGGSGGAEAAEVRAAMQQVLENLTELPSSTGAEEIDLIFLKGIMENPIVKSLAKAHERLEDSKLEAVSDNNLELVNEILEDITPLINVDENVAELVGILKEPHFQSLLEAHDIVASKCYDSPPSSPEMNNSSINNQLLPVDAIRILGIHKRAGEPLGVTFRVENNDLVIARILHGGMIDRQGLLHVGDIIKEVNGHEVGNNPKELQELLKNISGSVTLKILPSYRDTITPQQVFVKCHFDYNPYNDNLIPCKEAGLKFSKGEILQIVNREDPNWWQASHVKEGGSAGLIPSQFLEEKRKAFVRRDWDNSGPFVDTISSKKKKTKKQKNLW

SEQ ID NO: 878657 - protein, 328 aa, Homo sapiens
CARGGSGGGDRSWGRVGSEGGGGERGRRRAVRDAFPVLNYEPRVCRWGCSAAPVAEGEQRRRGATGSGGSGGAEAAEVRAAMQQVLENLTELPSSTGAEEIDLIFLKGIMENPIVKSLAKAHERLEDSKLEAVSDNNLELVNEILEDITPLINVDENVAELVGILKEPHFQSLLEAHDIVASKCYDSPPSSPEMNNSSINNQLLPVDAIRILGIHKRAGEPLGVTFRVENNDLVIARILHGGMIDRQGLLHVGDIIKEVNGHEVGNNPKELQELLKNISGSVTLKILPSYRDTITPQQVSNKIFGSIKNTFMFLITVLEITISCYYFA

SEQ ID NO: 878658 - protein, 540 aa, Homo sapiens
MQQVLENLTELPSSTGAEEIDLIFLKGIMENPIVKSLAKAHERLEDSKLEAVSDNNLELVNEILEDITPLINVDENVAELVGILKEPHFQSLLEAHDIVASKCYDSPPSSPEMNNSSINNQLLPVDAIRILGIHKRAGEPLGVTFRVENNDLVIARILHGGMIDRQGLLHVGDIIKEVNGHEVGNNPKELQELLKNISGSVTLKILPSYRDTITPQQVFVKCHFDYNPYNDNLIPCKEAGLKFSKGEILQIVNREDPNWWQASHVKEGGSAGLIPSQFLEEKRKAFVRRDWDNSGPFCGTISSKKKKKMMYLTTRNAEFDRHEIQIYEEVAKMPPFQRKTLVLIGAQGVGRRSLKNRFIVLNPTRFGTTVPFTSRKPREDEKDGQAYKFVSRSEMEADIKAGKYLEHGEYEGNLYGTKIDSILEVVQTGRTCILDVNPQALKVLRTSEFMPYVVFIAAPELETLRAMHKAVVDAGITTKLLTDSDLKKTVDESARIQRAYNHYFDLIIINDNLDKAFEKLQTAIEKLRMEPQWVPISWVY

SEQ ID NO: 878659 - protein, 428 aa, Homo sapiens; identical to SEQ ID NO: 878654

SEQ ID NO: 878660 - protein, 231 aa, Homo sapiens
MYLTTRNAEFDRHEIQIYEEVAKMPPFQRKTLVLIGAQGVGRRSLKNRFIVLNPTRFGTTVPFTSRKPREDEKDGQAYKFVSRSEMEADIKAGKYLEHGEYEGNLYGTKIDSILEVVQTGRTCILDVNPQALKVLRTSEFMPYVVFIAAPELETLRAMHKAVVDAGITTKLLTDSDLKKTVDESARIQRAYNHYFDLIIINDNLDKAFEKLQTAIEKLRMEPQWVPISWVY

SEQ ID NO: 878661 - protein, 608 aa, Homo sapiens
MGRIGISCLFPASWHFSISPVGCPRILNTNLRQIMVISVLAAAVSLLYFSVVIIRNKYGRLTRDKKFQRYLARVTDIEATDTNNPNVNYGIVVDCGSSGSRVFVYCWPRHNGNPHDLLDIRQMRDKNRKPVVMKIKPGISEFATSPEKVSDYISPLLNFAAEHVPRAKHKETPLYILCTAGMRILPESQQKAILEDLLTDIPVHFDFLFSDSHAEVISGKQEGVYAWIGINFVLGRFEHIEDDDEAVVEVNIPGSESSEAIVRKRTAGILDMGGVSTQIAYEVPKTEEVAKNLLAEFNLGCDVHQTEHVYRVYVATFLGFGGNAARQRYEDRIFANTIQKNRLLGKQTGLTPDMPYLDPCLPLDIKDEIQQNGQTIYLRGTGDFDLCRETIQPFMNKTNETQTSLNGVYQPPIHFQNSEFYGFSEFYYCTEDVLRMGGDYNAAKFTKAAKDYCATKWSILRERFDRGLYASHADLHRLKYQCFKSAWMFEVFHRGFSFPVNYKSLKTALQVYDKEVQWTLGAILYRTRFLPLRDIQQEAFRASHTHWRGVSFVYNHYLFSGCFLVVLLAILLYLLRLRRIHRRTPRSSSAAALWMEEGLPAQNAPGTL

SEQ ID NO: 878662 - protein, 616 aa, Homo sapiens
MGRIGISCLFPASWHFSISPVGCPRILNTNLRQIMVISVLAAAVSLLYFSVVIIRNKYGRLTRDKKFQRYLARVTDIEATDTNNPNVNYGIVVDCGSSGSRVFVYCWPRHNGNPHDLLDIRQMRDKNRKPVVMKIKPGISEFATSPEKVSDYISPLLNFAAEHVPRAKHKETPLYILCTAGMRILPESQQKAILEDLLTDIPVHFDFLFSDSHAEVISGKQEGVYAWIGINFVLGRFEHIEDDDEAVVEVNIPGSESSEAIVRKRTAGILDMGGVSTQIAYEVPKTVSFASSQQEEVAKNLLAEFNLGCDVHQTEHVYRVYVATFLGFGGNAARQRYEDRIFANTIQKNRLLGKQTGLTPDMPYLDPCLPLDIKDEIQQNGQTIYLRGTGDFDLCRETIQPFMNKTNETQTSLNGVYQPPIHFQNSEFYGFSEFYYCTEDVLRMGGDYNAAKFTKAAKDYCATKWSILRERFDRGLYASHADLHRLKYQCFKSAWMFEVFHRGFSFPVNYKSLKTALQVYDKEVQWTLGAILYRTRFLPLRDIQQEAFRASHTHWRGVSFVYNHYLFSGCFLVVLLAILLYLLRLRRIHRRTPRSSSAAALWMEEGLPAQNAPGTL

SEQ ID NO: 878663 - protein, 616 aa, Homo sapiens; identical to SEQ ID NO: 878662

SEQ ID NO: 878664 - protein, 515 aa, Homo sapiens
NRPSSNSRVFVYCWPRHNGNPHDLLDIRQMRDKNRKPVVMKIKPGISEFATSPEKVSDYISPLLNFAAEHVPRAKHKETPLYILCTAGMRILPESQQKAILEDLLTDIPVHFDFLFSDSHAEVISGKQEGVYAWIGINFVLGRFEHIEDDDEAVVEVNIPGSESSEAIVRKRTAGILDMGGVSTQIAYEVPKTEEVAKNLLAEFNLGCDVHQTEHVYRVYVATFLGFGGNAARQRYEDRIFANTIQKNRLLGKQTGLTPDMPYLDPCLPLDIKDEIQQNGQTIYLRGTGDFDLCRETIQPFMNKTNETQTSLNGVYQPPIHFQNSEFYGFSEFYYCTEDVLRMGGDYNAAKFTKAAKDYCATKWSILRERFDRGLYASHADLHRLKYQCFKSAWMFEVFHRGFSFPVNYKSLKTALQVYDKEVQWTLGAILYRTRFLPLRDIQQEAFRASHTHWRGVSFVYNHYLFSGCFLVVLLAILLYLLRLRRIHRRTPRSSSAAALWMEEGLPAQNAPGTL

SEQ ID NO: 878665 - protein, 628 aa, Homo sapiens
MGRIGISCLFPASWHFSISPVGCPRILNTNLRQIMVISVLAAAVSLLYFSVVIIRNKYGRLTRDKKFQRYLARVTDIEATDTNNPNVNYGIVVDCGSSGSRVFVYCWPRHNGNPHDLLDIRQMRDKNRKPVVMKIKPGISEFATSPEKVSDYISPLLNFAAEHVPRAKHKETPLYILCTAGMRILPESQQKAILEDLLTDIPVHFDFLFSDSHAEVISGKQEGVYAWIGINFVLGRFEHIEDDDEAVVEVNIPGSESSEAIVRKRTAGILDMGGVSTQIAYEVPKTEEVAKNLLAEFNLGCDVHQTEHVYRVYVATFLGFGGNAARQRYEDRIFANTIQKNRLLGKQTGLTPDMPYLDPCLPLDIKDEIQQNGQTIYLRGTGDFDLCRETIQPFMNKTNETQTSLNGVYQPPIHFQNSEFYGFSEFYYCTEDVLRMGGDYNAAKFTKAAKDYCATKWSILRERFDRGLYASHADLHRLKYQCFKSAWMFEVFHRGFSFPVNYKSLKTALQVYDKEVQWTLGAILYRTRFLPLSHRRPEPPPLLEKGAQRRRKRRGTTVESAVPARPLRIPETKGRKTLRLTVTELVNVGTETHTSYSRPLPYTTASLSVLEPQNNICHLWWNELVIDG

SEQ ID NO: 878666 - protein, 544 aa, Homo sapiens
MGRIGISCLFPASWHFSISPVGCPRILNTNLRQIMVISVLAAAVSLLYFSVVIIRNKYGRLTRDKKFQRYLARVTDIEATDTNNPNVNYGIVVDCGSSGSRVFVYCWPRHNGNPHDLLDIRQMRDKNRKPVVMKIKPGISEFATSPEKVSDYISPLLNFAAEHVPRAKHKETPLYILCTAGMRILPESQQKAILEDLLTDIPVHFDFLFSDSHAEVISGKQEGVYAWIGINFVLGRFEHIEDDDEAVVEVNIPGSESSEAIVRKRTAGILDMGGVSTQIAYEVPKTEEVAKNLLAEFNLGCDVHQTEHVYRVYVATFLGFGGNAARQRYEDRIFANTIQKNRLLGKQTGLTPDMPYLDPCLPLDIKDEIQQNGQTIYLRGTGDFDLCRETIQPFMNKTNETQTSLNGVYQPPIHFQNSEFYGFSEFYYCTEDVLRMGGDYNAAKFTKAAKDYCATKWSILRERFDRGLYASHADLHRLKYQCFKSAWMFEVFHRGFSFPVNYKSLKTALQVYDKEVQWTLGAILYRTRFLPLRKLLLLLYPACP

SEQ ID NO: 878667 - protein, 268 aa, Homo sapiens
MGRIGISCLFPASWHFSISPVGCPRILNTNLRQIMVISVLAAAVSLLYFSVVIIRNKYGRLTRDKKFQRYLARVTDIEATDTNNPNVNYGIVVDCGSSGSRVFVYCWPRHNGNPHDLLDIRQMRDKNRKPVVMKIKPGISEFATSPEKVSDYISPLLNFAAEHVPRAKHKETPLYILCTAGMRILPESQQKAILEDLLTDIPVHFDFLFSDSHAEVISGKQEGVYAWIGINFVLGRFEHIEDDDEPNSYFQRIYNHPPHPTMSVDEVL

SEQ ID NO: 878668 - protein, 616 aa, Homo sapiens; identical to SEQ ID NO: 878662

SEQ ID NO: 878669 - protein, 255 aa, Homo sapiens
MPYLDPCLPLDIKDEIQQNGQTIYLRGTGDFDLCRETIQPFMNKTNETQTSLNGVYQPPIHFQNSEFYGFSEFYYCTEDVLRMGGDYNAAKFTKAAKDYCATKWSILRERFDRGLYASHADLHRLKYQCFKSAWMFEVFHRGFSFPVNYKSLKTALQVYDKEVQWTLGAILYRTRFLPLRDIQQEAFRASHTHWRGVSFVYNHYLFSGCFLVVLLAILLYLLRLRRIHRRTPRSSSAAALWMEEGLPAQNAPGTL

SEQ ID NO: 878670 - protein, 611 aa, Homo sapiens
MGRIGISCLFPASWHFSISPVGCPRILNTNLRQIMVISVLAAAVSLLYFSVVIIRNKYGRLTRDKKFQRYLARVTDIEATDTNNPNVNYGIVVDCGSSGSRVFVYCWPRHNGNPHDLLDIRQMRDKNRKPVVMKIKPGISEFATSPEKVSDYISPLLNFAAEHVPRAKHKETPLYILCTAGMRILPESQQKAILEDLLTDIPVHFDFLFSDSHAEVISGKQEGVYAWIGINFVLGRFEHIEDDDEAVVEVNIPGSESSEAIVRKRTAGILDMGGVSTQIAYEVPKTEEVAKNLLAEFNLGCDVHQTEHVYRVYVATFLGFGGNAARQRYEDRIFANTIQKNRLLGKQTGLTPDMPYLDPCLPLDIKDEIQQNGQTIYLRGTGDFDLCRETIQPFMNKTNETQTSLNGVYQPPIHFQNSEFYGFSEFYYCTEDVLRMGGDYNAAKFTKAAKDYCATKWSILRERFDRGLYASHADLHRLKYQCFKSAWMFEVFHRGFSFPVNYKSLKTALQVYDKEVQWTLGAILYRTRFLPLSHRRPEPPPLLEKGAQRRRKRRGTTVESAVPARPLRIPETKKIGMLIIPCSGGCPKLCCAVWQPPPYGATKHLQCAAWN

SEQ ID NO: 878671 - protein, 345 aa, Homo sapiens
MGRIGISCLFPASWHFSISPVGCPRILNTNLRQIMVISVLAAAVSLLYFSVVIIRNKYGRLTRDKKFQRYLARVTDIEATDTNNPNVNYGIVVDCGSSGSRVFVYCWPRHNGNPHDLLDIRQMRDKNRKPVVMKIKPGISEFATSPEKVSDYISPLLNFAAEHVPRAKHKETPLYILCTAGMRILPESQQKAILEDLLTDIPVHFDFLFSDSHAEVISGKQEGVYAWIGINFVLGRFEHIEDDDEAVVEVNIPGSESSEAIVRKRTAGILDMGGVSTQIAYEVPKTEEVAKNLLAEFNLGCDVHQTEHVYRVYVATFLGFGGNAMLKSSKDKINANPSIHTFLFP

SEQ ID NO: 878672 - protein, 85 aa, Homo sapiens
LRGTGDFDLCRETIQPFMNKTNETQTSLNGVYQPPIHFQNSEFYGFSEFYYCTEDVLRMGGDYNAAKFTKAAKVPLRDAVCSACF

SEQ ID NO: 878673 - protein, 475 aa, Homo sapiens
RARAHQLPVPSVSDFLEEFPGEGRECVNCGALSTPLWRRDGTGHYLCNACGLYHKMNGVNRPLVRPQKRLSSSRRAGLCCTNCHTTNTTLWRRNSEGEPVCNACGLYMKLHGVPRPLAMKKESIQTRKRKPKTIAKARGSSGSTRNASASPSAVASTDSSAATSKAKPSLASPVCPGPSMAPQASGQEDDSLAPGHLEFKFEPEDFAFPSTAPSPQAGLRGALRQEAWCALALARSPGQPMSGEQPGTDHPLSHLRACFAPAQQRPAGPPTQRLGLLESPHSGGEAFWTDGIGPQSKKAGEGRAQLPTPRTARDSPGAAQGSGPHWPPAAEANAGHHHHQLEFRHQCSPSICLQVVAVGGKQSTSQCKTKIPSEAPEAKQGRGMRGAAGHGPPEASGLSFIAHMDRRSCGAENFSRNRCRTARDRSAGRARCQDSAEGKPLTLQSSQTYALVWTVFPEGMGKGLVLAESVYHDHF

SEQ ID NO: 878674 - protein, 109 aa, Homo sapiens
GNRSEIPGRTTITKFGAGSPLASPLHTGLDDTLMSDAGERHPTRRSCEWPVMYVRRPQGAEERGRQPQGPAGSTSSPPSGCCPSTTSPDFSSNARNLDFKSSNLIQKYF

SEQ ID NO: 878675 - protein, 388 aa, Homo sapiens
  misc_feature (19)..(19): Xaa can be any naturally occurring amino acid
AKEATPGHTTHACGVTVRXSPNLSGPGPEETRYMAGRGSEATPDPSVNTPSSLPGSTRNASASPSAVASTDSSAATSKAKPSLASPVCPGPSMAPQASGQEDDSLAPGHLEFKFEPEDFAFPSTAPSPQAGLRGALRQEAWCALALARSPGQPMSGEQPGTDHPLSHLRACFAPAQQRPAGPPTQRLGLLESPHSGGEAFWTDGIGPQSKKAGEGRAQLPTPRTARDSPGAAQGSGPHWPPAAEANAGHHHHQLEFRHQCSPSICLQVVAVGGKQSTSQCKTKIPSEAPEAKQGRGMRGAAGHGPPEASGLSFIAHMDRRSCGAENFSRNRCRTARDRSAGRARCQDSAEGKPLTLQSSQTYALVWTVFPEGMGKGLVLAESVYHDHF

SEQ ID NO: 878676 - protein, 115 aa, Homo sapiens
RVRGGAVPGAGRRSLGWGLPGNGLGLPRTPPVSRILFPPAPWRWMPDWKPEWDAADAEAALLVSYRPVLPILPLRCLPRLLRAPPPGAGRVPAGPQEGGGPRAGETRPRTVHFGK

SEQ ID NO: 878677 - protein, 183 aa, Homo sapiens
MLHDERPYLCNFLGTIYENSSRQALMNILKKDGNDKLCWVSAREHWQPQETNESLKNYQDALLQSDLTLCPVGVNTECYRIYEACSYGSIPVVEDVMTAGNCGNTSVHHGAPLQLLKSMGAPFIFIKNWKELPAVLEKEKTIILQEKIERRKMLLQWYQHFKTELKMKFTNILESSFLMNNKS

SEQ ID NO: 878678 - protein, 340 aa, Homo sapiens
MAEETCLYLWEHIFEGLLDPSDVTAQWREGKSIVGRTQYSFITGPAVIPGYFSVDVNNVVLILNGREKAKIFYATQWLLYAQNLVQIQKLQHLAVVLLGNEHCDNEWINPFLKRNGGFVELLFIIYDSPWINDVDVFQWPLGVATYRNFPVVEASWSMLHDERPYLCNFLGTIYENSSRQALMNILKKDGNDKLCWVSAREHWQPQETNESLKNYQDALLQSDLTLCPVGVNTECYRIYEACSYGSIPVVEDVMTAGNCGNTSVHHGAPLQLLKSMGAPFIFIKNWKELPAVLEKEKTIILQEKIERRKMLLQWYQHFKTELKMKFTNILESSFLMNNKS

SEQ ID NO: 878679 - protein, 478 aa, Homo sapiens
SVSGAGLYRALGGGALAGDCLETGWACLGRRRCRGFSFRPLHGGGCLTGSPSGMRLTRKRLCSFLIALYCLFSLYAAYHVFFGRRRQAPAGSPRGLRKGAAPARERRGREQSTLESEEWNPWEGDEKNEQQHRFKTSLQILDKSTKGKTDLSVQIWGKAAIGLYLWEHIFEGLLDPSDVTAQWREGKSIVGRTQYSFITGPAVIPGYFSVDVNNVVLILNGREKAKIFYATQWLLYAQNLVQIQKLQHLAVVLLGNEHCDNEWINPFLINDVDVFQWPLGVATYRNFPVVEASWSMLHDERPYLCNFLGTIYENSSRQALMNILKKDGNDKLCWVSAREHWQPQETNESLKNYQDALLQSDLTLCPVGVNTECYRIYEACSYGSIPVVEDVMTAGNCGNTSVHHGAPLQLLKSMGAPFIFIKNWKELPAVLEKEKTIILQEKIERRKMLLQWYQHFKTELKMKFTNILESSFLMNNKS

SEQ ID NO: 878680 - protein, 70 aa, Homo sapiens
LPSGSALLAGAAGRLGPGPRTRLSSPGLPAGPEKRFAPYSLSSQPLARNWRMVLILTQISHAVPAPDPRG

SEQ ID NO: 878681 - protein, 496 aa, Homo sapiens
SVSGAGLYRALGGGALAGDCLETGWACLGRRRCRGFSFRPLHGGGCLTGSPSGMRLTRKRLCSFLIALYCLFSLYAAYHVFFGRRRQAPAGSPRGLRKGAAPARERRGREQSTLESEEWNPWEGDEKNEQQHRFKTSLQILDKSTKGKTDLSVQIWGKAAIGLYLWEHIFEGLLDPSDVTAQWREGKSIVGRTQYSFITGPAVIPGYFSVDVNNVVLILNGREKAKIFYATQWLLYAQNLVQIQKLQHLAVVLLGNEHCDNEWINPFLKRNGGFVELLFIIYDSPWINDVDVFQWPLGVATYRNFPVVEASWSMLHDERPYLCNFLGTIYENSSRQALMNILKKDGNDKLCWVSAREHWQPQETNESLKNYQDALLQSDLTLCPVGVNTECYRIYEACSYGSIPVVEDVMTAGNCGNTSVHHGAPLQLLKSMGAPFIFIKNWKELPAVLEKEKTIILQEKIERRKMLLQWYQHFKTELKMKFTNILESSFLMNNKS

SEQ ID NO: 878682 - protein, 173 aa, Homo sapiens
SVSGAGLYRALGGGALAGDCLETGWACLGRRRCRGFSFRPLHGGGCLTGSPSGMRLTRKRLCSFLIALYCLFSLYAAYHVFFGRRRQAPAGSPRGLRKGAAPARERRGREQSTLESEEWNPWEGDEKNEQQHRFKTSLQILDKSTKGKTDLSVQIWGKAAIVQAGSVSAHKTF

SEQ ID NO: 878683 - protein, 313 aa, Homo sapiens
HIIHINGEVPWYYSWTSDEAVTVFFSVDVNNVVLILNGREKAKIFYATQWLLYAQNLVQIQKLQHLAVVLLGNEHCDNEWINPFLKRNGGFVELLFIIYDSPWINDVDVFQWPLGVATYRNFPVVEASWSMLHDERPYLCNFLGTIYENSSRQALMNILKKDGNDKLCWVSAREHWQPQETNESLKNYQDALLQSDLTLCPVGVNTECYRIYEACSYGSIPVVEDVMTAGNCGNTSVHHGAPLQLLKSMGAPFIFIKNWKELPAVLEKEKTIILQEKIERRKMLLQWYQHFKTELKMKFTNILESSFLMNNKS

SEQ ID NO: 878684 - protein, 518 aa, Homo sapiens
MAETSLLEAGASAASTAAALENLQVEASCSVCLEYLKEPVIIECGHNFCKACITRWWEDLERDFPCPVCRKTSRYRSLRPNRQLGSMVEIAKQLQAVKRKIRDESLCPQHHEALSLFCYEDQEAVCLICAISHTHRAHTVVPLDDATQEYKEKLQKCLEPLEQKLQEITRCKSSEEKKPGELKRLVESRRQQILREFEELHRRLDEEQQVLLSRLEEEEQDILQRLRENAAHLGDKRRDLAHLAAEVEGKCLQSGFEMLKDVKSTLEKNIPRKFGGSLSTICPRDHKALLGLVKEINRCEKVKTMEVTSVSIELEKNFSNFPRQYFALRKILKQLIADVTLDPETAHPNLVLSEDRKSVKFVETRLRDLPDTPRRFTFYPCVLATEGFTSGRHYWEVEVGDKTHWAVGVCRDSVSRKGELTPLPETGYWRVRLWNGDKYAATTTPFTPLHIKVKPKRVGIFLDYEAGTLSFYNVTDRSHIYTFTDTFTEKLWPLFYPGIRAGRKNAAPLTIRPPTDWE

SEQ ID NO: 878685 - protein, 488 aa, Homo sapiens
MAETSLLEAGASAASTAAALENLQVEASCSVCLEYLKEPVIIECGHNFCKACITRWWEDLERDFPCPVCRKTSRYRSLRPNRQLGSMVEIAKQLQAVKRKIRDESLCPQHHEALSLFCYEDQEAVCLICAISHTHRAHTVVPLDDATQEYKEKLQKCLEPLEQKLQEITRCKSSEEKKPGELKRLVESRRQQILREFEELHRRLDEEQQVLLSRLEEEEQDILQRLRENAAHLGDKRRDLAHLAAEVEGKCLQSGFEMLKDVKSTLEKCEKVKTMEVTSVSIELEKNFSNFPRQYFALRKILKQLIADVTLDPETAHPNLVLSEDRKSVKFVETRLRDLPDTPRRFTFYPCVLATEGFTSGRHYWEVEVGDKTHWAVGVCRDSVSRKGELTPLPETGYWRVRLWNGDKYAATTTPFTPLHIKVKPKRVGIFLDYEAGTLSFYNVTDRSHIYTFTDTFTEKLWPLFYPGIRAGRKNAAPLTIRPPTDWE

SEQ ID NO: 878686 - protein, 488 aa, Homo sapiens; identical to SEQ ID NO: 878685

SEQ ID NO: 878687 - protein, 488 aa, Homo sapiens; identical to SEQ ID NO: 878685

SEQ ID NO: 878688 - protein, 193 aa, Homo sapiens
SSSSPLWLLPPADVTLDPETAHPNLVLSEDRKSVKFVETRLRDLPDTPRRFTFYPCVLATEGFTSGRHYWEVEVGDKTHWAVGVCRDSVSRKGELTPLPETGYWRVRLWNGDKYAATTTPFTPLHIKVKPKRVGIFLDYEAGTLSFYNVTDRSHIYTFTDTFTEKLWPLFYPGIRAGRKNAAPLTIRPPTDWE

SEQ ID NO: 878689 - protein, 271 aa, Homo sapiens
MAETSLLEAGASAASTAAALENLQVEASCSVCLEYLKEPVIIECGHNFCKACITRWWEDLERDFPCPVCRKTSRYRSLRPNRQLGSMVEIAKQLQAVKRKIRDESLCPQHHEALSLFCYEDQEAVCLICAISHTHRAHTVVPLDDATQEYKEKLQKCLEPLEQKLQEITRCKSSEEKKPGELKRLVESRRQQILREFEELHRRLDEEQQVLLSRLEEEEQDILQRLRENAAHLGDKRRDLAHLAAEVEGKCLQSGFEMLKVRPLPLHSPSG

SEQ ID NO: 878690 - protein, 240 aa, Homo sapiens
MAETSLLEAGASAASTAAALENLQVEASCSVCLEYLKEPVIIECGHNFCKACITRWWEDLERDFPCPVCRKTSRYRSLRPNRQLGSMVEIAKQLQAVKRKIRDESLCPQHHEALSLFCYEDQEAVCLICAISHTHRAHTVVPLDDATQEYKEKLQKCLEPLEQKLQEITRCKSSEEKKPGELKRLVESRRQQILREFEELHRRLDEEQQVLLSRLEEEEQGTALDRTDLPNMPAQPTLPQ

SEQ ID NO: 878691 - protein, 518 aa, Homo sapiens; identical to SEQ ID NO: 878684

SEQ ID NO: 878692 - protein, 518 aa, Homo sapiens; identical to SEQ ID NO: 878684

SEQ ID NO: 878693 - protein, 488 aa, Homo sapiens; identical to SEQ ID NO: 878685

SEQ ID NO: 878694 - protein, 529 aa, Homo sapiens
MSLARGEVSADAKALIAKLRISLYYINEEEHVVYKQWYVPEQDVSDSEVRAPSVASTAAALENLQVEASCSVCLEYLKEPVIIECGHNFCKACITRWWEDLERDFPCPVCRKTSRYRSLRPNRQLGSMVEIAKQLQAVKRKIRDESLCPQHHEALSLFCYEDQEAVCLICAISHTHRAHTVVPLDDATQEYKEKLQKCLEPLEQKLQEITRCKSSEEKKPGELKRLVESRRQQILREFEELHRRLDEEQQVLLSRLEEEEQDILQRLRENAAHLGDKRRDLAHLAAEVEGKCLQSGFEMLKDVKSTLEKCEKVKTMEVTSVSIELEKNFSNFPRQYFALRKILKQLIADVTLDPETAHPNLVLSEDRKSVKFVETRLRDLPDTPRRFTFYPCVLATEGFTSGRHYWEVEVGDKTHWAVGVCRDSVSRKGELTPLPETGYWRVRLWNGDKYAATTTPFTPLHIKVKPKRVGIFLDYEAGTLSFYNVTDRSHIYTFTDTFTEKLWPLFYPGIRAGRKNAAPLTIRPPTDWE

SEQ ID NO: 878695 - protein, 297 aa, Homo sapiens
MAETSLLEAGASAASTAAALENLQVEASCSVCLEYLKEPVIIECGHNFCKACITRWWEDLERDFPCPVCRKTSRYRSLRPNRQLGSMVEIAKQLQAVKRKIRDESLCPQHHEALSLFCYEDQEAVCLICAISHTHRAHTVVPLDDATQEYKEKLQKCLEPLEQKLQEITRCKSSEEKKPGELKRLVESRRQQILREFEELHRRLDEEQQVLLSRLEEEEQDILQRLRENAAHLGDKRRDLAHLAAEVEGKCLQSGFEMLKDVKSTLEKCEKVKTMEVTSTTPCTSLHSEINDNVRGR

SEQ ID NO: 878696 - protein, 177 aa, Homo sapiens
ACAVRLAAGVRRWAEPTMAAERKTKLSKNLLRMKFMQRGLDSETKKQLEEEEKKIISEEHWYLDLPELKEKESFIIEEQSFLLCEDLLYGRMSFRGFNPEVEKLMLQMNAKHKAEEVEDETVELDVSDEEMARRYETLVGTIGKKFARKRDHANYEEDENGDITPIKAKKMFLKPQD

SEQ ID NO: 878697 - protein, 72 aa, Homo sapiens
ACAVRLAAGVRRWAEPTMAAERKTKLSKNLLRMKFMQRGLDSETKKQLEEEEKKIISEEHWYLDLPELKEKE

SEQ ID NO: 878698 - protein, 177 aa, Homo sapiens; identical to SEQ ID NO: 878696

SEQ ID NO: 878699 - protein, 187 aa, Homo sapiens
MCGEARGRSAALGGTYHGGREKDKVVQESAAHEGAGTLREPRRAFMQRGLDSETKKQLEEEEKKIISEEHWYLDLPELKEKESFIIEEQSFLLCEDLLYGRMSFRGFNPEVEKLMLQMNAKHKAEEVEDETVELDVSDEEMARRYETLVGTIGKKFARKRDHANYEEDENGDITPIKAKKMFLKPQD

SEQ ID NO: 878700 - protein, 159 aa, Homo sapiens
ACAVRLAAGVRRWAEPTMAAERKTKLSKNLLRMKFMQRGLDSETKKQLEEEEKKIISEEHWYLDLPELKEKESFIIEEQSFLLCEDLLYGRMSFRGFNPEVEKLMLQMNAKHKAEEVEDETVELDVSDEEMARRYETLVGTIGKKFARKRDHANYEEDD

SEQ ID NO: 878701 - protein, 177 aa, Homo sapiens; identical to SEQ ID NO: 878696

SEQ ID NO: 878702 - protein, 177 aa, Homo sapiens; identical to SEQ ID NO: 878696

SEQ ID NO: 878703 - protein, 142 aa, Homo sapiens
MQRGLDSETKKQLEEEEKKIISEEHWYLDLPELKEKESFIIEEQSFLLCEDLLYGRMSFRGFNPEVEKLMLQMNAKHKAEEVEDETVELDVSDEEMARRYETLVGTIGKKFARKRDHANYEEDENGDITPIKAKKMFLKPQD

SEQ ID NO: 878704 - protein, 1405 aa, Homo sapiens
GKGGGVSNRELDPLAAAAMAARSPPSPHPSPPARQLGPRSPRVGRGAEVHAMRSEASGFAGAAREVVADESDTPAHAPLLSAPMGSRRLEGISVEEAMVTRTQLLEEELSSLKEELALCQADKEFVWSLWKRLQVTNPDLTQVVSLVVEREKQKSEAKDRKVLEILQVKDAKIQEFEQRESVLKQEINDLVKRKIAVDEENAFLRKEFSDLEKKFKDKSQEIKDTKECVQNKEEQNRLVIKNLEEENKKLSTRCTDLLNDLEKLRKQEAHLRKEKYSTDAKIKTFEDNLIEARKEVEVSQSKYNALSLQLSNKQTELIQKDMDITLVRKELQELQNLYKQNSTHTAQQAELIQQLQVLNMDTQKVLRNQEDVHTAESISYQKLYNELHICFETTKSNEAMLRQSVTNLQDQLLQKEQENAKLKEKLQESQGAPLPLPQESDPDYSAQVPHRPSLSSLETLMVSQKSEIEYLQEKLKIANEKLSENISANKGFSRKSIMTSAEGKHKEPPVKRSRSLSPKSSFTDSEELQKLRKAERKIENLEKALQLKSQENDELRDAHEKRKERLQMLQTNYRAVKEQLKQWEEGSGMTEIRKIKRADPQQLRQEDSDAVWNELAYFKRENQELMIQKMNLEEELDELKVHISIDKAAIQELNRCVAERREEQLFRSGEDDEVKRSTPEKNGKEMLEQTLQKVTELENRLKSFEKRSRKLKEGNKKLMKENDFLKSLLKQQQEDTETREKELEQIIKGSKDVEKENTELQVKISELETEVTSLRRQVAEANALRNENEELINPMEKSHQSADRAKSEMATMKVRSGRYDCKTTMTKVKFKAAKKNCSVGRHHTVLNHSIKVMSNVFENLSKDGWEDVSESSSDSEAQTSQTLGTIIVETSQKISPTEDGKDQKESDPTEDSQTQGKEIVQTYLNIDGKTPKDYFHDKNAKKPTFQKKNCKMQKSSHTAVPTRVNREKYKNITAQKSSSNIILLRERIISLQQQNSVLQNAKKTAELSVKEYKEVNEKLLHQQQVSDQRFQTSRQTIKKLNLDLAGLRKEKEDLLKKLESSSEITSLAEENSQVTFPRIQVTSLSPSRSMDLEMKQLQYKLKNATNELTKQSSNVKTLKFELLAKEEHIKEMHEKISRMERDITMKRHLIEDLKFRQKVNLESNKSFSEMLQNLDKKVKTLTEECSNKKVSIDSLKQRLNVAVKEKSQYEQMYQKSKEELEKKDLKLTLLVSRISETESAMAEIETAASKQLQELALQSEQVLEGAQKTLLLANEKVEEFTTFVKALAKELQNDVHVVRRQIRELKKMKKNRDACKTSTHKAQTLAASILNISRSDLEEILDTEDQVEIEKTKIDAENDKEWMLYIQKLLEGQSLTLSPRLKCNGAIMAHQNLRLPDSSSSASAS

SEQ ID NO: 878705 - protein, 1412 aa, Homo sapiens
GKGGGVSNRELDPLAAAAMAARSPPSPHPSPPARQLGPRSPRVGRGAEVHAMRSEASGFAGAAREVVADESDKIWVGEEGSGGRRGPGGAAPAHAPLLSAPMGSRRLEGISVEEAMVTRTQLLEEELSSLKEELALCQADKEFVWSLWKRLQVTNPDLTQVVSLVVEREKQKSEAKDRKVLEILQVKDAKIQEFEQRESVLKQEINDLVKRKIAVDEENAFLRKEFSDLEKKFKDKSQEIKDTKECVQNKEEQNRLVIKNLEEENKKLSTRCTDLLNDLEKLRKQEAHLRKEKYSTDAKIKTFEDNLIEARKEVEVSQSKYNALSLQLSNKQTELIQKDMDITLVRKELQELQNLYKQNSTHTAQQAELIQQLQVLNMDTQKVLRNQEDVHTAESISYQKLYNELHICFETTKSNEAMLRQSVTNLQDQLLQKEQENAKLKEKLQESQGAPLPLPQESDPDYSAQVPHRPSLSSLETLMVSQKSEIEYLQEKLKIANEKLSENISANKGFSRKSIMTSAEGKHKEPPVKRSRSLSPKSSFTDSEELQKLRKAERKIENLEKALQLKSQENDELRDAHEKRKERLQMLQTNYRAVKEQLKQWEEGSGMTEIRKIKRADPQQLRQEDSDAVWNELAYFKRENQELMIQKMNLEEELDELKVHISIDKAAIQELNRCVAERREEQLFRSGEDDEVKRSTPEKNGKEMLEQTLQKVTELENRLKSFEKRSRKLKEGNKKLMKENDFLKSLLKQQQEDTETREKELEQIIKGSKDVEKENTELQVKISELETEVTSLRRQVAEANALRNENEELINPMEKSHQSADRAKSEMATMKVRSGRYDCKTTMTKVKFKAAKKNCSVGRHHTVLNHSIKVMSNVFENLSKDGWEDVSESSSDSEAQTSQTLGTIIVETSQKISPTEDGKDQKESDPTEDSQTQGKEIVQTYLNIDGKTPKDYFHDKNAKKPTFQKKNCKMQKSSHTAVPTRVNREKYKNITAQKSSSNIILLRERIISLQQQNSVLQNAKKTAELSVKEYKEVNEKLLHQQQVSDQRFQTSRQTIKTRPAFSMQLLAMRIGHVKLNLDLAGLRKEKEDLLKKLESSSEITSLAEENSQNATNELTKQSSNVKTLKFELLAKEEHIKEMHEKISRMERDITMKRHLIEDLKFRQKVNLESNKSFSEMLQNLDKKVKTLTEECSNKKVSIDSLKQRLNVAVKEKSQYEQMYQKSKEELEKKDLKLTLLVSRISETESAMAEIETAASKQLQELALQSEQVLEGAQKTLLLANEKVEEFTTFVKALAKELQNDVHVVRRQIRELKKMKKNRDACKTSTHKAQTLAASILNISRSDLEEILDTEDQVEIEKTKIDAENDKEWMLYIQKLLEGQLPFASYLLEAVLEKINEKKKLVEGYFTIMKDIR

SEQ ID NO: 878706 - protein, 781 aa, Homo sapiens
  misc_feature (13)..(13): Xaa can be any naturally occurring amino acid
  misc_feature (49)..(49): Xaa can be any naturally occurring amino acid
EELDELKVHISMXEFEERGGAPKKAIQELNRCGQTGEGGKSKGVGNGSXKRNTPEKNGKEMLEQTLQKVTELENRLKSFEKRSRKLKEGNKKLMKENDFLKSLLKQQQEDTETREKELEQIIKGSKDVEKENTELQVKISELETEVTSLRRQVAEANALRNENEELINPMEKSHQSADRAKSEMATMKVRSGRYDCKTTMTKVKFKAAKKNCSVGRHHTVLNHSIKVMSNVFENLSKDGWEDVSESSSDSEAQTSQTLGTIIVETSQKISPTEDGKDQKESDPTEDSQTQGKEIVQTYLNIDGKTPKDYFHDKNAKKPTFQKKNCKMQKSSHTAVPTRVNREKYKNITAQKSSSNIILLRERIISLQQQNSVLQNAKKTAELSVKEYKEVNEKLLHQQQVSDQRFQTSRQTIKKLNLDLAGLRKEKEDLLKKLESSSEITSLAEENSQVTFPRIQVTSLSPSRSMDLEMKQLQYKLKNATNELTKQSSNVKTLKFELLAKEEHIKEMHEKISRMERDITMKRHLIEDLKFRQKVNLESNKSFSEMLQNLDKKVKTLTEECSNKKVSIDSLKQRLNVAVKEKSQYEQMYQKSKEELEKKDLKLTLLVSRISETESAMAEIETAASKQLQELALQSEQVLEGAQKTLLLANEKVEEFTTFVKALAKELQNDVHVVRRQIRELKKMKKNRDACKTSTHKAQTLAASILNISRSDLEEILDTEDQVEIEKTKIDAENDKEWMLYIQKLLEGQLPFASYLLEAVLEKINEKKKLVEGYFTIMKDIR

SEQ ID NO: 878707 - protein, 1423 aa, Homo sapiens
GKGGGVSNRELDPLAAAAMAARSPPSPHPSPPARQLGPRSPRVGRGAEVHAMRSEASGFAGAAREVVADESDKIWVGEEGSGGRRGPGGAAPAHAPLLSAPMGSRRLEGISVEEAMVTRTQLLEEELSSLKEELALCQADKEFVWSLWKRLQVTNPDLTQVVSLVVEREKQKSEAKDRKVLEILQVKDAKIQEFEQRESVLKQEINDLVKRKIAVDEENAFLRKEFSDLEKKFKDKSQEIKDTKECVQNKEEQNRLVIKNLEEENKKLSTRCTDLLNDLEKLRKQEAHLRKEKYSTDAKIKTFEDNLIEARKEVEVSQSKYNALSLQLSNKQTELIQKDMDITLVRKELQELQNLYKQNSTHTAQQAELIQQLQVLNMDTQKVLRNQEDVHTAESISYQKLYNELHICFETTKSNEAMLRQSVTNLQDQLLQKEQENAKLKEKLQESQGAPLPLPQESDPDYSAQVPHRPSLSSLETLMVSQKSEIEYLQEKLKIANEKLSENISANKGFSRKSIMTSAEGKHKEPPVKRSRSLSPKSSFTDSEELQKLRKAERKIENLEKALQLKSQENDELRDAHEKRKERLQMLQTNYRAVKEQLKQWEEGSGMTEIRKIKRADPQQLRQEDSDAVWNELAYFKRENQELMIQKMNLEEELDELKVHISIDKAAIQELNRCVAERREEQLFRSGEDDEVKRSTPEKNGKEMLEQTLQKVTELENRLKSFEKRSRKLKEGNKKLMKENDFLKSLLKQQQEDTETREKELEQIIKGSKDVEKENTELQVKISELETEVTSLRRQVAEANALRNENEELINPMEKSHQSADRAKSEMATMKVRSGRYDCKTTMTKVKFKAAKKNCSVGRHHTVLNHSIKVMSNVFENLSKDGWEDVSESSSDSEAQTSQTLGTIIVETSQKISPTEDGKDQKESDPTEDSQTQGKEIVQTYLNIDGKTPKDYFHDKNAKKPTFQKKNCKMQKSSHTAVPTRVNREKYKNITAQKSSSNIILLRERIISLQQQNSVLQNAKKTAELSVKEYKEVNEKLLHQQQVSDQRFQTSRQTIKKLNLDLAGLRKEKEDLLKKLESSSEITSLAEENSQVTFPRIQVTSLSPSRSMDLEMKQLQYKLKNATNELTKQSSNVKTLKFELLAKEEHIKEMHEKISRMERDITMKRHLIEDLKFRQKVNLESNKSFSEMLQNLDKKVKTLTEECSNKKVSIDSLKQRLNVAVKEKSQYEQMYQKSKEELEKKDLKLTLLVSRISETESAMAEIETAASKQLQELALQSEQVLEGAQKTLLLANEKVEEFTTFVKALAKELQNDVHVVRRQIRELKKMKKNRDACKTSTHKAQTLAASILNISRSDLEEILDTEDQVEIEKTKIDAENDKEWMLYIQKLLEGQSLTLSPRLKCNGAIMAHQNLRLPDSSSSASAS

SEQ ID NO: 878708 - protein, 1424 aa, Homo sapiens
GKGGGVSNRELDPLAAAAMAARSPPSPHPSPPARQLGPRSPRVGRGAEVHAMRSEASGFAGAAREVVADESDKIWVGEEGSGGRRGPGGAAPAHAPLLSAPMGSRRLEGISVEEAMVTRTQLLEEELSSLKEELALCQADKEFVWSLWKRLQVTNPDLTQVVSLVVEREKQKSEAKDRKVLEILQVKDAKIQEFEQRESVLKQEINDLVKRKIAVDEENAFLRKEFSDLEKKFKDKSQEIKDTKECVQNKEEQNRLVIKNLEEENKKLSTRCTDLLNDLEKLRKQEAHLRKEKYSTDAKIKTFEDNLIEARKEVEVSQSKYNALSLQLSNKQTELIQKDMDITLVRKELQELQNLYKQNSTHTAQQAELIQQLQVLNMDTQKVLRNQEDVHTAESISYQKLYNELHICFETTKSNEAMLRQSVTNLQDQLLQKEQENAKLKEKLQESQGAPLPLPQESDPDYSAQVPHRPSLSSLETLMVSQKSEIEYLQEKLKIANEKLSENISANKGFSRKSIMTSAEGKHKEPPVKRSRSLSPKSSFTDSEELQKLRKAERKIENLEKALQLKSQENDELRDAHEKRKERLQMLQTNYRAVKEQLKQWEEGSGMTEIRKIKRADPQQLRQEDSDAVWNELAYFKRENQELMIQKMNLEEELDELKVHISIDKAAIQELNRCVAERREEQLFRSGEDDEVKRSTPEKNGKEMLEQTLQKVTELENRLKSFEKRSRKLKEGNKKLMKENDFLKSLLKQQQEDTETREKELEQIIKGSKDVEKENTELQVKISELETEVTSLRRQVAEANALRNENEELINPMEKSHQSADRAKSEMATMKVRSGRYDCKTTMTKVKFKAAKKNCSVGRHHTVLNHSIKVMSNVFENLSKDGWEDVSESSSDSEAQTSQTLGTIIVETSQKISPTEDGKDQKESDPTEDSQTQGKEIVQTYLNIDGKTPKDYFHDKNAKKPTFQKKNCKMQKSSHTAVPTRVNREKYKNITAQKSSSNIILLRERIISLQQQNSVLQNAKKTAELSVKEYKEVNEKLLHQQQVSDQRFQTSRQTIKKLNLDLAGLRKEKEDLLKKLESSSEITSLAEENSQVTFPRIQVTSLSPSRSMDLEMKQLQYKLKNATNELTKQSSNVKTLKFELLAKEEHIKEMHEKISRMERDITMKRHLIEDLKFRQKVNLESNKSFSEMLQNLDKKVKTLTEECSNKKVSIDSLKQRLNVAVKEKSQYEQMYQKSKEELEKKDLKLTLLVSRISETESAMAEIETAASKQLQELALQSEQVLEGAQKTLLLANEKVEEFTTFVKALAKELQNDVHVVRRQIRELKKMKKNRDACKTSTHKAQTLAASILNISRSDLEEILDTEDQVEIEKTKIDAENDKEWMLYIQKLLEGQLPFASYLLEAVLEKINEKKKLVEGYFTIMKDIR

SEQ ID NO: 878709 - protein, 221 aa, Homo sapiens
GKGGGVSNRELDPLAAAAMAARSPPSPHPSPPARQLGPRSPRVGRGAEVHAMRSEASGFAGAAREVVADESDKIWVGEEGSGGRRGPGGAAPAHAPLLSAPMGSRRLEGISVEEAMVTRTQLLEEELSSLKEELALCQADKEFVWSLWKRLQVTNPDLTQVVSLVVERRPPEDVYHQNEEYTKKDKKLGLRKCEIQHMNNIKIFQGEDERRLRRLGSSSSQ

SEQ ID NO: 878710 - protein, 407 aa, Homo sapiens
MAGEASESWREVKSTSYMVVARENEEEAKVETPDKPIRSHETYYHENSTGKTGPPDSMPPPGSLPQHVGIPEDKFKLQFQWGHSQTRRQVAPALSPGGHPCGGATGIGKAIVKELLELGSNVVIASRKLERLKSAADELQANLPPTKQARVIPIQCNIRNEEEVNNLVKSTLDTFGKINFLVNNGGGQFLSPAEHISSKGWHAVLETNLTGTFYMCKAVDQLIWLLCLFEMAQTCFSKKTKFPLVVYSSWMKEHGGSIVNIIVPTKAGFPLAVHSGAARAGVYNLTKSLALEWACSGIRINCVAPGVIYSQTAVENYGSWGQSFFEGSFQKIPAKRIGVPEEVSSVVCFLLSPAASFITGQSVDVDGGRSLYTHSYEVPDHDNWPKGAGDLSVVKKMKETFKEKAKL

SEQ ID NO: 878711 - protein, 535 aa, Homo sapiens
MLAASALAAVVPPALSAGRQKESGSKWKVFIDQINRSLENYEPCSSQNCSCYHGVIEEDLTPFRGGISRKMMAEVVRRKLGTHYQITKNRLYRENDCMFPSRCSGVEHFILEVIGRLPDMEMVINVRDYPQVPKWMEPAIPVFSFRKTSEYHDIMYPAWTFGKGDLLFGHFILQVSAVGPPQYKICKVKQHTWPMEKEKLSKHSGHGNMPVSGMSLRPRRACAQLLWHPAAGMASWAKGRSYLAPGLLQGQVAIVTGGATGIGKAIVKELLELGSNVVIASRKLERLKSAADELQANLPPTKQARVIPIQCNIRNEEEVNNLVKSTLDTFGKINFLVNNGGGQFLSPAEHISSKGWHAVLETNLTGTFYMCKAVYSSWMKEHGGSIVNIIVPTKAGFPLAVHSGAARAGVYNLTKSLALEWACSGIRINCVAPGVIYSQTAVENYGSWGQSFFEGSFQKIPAKRIGVPEEVSSVVCFLLSPAASFITGQSVDVDGGRSLYTHSYEVPDHDNWPKGAGDLSVVKKMKETFKEKAKL

SEQ ID NO: 878712 - protein, 535 aa, Homo sapiens; identical to SEQ ID NO: 878711

SEQ ID NO: 878713 - protein, 535 aa, Homo sapiens; identical to SEQ ID NO: 878711

SEQ ID NO: 878714 - protein, 214 aa, Homo sapiens
TLAVLNSPVRECLSSHASKNNINGASRSQRGYSLTDPAWLCVQSLTKNCRNEVALLCMVSLRNEELWSSSLRHGLRTGKRHSGAARAGVYNLTKSLALEWACSGIRINCVAPGVIYSQTAVENYGSWGQSFFEGSFQKIPAKRIGVPEEVSSVVCFLLSPAASFITGQSVDVDGGRSLYTHSYEVPDHDNWPKGAGDLSVVKKMKETFKEKAKL

SEQ ID NO: 878715 - protein, 386 aa, Homo sapiens
MLAASALAAVVPPALSAGRQKESGSKWKVFIDQINRSLENYEPCSSQNCSCYHGVIEEDLTPFRGGISRKMMAEVVRRKLGTHYQITKNRLYRENDCMFPSRCSGVEHFILEVIGRLPDMEMVINVRDYPQVPKWMEPAIPVFSFRKTSEYHDIMYPAWTFGKGDLLFGHFILQVSAVGPPQYKICKVKQHTWPMEKEKLSKHSGHGNMPVSGMSLRPRRACAQLLWHPAAGMASWAKGRSYLAPGLLQGQVAIVTGGATGIGKAIVKELLELGSNVVIASRKLERLKSAADELQANLPPTKQARVIPIQCNIRNEEEVNNLVKSTLDTFGKINFLVNNGGGQFLSPAEHISSKGWHAVLETNLTGTFYMCKAGKSAMSYQSKIPC

SEQ ID NO: 878716 - protein, 349 aa, Homo sapiens
  misc_feature (8)..(8): Xaa can be any naturally occurring amino acid
  misc_feature (12)..(12): Xaa can be any naturally occurring amino acid
  misc_feature (20)..(20): Xaa can be any naturally occurring amino acid
KKAKAVGXNPGXSRRTNFPXGASSWTRMSLRPRRACAQLLWHPAAGMASWAKGRSYLAPGLLQGQVAIVTGGATGIGKAIVKELLELGSNVVIASRKLERLKSAADELQANLPPTKQARVIPIQCNIRNEEEVNNLVKSTLDTFGKINFLVNNGGGQFLSPAEHISSKGWHAVLETNLTGTFYMCKAVYSSWMKEHGGSIVNIIVPTKAGFPLAVHSGAARAGVYNLTKSLALEWACSGIRINCVAPGVIYSQTAVENYGSWGQSFFEGSFQKIPAKRIGVPEEVSSVVCFLLSPAASFITGQSVDVDGGRSLYTHSYEVPDHDNWPKGAGDLSVVKKMKETFKEKAKL

SEQ ID NO: 878717 - protein, 331 aa, Homo sapiens
  misc_feature (8)..(8): Xaa can be any naturally occurring amino acid
  misc_feature (12)..(12): Xaa can be any naturally occurring amino acid
  misc_feature (20)..(20): Xaa can be any naturally occurring amino acid
KKAKAVGXNPGXSRRTNFPXGASSWTRMSLRPRRACAQLLWHPAAGMASWAKGRSYLAPGLLQGQVAIVTGGATGIGRKLERLKSAADELQANLPPTKQARVIPIQCNIRNEEEVNNLVKSTLDTFGKINFLVNNGGGQFLSPAEHISSKGWHAVLETNLTGTFYMCKAVYSSWMKEHGGSIVNIIVPTKAGFPLAVHSGAARAGVYNLTKSLALEWACSGIRINCVAPGVIYSQTAVENYGSWGQSFFEGSFQKIPAKRIGVPEEVSSVVCFLLSPAASFITGQSVDVDGGRSLYTHSYEVPDHDNWPKGAGDLSVVKKMKETFKEKAKL

SEQ ID NO: 878718 - protein, 95 aa, Homo sapiens
LIYEIPWNLPVGKVAVDEYESLRCEELHLHAENLSRRVWELLMLLPTCPNMLMAFQNISDEQSNDGFNWKELLKIKSAHKLLYALEIIEALGKPN

SEQ ID NO: 878719 - protein, 1122 aa, Homo sapiens
MRRKNSYYVWQKIFQIQFPLYTAYKHNTHPTIEDISTQESNILGAFCDMNDVEVPLHLLRYVCLFCGKNGLSLMKDCFEYGTPETLPFLIAHAFITVVSNIRIWLHIPAVMQHIIPFRTYVIRYLCKLSDQELRQSAARNMADLMWSTVKEPLDTTLCFDKESLDLAFKYFMSPTLTMRLAGLSQITNQLHTFNDVCNNESLVSDTETSIAKELADWLISNNVVEHIFGPNLHIEIIKQCQVILNFLAAEGRLSTQHIDCIWAAAQLKHCSRYIHDLFPSLIKNLDPVPLRHLLNLVSALEPSVHTEQTLYLASMLIKALWNNALAAKAQLSKQSSFASLLNTNIPIGNKKEEEELRRTAPSPWSPAASPQSSDNSDTHQSGGSDIEMDEQLINRTKHVQQRLSDTEESMQGSSDETANSGEDGSSGPGSSSGHSDGSSNEVNSSHASQSAGSPGSEVQSEDIADIEALKEEDEDDDHGHNPPKSSCGTDLRNRKLESQAGICLGDSQGTSERNGTSSGTGKDLVFNTESLPSVDNRMRMLDACSHSEDPEHDISGEMNATHIAQGSQESCITRTGDFLGETIGNELFNCRQFIGPQHHHHHHHHHHHHDGHMVDDMLSADDVSCSSSQVSAKSEKNMADFDGEESGCEEELVQINSHAELTSHLQQHLPNLASIYHEHLSQGPVVHKHQFNSNAVTDINLDNVCKKGNTLLWDIVQDEDAVNLSEGLINEAEKLLCSLVCWFTDRQIRMRFIEGCLENLGNNRSVVISLRLLPKLFGTFQQFGSSYDTHWITMWAEKELNMMKLFFDNLVYYIQTVREGRQKHALYSHSAEVQVRLQFLTCVFSTLGSPDHFRLSLEQVDILWHCLVEDSECYDDALHWFLNQVRSKDQHAMGMETYKHLFLEKMPQLKPETISMTGLNLFQHLCNLARLATSAYDGCSNSELCGMDQFWGIALRAQSGDVSRAAIQYINSYYINGKTGLEKEQEFISKCMESLMIASSSLEQESHSSLMVIERGLLMLKTHLEAFRRRFAYHLRQWQIEGTGISSHLKALSDKQSLPLRVVCQPAGLPDKMTIEMYPSDQVADLRAEVTHWYENLQKEQINQQAQLQEFGQSNRKGEFPG

SEQ ID NO: 878720 - protein, 1394 aa, Homo sapiens
MRRKNSYYVWQKIFQIQFPLYTAYKHNTHPTIEDISTQESNILGAFCDMNDVEVPLHLLRYVCLFCGKNGLSLMKDCFEYGTPETLPFLIAHAFITVVSNIRIWLHIPAVMQHIIPFRTYVIRYLCKLSDQELRQSAARNMADLMWSTVKEPLDTTLCFDKESLDLAFKYFMSPTLTMRLAGLSQITNQLHTFNDVCNNESLVSDTETSIAKELADWLISNNVVEHIFGPNLHIEIIKQCQVILNFLAAEGRLSTQHIDCIWAAAQRKKSLEEQLHHLGHLQLVLKAVIIAIHIKVEVVTLKWMSNLLIEPNMCNNDFQTQRNPCREVLTKLPTVVKMEAVVLVAVVGIVMDLAMRLILATQASQLGALAVRYSQKTLQILKPSKRKMKTMIMVIILPKAVVVQIFGIESSESQAGICLGDSQGTSERNGTSSGTGKDLVFNTESLPSVDNRMRMLDACSHSEDPEHDISGEMNATHIAQGSQESCITRTGDFLGETIGNELFNCRQFIGPQHHHHHHHHHHHHDGHMVDDMLSADDVSCSSSQVSAKSEKNMADFDGEESGCEEELVQINSHAELTSHLQQHLPNLASIYHEHLSQGPVVHKHQFNSNAVTDINLDNVCKKGNTLLWDIVQDEDAVNLSEGLINEAEKLLCSLVCWFTDRQIRMRFIEGCLENLGNNRSVVISLRLLPKLFGTFQQFGSSYDTHWITMWAEKELNMMKLFFDNLVYYIQTVREGRQKHALYSHSAEVQVRLQFLTCVFSTLGSPDHFRLSLEQVDILWHCLVEDSECYDDALHWFLNQVRSKDQHAMGMETYKHLFLEKMPQLKPETISMTGLNLFQHLCNLARLATSAYDGCSNSELCGMDQFWGIALRAQSGDVSRAAIQYINSYYINGKTGLEKEQEFISKCMESLMIASSSLEQESHSSLMVIERGLLMLKTHLEAFRRRFAYHLRQWQIEGTGISSHLKALSDKQSLPLRVVCQPAGLPDKMTIEMYPSDQVADLRAEVTHWYENLQKEQINQQAQLQEFGQSNRKGEFPGGLMGPVRMISSGHELTTDYDEKALHELGFKDMQMVFVSLGAPRRERKGEGVQLPASCLPPPQKDNIPMLLLLQEPHLTTLFDLLEMLASFKPPSGKVAVDDSESLRCEELHLHAENLSRRVWELLMLLPTCPNMLMAFQNISDEQSFKAQSDHRSRHEVSHYSMWLLVSWAHCCSLVKSSLADSDHLQDWLKKLTLLIPETAVCHESCSGLYKLSLSGLDGGDSINRSFLLLAASTLLKFLPDAQALKPIRIDDYEEEPILKPGCKEYFWLLCKLVDNIHIKDASQTTLLDLDALARHLADCIRSREILDHQDGNVEDDGLTGLLRLATSVVKHKPPFKFSREGQVSVKIIKCFYEM

SEQ ID NO: 878721 - protein, 1300 aa, Homo sapiens
MRRKNSYYVWQKIFQIQFPLYTAYKHNTHPTIEDISTQESNILGAFCDMNDVEVPLHLLRYVCLFCGKNGLSLMKDCFEYGTPETLPFLIAHAFITVVSNIRIWLHIPAVMQHIIPFRTYVIRYLCKLSDQELRQSAARNMADLMWSTVKEPLDTTLCFDKESLDLAFKYFMSPTLTMRLAGLSQITNQLHTFNDVCNNESLVSDTETSIAKELADWLISNNVVEHIFGPNLHIEIIKQCQVILNFLAAEGRLSTQHIDCIWAAAQLKHCSRYIHDLFPSLIKNLDPVPLRHLLNLVSALEPSVHTEQTLYLASMLIKALWNNALAAKAQLSKQSSFASLLNTNIPIGNKKEEEELRRTAPSPWSPAASPQSSDNSDTHQSGGSDIEMDEQLINRTKHVQQRLSDTEESMQGSSDETANSGEDGSSGPGSSSGHSDGSSNEVNSSHASQSAGSPGSEVQSEDIADIEALKEEDEDDDHGHNPPKSSCGTDLRNRKLESQAGICLGDSQGTSERNGTSSGTGKDLVFNTESLPSVDNRMRMLDACSHSEDPEHDISGEMNATHIAQGSQESCITRTGDFLGETIGNELFNCRQFIGPQHHHHHHHHHHHHDGHMVDDMLSADDVSCSSSQVSAKSEKNMADFDGEESGCEEELVQINSHAELTSHLQQHLPNLASIYHEHLSQGPVVHKHQFNSNAVTDINLDNVCKKGNTLLWDIVQDEDAVNLSEGLINEAEKLLCSLVCWFTDRQIRMRFIEGCLENLGNNRSVVISLRLLPKLFGTFQQFGSSYDTHWITMWAEKELNMMKLFFDNLVYYIQTVREGRQKHALYSHSAEVQVRLQFLTCVFSTLGSPDHFRLSLEQVDILWHCLVEDSECYDDALHWFLNQVRSKDQHAMGMETYKHLFLEKMPQLKPETISMTGLNLFQHLCNLARLATSAYDGCSNSELCGMDQFWGIALRAQSGDVSRAAIQYINSYYINGKTGLEKEQEFISKCMESLMIASSSLEQESHSSLMVIERGLLMLKTHLEAFRRRFAYHLRQWQIEGTGISSHLKALSDKQSLPLRVVCQPAGLPDKMTIEMYPSDQVADLRAEVTHWYENLQKEQINQQAQLQEFGQSNRKGEFPGGLMGPVRMISSGHELTTDYDEKALHELGFKDMQMVFVSLGAPRRERKGEGVQLPASCLPPPQKDNIPMLLLLQEPHLTTLFDLLEMLASFKPPSGKVAVDDSESLRCEELHLHAENLSRRVWELLMLLPTCPNMLMAFQNISDEQSNDGFNWKELLKIKSAHKLLYALEIIEALGKPN

SEQ ID NO: 878722 - protein, 1630 aa, Homo sapiens
MCENCADLVEVLNEISDVEGGDGLQLRKEHTLKIFTYINSWTQRQCLCCFKEYKHLEIFNQVVCALINLVIAQVQVLRDQLCKHCTTINIDSTWQDESNQAEEPLNIDRECNEGSTERQKSIEKKSNSTRICNLTEEESSKSSDPFSLWSTDEKEKLLLCVAKIFQIQFPLYTAYKHNTHPTIEDISTQESNILGAFCDMNDVEVPLHLLRYVCLFCGKNGLSLMKDCFEYGTPETLPFLIAHAFITVVSNIRIWLHIPAVMQHIIPFRTYVIRYLCKLSDQELRQSAARNMADLMWSTVKEPLDTTLCFDKESLDLAFKYFMSPTLTMRLAGLSQITNQLHTFNDVCNNESLVSDTETSIAKELADWLISNNVVEHIFGPNLHIEIIKQCQVILNFLAAEGRLSTQHIDCIWAAAQLKHCSRYIHDLFPSLIKNLDPVPLRHLLNLVSALEPSVHTEQTLYLASMLIKALWNNALAAKAQLSKQSSFASLLNTNIPIGNKKEEEELRRTAPSPWSPAASPQSSDNSDTHQSGGSDIEMDEQLINRTKHVQQRLSDTEESMQGSSDETANSGEDGSSGPGSSSGHSDGSSNEVNSSHASQSAGSPGSEVQSEDIADIEALKEEDEDDDHGHNPPKSSCGTDLRNRKLESQAGICLGDSQGTSERNGTSSGTGKDLVFNTESLPSVDNRMRMLDACSHSEDPEHDISGEMNATHIAQGSQESCITRTGDFLGETIGNELFNCRQFIGPQHHHHHHHHHHHHDGHMVDDMLSADDVSCSSSQVSAKSEKNMADFDGEESGCEEELVQINSHAELTSHLQQHLPNLASIYHEHLSQGPVVHKHQFNSNAVTDINLDNVCKKGNTLLWDIVQDEDAVNLSEGLINEAEKLLCSLVCWFTDRQIRMRFIEGCLENLGNNRSVVISLRLLPKLFGTFQQFGSSYDTHWITMWAEKELNMMKLFFDNLVYYIQTVREGRQKHALYSHSAEVQVRLQFLTCVFSTLGSPDHFRLSLEQVDILWHCLVEDSECYDDALHWFLNQVRSKDQHAMGMETYKHLFLEKMPQLKPETISMTGLNLFQHLCNLARLATSAYDGCSNSELCGMDQFWGIALRAQSGDVSRAAIQYINSYYINGKTGLEKEQEFISKCMESLMIASSSLEQESHSSLMVIERGLLMLKTHLEAFRRRFAYHLRQWQIEGTGISSHLKALSDKQSLPLRVVCQPAGLPDKMTIEMYPSDQVADLRAEVTHWYENLQKEQINQQAQLQEFGQSNRKGEFPGGLMGPVRMISSGHELTTDYDEKALHELGFKDMQMVFVSLGAPRRERKGEGVQLPASCLPPPQKDNIPMLLLLQEPHLTTLFDLLEMLASFKPPSGKVAVDDSESLRCEELHLHAENLSRRVWELLMLLPTCPNMLMAFQISQMSRVLKAQSDHRSRHEVSHYSMWLLVSWAHCCSLVKSSLADSDHLQDWLKKLTLLIPETAVCHESCSGLYKLSLSGLDGGDSINRSFLLLAASTLLKFLPDAQALKPIRIDDYEEEPILKPGCKEYFWLLCKLVDNIHIKDASQTTLLDLDALARHLADCIRSREILDHQDGNVEDDGLTGLLRLATSVVKHKPPFKFSREGQVSVKIIKCFYEM

SEQ ID NO: 878723 - protein, 1273 aa, Homo sapiens
MRRKNSYYVWQKIFQIQFPLYTAYKHNTHPTIEDISTQESNILGAFCDMNDVEVPLHLLRYVCLFCGKNGLSLMKDCFEYGTPETLPFLIAHAFITVVSNIRIWLHIPAVMQHIIPFRTYVIRYLCKLSDQELRQSAARNMADLMWSTVKEPLDTTLCFDKESLDLAFKYFMSPTLTMRLAGLSQITNQLHTFNDVCNNESLVSDTETSIAKELADWLISNNVVEHIFGPNLHIEIIKQCQVILNFLAAEGRLSTQHIDCIWAAAQLKHCSRYIHDLFPSLIKNLDPVPLRHLLNLVSALEPSVHTEQTLYLASMLIKALWNNALAAKAQLSKQSSFASLLNTNIPIGNKKEEEELRRTAPSPWSPAASPQSSDNSDTHQSGGSDIEMDEQLINRTKHVQQRLSDTEESMQGSSDETANSGEDGSSGPGSSSGHSDGSSNEVNSSHASQSAGSPGSEVQSEDIADIEALKEEDEDDDHGHNPPKSSCGTDLRNRKLESQAGICLGDSQGTSERNGTSSGTGKDLVFNTESLPSVDNRMRMLDACSHSEDPEHDISGEMNATHIAQGSQESCITRTGDFLGETIGNELFNCRQFIGPQHHHHHHHHHHHHDGHMVDDMLSADDVSCSSSQVSAKSEKNMADFDGEESGCEEELVQINSHAELTSHLQQHLPNLASIYHEHLSQGPVVHKHQFNSNAVTDINLDNVCKKGNTLLWDIVQDEDAVNLSEGLINEAEKLLCSLVCWFTDRQIRMRFIEGCLENLGNNRSVVISLRLLPKLFGTFQQFGSSYDTHWITMWAEKELNMMKLFFDNLVYYIQTVREGRQKHALYSHSAEVQVRLQFLTCVFSTLGSPDHFRLSLEQVDILWHCLVEDSECYDDALHWFLNQVRSKDQHAMGMETYKHLFLEKMPQLKPETISMTGLNLFQHLCNLARLATSAYDGCSNSELCGMDQFWGIALRAQSGDVSRAAIQYINSYYINGKTGLEKEQEFISKCMESLMIASSSLEQESHSSLMVIERGLLMLKTHLEAFRRRFAYHLRQWQIEGTGISSHLKALSDKQSLPLRVVCQPAGLPDKMTIEMYPSDQVADLRAEVTHWYENLQKEQINQQAQLQEFGQSNRKGEFPGGLMGPVRMISSGHELTTDYDEKALHELGFKDMQMVFVSLGAPRRERKGEGVQLPASCLPPPQKDNIPMLLLLQEPHLTTLFDLLEMLASFKPPSGKVAVDDSESLRCEELHLHAENLSRRVWELLMLLPTCPNMLMAFQNISDEQSFKSSV
